United States Patent Application Publication US 2006/0150283 A1 - sequence listing, part 6

SEQ ID NO: 19481 - DNA, 1123 bp, Zea mays subsp. mays
  misc_feature (1)..(1123): Ceres Seq. ID no. 12425309
  misc_feature (1)..(1123): Ortholog of  Ceres SEQ ID NO 15176803 as cited in SEQ ID NO 52778
aacgcccgcgcatgcgcatgcccgtgtcgttgaggattccgagaggcctcgcggcggcgtggcctgggtggagaaggagcacatgttcgagaaggtggtcaccccgagcgacgtggggaagctcaatcgcctggtcatcccaaagcagcacgcggagcgctacttccccgcgctggacgcctcgtccgccgcggcggcggcggcggcagcagccgcgggaggcgggaaggggctggtgctcagcttcgaggaccgggcggggaaggcgtggcgcttccgctactcgtactggaacagcagccagagctacgtgatgaccaaaggttggagccgcttcgtgaaggagaagccctcggtgccggggacacagtcttgttcgcgcgcggcgcgggcggcgcgcgcggccgcttcttcatcgatttccgccgccgtcgccaggatctcgcgttcctgcagccgacgctggcgtctgcgcagcgactcctgccgctgccgtcggtgcccatctgcccgtggcaggactacggcgcctcggctccggcgcccaaccggcacgtgctgttcctgcggccgcaggtgccggccgccgtagtgctcaagtcggtccccgtgcacgttgctgcatccgcggtggaggcgaccatgtcgaagcgcgtccgcctgttcggggtgaacctcgactgcccgccggacgccgaagacagcgccacagtcccccggggccgggcggcgtcgacgacgcttctgcaactgccctcgccatcgtcgtcaacatcctcctcgacggcagggaaggacgtgtgctgtttggatcttggactgtgaagacaatcaacatcctctagcaaaaagaaggagaaattgggtcgaggaactgatggggcactgacacacgaactgatatggctccagtactgcatctgcatgtgtaattgttgatgaattggtatttcttgatgatatcctgctcatataatcatattagctcatttgtgctttccgtaactaatgtgtgtttcttctcttttcttgatttgatctttgttccgaggatatgatatcgatcttctcattataaatgtacatattctgaatcatctctgactaaattcagtaattattt

SEQ ID NO: 19482 - protein, 196 aa, Zea mays subsp. mays
  peptide (1)..(196): Ceres Seq. ID no. 12425310
TPAHAHARVVEDSERPRGGVAWVEKEHMFEKVVTPSDVGKLNRLVIPKQHAERYFPALDASSAAAAAAAAAAGGGKGLVLSFEDRAGKAWRFRYSYWNSSQSYVMTKGWSRFVKEKPSVPGTQSCSRAARAARAAASSSISAAVARISRSCSRRWRLRSDSCRCRRCPSARGRTTAPRLRRPTGTCCSCGRRCRPP

SEQ ID NO: 19483 - protein, 169 aa, Zea mays subsp. mays
  peptide (1)..(169): Ceres Seq. ID no. 12425311
MFEKVVTPSDVGKLNRLVIPKQHAERYFPALDASSAAAAAAAAAAGGGKGLVLSFEDRAGKAWRFRYSYWNSSQSYVMTKGWSRFVKEKPSVPGTQSCSRAARAARAAASSSISAAVARISRSCSRRWRLRSDSCRCRRCPSARGRTTAPRLRRPTGTCCSCGRRCRPP

SEQ ID NO: 19484 - protein, 103 aa, Zea mays subsp. mays
  peptide (1)..(103): Ceres Seq. ID no. 12425312
RPRMRMPVSLRIPRGLAAAWPGWRRSTCSRRWSPRATWGSSIAWSSQSSTRSATSPRWTPRPPRRRRRQQPREAGRGWCSASRTGRGRRGASATRTGTAARAT

SEQ ID NO: 19485 - DNA, 439 bp, Zea mays subsp. mays
  misc_feature (1)..(439): Ceres Seq. ID no. 1923620
  misc_feature (1)..(439): Ortholog of  Ceres SEQ ID NO 14305425 as cited in SEQ ID NO 0
agtccaagatctctccctcccacggcccgctcggactccccggcgcaatggcgaccgacgcgatcctggagacgatcaagccgcggcggagcgaggagcagctcccggtgaccacggcggccgccgccggcaccaggctgcggcggcgcgtgtcctcgttctcggcgcacgtgaggccgccgccggggctgtcgtcctcggcggcagcggcgttccggcgcgcgaggtcgatgccgaccgccaaggcgctggcggcggcgggcgcgctgcggcggtggtgggagtgggtgacggcgccgttcgcgccccgcggcgacgacgacgacgaggcaaggccgctgggcggttgccgctgcgcctgcgccggcggaccgggcgggtggcgccacgtcctggtcaggctccgcgccggcgcgcgccgactgctgggccgcgacgg

SEQ ID NO: 19486 - protein, 146 aa, Zea mays subsp. mays
  peptide (1)..(146): Ceres Seq. ID no. 1923621
VQDLSLPRPARTPRRNGDRRDPGDDQAAAERGAAPGDHGGRRRHQAAAARVLVLGAREAAAGAVVLGGSGVPAREVDADRQGAGGGGRAAAVVGVGDGAVRAPRRRRRRGKAAGRLPLRLRRRTGRVAPRPGQAPRRRAPTAGPRR

SEQ ID NO: 19487 - protein, 145 aa, Zea mays subsp. mays
  peptide (1)..(145): Ceres Seq. ID no. 1923622
SKISPSHGPLGLPGAMATDAILETIKPRRSEEQLPVTTAAAAGTRLRRRVSSFSAHVRPPPGLSSSAAAAFRRARSMPTAKALAAAGALRRWWEWVTAPFAPRGDDDDEARPLGGCRCACAGGPGGWRHVLVRLRAGARRLLGRD

SEQ ID NO: 19488 - protein, 130 aa, Zea mays subsp. mays
  peptide (1)..(130): Ceres Seq. ID no. 1923623
MATDAILETIKPRRSEEQLPVTTAAAAGTRLRRRVSSFSAHVRPPPGLSSSAAAAFRRARSMPTAKALAAAGALRRWWEWVTAPFAPRGDDDDEARPLGGCRCACAGGPGGWRHVLVRLRAGARRLLGRD

SEQ ID NO: 19489 - DNA, 1366 bp, Zea mays subsp. mays
  misc_feature (1)..(1366): Ceres Seq. ID no. 12383517
  misc_feature (1)..(1366): Ortholog of  Ceres SEQ ID NO 12465955 as cited in SEQ ID NO 147
ataaaaaaaacccgaaaaaacaccgagatccgcgcgttcctcggcgtccgcacggcccgcgcacgcactcacgcacccatccggttgccaacccatcccccgaccgacgccaccccacatacatgccgccgcccagcctcaccgccgccggcaccaccaccaccacaacccgccgccgcaacgaccgagccgcgaaggtccaccaggtactgggcgaaggcgcggggacggaggagatgggcgcggtggcggacgggtggacgcggcccgagtggtgctcggcggcgggcgtcgcgggcgtgctgcggcggcacccggcgcccgcgctcttcgggtgcggcctcctgctcttcatggccgtcgagtacaccatccccatggtcaagccggacgcgccgccgctcgacctaggcttcctcgccaccgcgggcatgcacgccgccatcgccgcgaggccctggcttaactcgctcctcgccgcgctcaacacggtcttcgtcgcgatgcaggcggcgtacatcctgtgggccatcctcgccgagcagcggccgcgcgcggccgtcgccgcgctcatgatgttcacttgccggggcgtgctgggctgcgccacccagctcccgctgccggaggagttcctgggctccgggatggacttccccgtgggcaacgtctccttcttcctcttcttctcgggccacgtcgcgggcgcggtgatcgcggcggccgacatgcggcgcgaggggcggctggcgctggcgcgcctcttcgactcgctcaacgtgctccaggtggtcaggctgctcgcgtgcaggggacactacaccattgacctggcctgttggcgttggcgcgggcatcctcttcgacacgctctccggatggtacttcgacgccaagaacggcgatagcagcaacgcaccggagaagcagtgccggagctgccagtgccacaaggccctcctttcacactagtagtactattatattttgctagctctgcaagtgccaaccatcaacgtccaactggctgacaatgggctataaattttgcactataaaatttaagtatctaatcgggttaagattaggctctatttttagtcatttttgaactataatttattaagtgccttgacattttgtgaagaaccatatggatcacaatccattaccacccctacgtctaagtgagcattgttagctaattcgtgtcatttttttaagtttcttctcttttatggaatcattttggtgtaagataatgtattcaaatgctacttacggatatgtaactgtacaaattgttcgcccggtgcgagctgtaacatttttatctgaagtttgcaagtagaggactagactaggc

SEQ ID NO: 19490 - protein, 301 aa, Zea mays subsp. mays
  peptide (1)..(301): Ceres Seq. ID no. 12383518
KKNPKKHRDPRVPRRPHGPRTHSRTHPVANPSPDRRHPTYMPPPSLTAAGTTTTTTRRRNDRAAKVHQVLGEGAGTEEMGAVADGWTRPEWCSAAGVAGVLRRHPAPALFGCGLLLFMAVEYTIPMVKPDAPPLDLGFLATAGMHAAIAARPWLNSLLAALNTVFVAMQAAYILWAILAEQRPRAAVAALMMFTCRGVLGCATQLPLPEEFLGSGMDFPVGNVSFFLFFSGHVAGAVIAAADMRREGRLALARLFDSLNVLQVVRLLACRGHYTIDLACWRWRGHPLRHALRMVLRRQERR

SEQ ID NO: 19491 - protein, 261 aa, Zea mays subsp. mays
  peptide (1)..(261): Ceres Seq. ID no. 12383519
MPPPSLTAAGTTTTTTRRRNDRAAKVHQVLGEGAGTEEMGAVADGWTRPEWCSAAGVAGVLRRHPAPALFGCGLLLFMAVEYTIPMVKPDAPPLDLGFLATAGMHAAIAARPWLNSLLAALNTVFVAMQAAYILWAILAEQRPRAAVAALMMFTCRGVLGCATQLPLPEEFLGSGMDFPVGNVSFFLFFSGHVAGAVIAAADMRREGRLALARLFDSLNVLQVVRLLACRGHYTIDLACWRWRGHPLRHALRMVLRRQERR

SEQ ID NO: 19492 - protein, 223 aa, Zea mays subsp. mays
  peptide (1)..(223): Ceres Seq. ID no. 12383520
MGAVADGWTRPEWCSAAGVAGVLRRHPAPALFGCGLLLFMAVEYTIPMVKPDAPPLDLGFLATAGMHAAIAARPWLNSLLAALNTVFVAMQAAYILWAILAEQRPRAAVAALMMFTCRGVLGCATQLPLPEEFLGSGMDFPVGNVSFFLFFSGHVAGAVIAAADMRREGRLALARLFDSLNVLQVVRLLACRGHYTIDLACWRWRGHPLRHALRMVLRRQERR

SEQ ID NO: 19493 - DNA, 1285 bp, Zea mays subsp. mays
  misc_feature (1)..(1285): Ceres Seq. ID no. 13492017
  misc_feature (1)..(1285): Ortholog of  Ceres SEQ ID NO 13594727 as cited in SEQ ID NO 52169
  misc_feature (1)..(1285): Ortholog of  Ceres SEQ ID NO 15175496 as cited in SEQ ID NO 56127
  misc_feature (1)..(1285): Ortholog of  Ceres SEQ ID NO 14301430 as cited in SEQ ID NO 56553
  misc_feature (1)..(1285): Ortholog of  Ceres SEQ ID NO 13639124 as cited in SEQ ID NO 56718
  misc_feature (1)..(1285): Ortholog of  Ceres SEQ ID NO 15175700 as cited in SEQ ID NO 58584
  misc_feature (1)..(1285): Ortholog of  Ceres SEQ ID NO 13596474 as cited in SEQ ID NO 62169
  misc_feature (1)..(1285): Ortholog of  Ceres SEQ ID NO 13596969 as cited in SEQ ID NO 63375
  misc_feature (1)..(1285): Ortholog of  Ceres SEQ ID NO 14302240 as cited in SEQ ID NO 64162
  misc_feature (1)..(1285): Ortholog of  Ceres SEQ ID NO 13597519 as cited in SEQ ID NO 64759
  misc_feature (1)..(1285): Ortholog of  Ceres SEQ ID NO 13597870 as cited in SEQ ID NO 64982
  misc_feature (1)..(1285): Ortholog of  Ceres SEQ ID NO 13595926 as cited in SEQ ID NO 67778
  misc_feature (1)..(1285): Ortholog of  Ceres SEQ ID NO 13662323 as cited in SEQ ID NO 68305
agcaacagccatgacgacgacgaagcggcactgcttgcgcttcaccaccgtcctggcgacgacgcttctctccgccaccgccgcctgcctcgacgtcggcttctacgacaggacatgccccactgccgagaccatcgtgcagcagaccgtggcggccgcgttcaggaacaactccggcgtcgctccggcgctgatccgcatgcacttccatgactgctttgtcaggggctgcgatggctcggtgctgatcgacacggtaggcaacctgacggcggagaaggacgcgccacccaacaaccccagcctccggttcttcgacgtggtcgaccgtgccaaggcgtcactggaggctcagtgccccggcgtggtctcctgcgccgacgtgctcgccttcgcggccagggacagcgtcgtgctctccggtggcctcggctaccaggtgccgggcggacgccgtgacgggcggatatccaatgacaccgaagccctcaacaacctgcctccgccgttcttcaacgccaccgagctggcagacaggttcgcctccaagaacctcactatcgaggacctggtcgtgctctcgggcgcgcacaccatcggcgtctcgcactgcagcggcttcgccggcccgacagacctgaacggccccgttgaccggctctacaacttcagctcgcctgacgggattgacccgacgctgagcaaagcctacgcatttcttctcaagagcatctgcccggccaacaccagccagttcttcccgaacacgacggtgttcatggacctcatcacgccggaaaggtttgacaacaagtactacgtcggcctgaccaacaacctgggcctcttcaagtcagacgtggcgctgctgaccaacgcgacgatgaaggccctggtcgactccttcgtgcgcagcgaggcgactttcaggaccaagtttgccaggtccatgatcaagatggggcagatcgaggtgctgacggggacgcagggcgagatcaggcgcaactgcagggtcatcaaccccgttagtgccaccgatgatgtcgtcctcgcccgcccatcaggattcactggagtggctgcgagctagctaaccaactgtcggttcatgcacatgcattgtgcagtgtgtgatgtctagtgtgagttgatgtgtgaaattgtaataagtaatgagcagattatcttggtaagctcgcttgttactgtggcaaaagttgttttgttgcatgacaaaaatgtatactcatcggattattgaaaacaaaactgatatttgttc

SEQ ID NO: 19494 - protein, 363 aa, Zea mays subsp. mays
  peptide (1)..(363): Ceres Seq. ID no. 13492018
ATAMTTTKRHCLRFTTVLATTLLSATAACLDVGFYDRTCPTAETIVQQTVAAAFRNNSGVAPALIRMHFHDCFVRGCDGSVLIDTVGNLTAEKDAPPNNPSLRFFDVVDRAKASLEAQCPGVVSCADVLAFAARDSVVLSGGLGYQVPGGRRDGRISNDTEALNNLPPPFFNATELADRFASKNLTIEDLVVLSGAHTIGVSHCSGFAGPTDLNGPVDRLYNFSSPDGIDPTLSKAYAFLLKSICPANTSQFFPNTTVFMDLITPERFDNKYYVGLTNNLGLFKSDVALLTNATMKALVDSFVRSEATFRTKFARSMIKMGQIEVLTGTQGEIRRNCRVINPVSATDDVVLARPSGFTGVAAS

SEQ ID NO: 19495 - protein, 360 aa, Zea mays subsp. mays
  peptide (1)..(360): Ceres Seq. ID no. 13492019
MTTTKRHCLRFTTVLATTLLSATAACLDVGFYDRTCPTAETIVQQTVAAAFRNNSGVAPALIRMHFHDCFVRGCDGSVLIDTVGNLTAEKDAPPNNPSLRFFDVVDRAKASLEAQCPGVVSCADVLAFAARDSVVLSGGLGYQVPGGRRDGRISNDTEALNNLPPPFFNATELADRFASKNLTIEDLVVLSGAHTIGVSHCSGFAGPTDLNGPVDRLYNFSSPDGIDPTLSKAYAFLLKSICPANTSQFFPNTTVFMDLITPERFDNKYYVGLTNNLGLFKSDVALLTNATMKALVDSFVRSEATFRTKFARSMIKMGQIEVLTGTQGEIRRNCRVINPVSATDDVVLARPSGFTGVAAS

SEQ ID NO: 19496 - protein, 297 aa, Zea mays subsp. mays
  peptide (1)..(297): Ceres Seq. ID no. 13492020
MHFHDCFVRGCDGSVLIDTVGNLTAEKDAPPNNPSLRFFDVVDRAKASLEAQCPGVVSCADVLAFAARDSVVLSGGLGYQVPGGRRDGRISNDTEALNNLPPPFFNATELADRFASKNLTIEDLVVLSGAHTIGVSHCSGFAGPTDLNGPVDRLYNFSSPDGIDPTLSKAYAFLLKSICPANTSQFFPNTTVFMDLITPERFDNKYYVGLTNNLGLFKSDVALLTNATMKALVDSFVRSEATFRTKFARSMIKMGQIEVLTGTQGEIRRNCRVINPVSATDDVVLARPSGFTGVAAS

SEQ ID NO: 19497 - DNA, 2024 bp, Zea mays subsp. mays
  misc_feature (1)..(2024): Ceres Seq. ID no. 12375886
  misc_feature (1)..(2024): Ortholog of  Ceres SEQ ID NO 12605517 as cited in SEQ ID NO 20422
gcacgagaccattacctagaacatcctaatcgaaaaaactacaactgttggagtaggcccgggttggccacggccgccacactgctccgctctgctctgctctctgaaggcattgcctgcccggttccttcccccgccggcgtcgtcggtccgcgagttgttggcatggccgccgcagggacgcagctaggccggcttctgggcggcctctggttcctggccgcgttgctaggacgaccgggcgctacggcggcggcaccagctgtggccgccgtcgacgggcggcgcgccgtcgcggcgaccggggaggacttcgtgtgcgcgacgttggactggtggccgccggacaagtgcgactacggcacctgcgcctggggccgcgccggcctgctcaacctggatctctccaacaaggtcctgctcaatgccgtcagagccttctcgccgccgctgctgctccgcctgggagggtcgctgcaggacaaggtggtgtacgggtacggcgccggtcggccgtgcgcgccgttcgtcaggaacgcgtcggagatgcacggcttctcgcagggctgcctgcccctgcgcaggtgggacgacctcaacgccttcttccggagatccggtgccaaggtcgtgttcgggctcaacgcgctgaacggccgcgtcccgttgccggacgggtccatgggagggccgtgggactacaccaacgcggcgtcgctgatccggtacaccgcgaacaagggctaccgaatccatggatgggagcttgggaacgaactgagcggcactggagtgggagctcgggttggcgcggaccagtacgccgcagacgtgatcgccctgaaagcgctagtcgacgacgtgtaccggagcgagccatcgaagccgctggtgcttgctcccggaggattcttcgaccaagcctggttcactgagcttgtcgtcaagaccgggccggatctactgagcgtggtcacgcaccacgtctacaatctaggaccaggaagggacacgcatctgatcgacaagatcctcgacccgtcaaccctcgacgggatggtcagcacgttcagcgacctccagcggctgctcaagtccacggggacgtcggctgtcgcgtgggtcggggaagccggaggcgcctacaacagcggccgccacctcgtcacggacgcgttcgtgttcagcttctggtttttagatcagcttgggatggcagcgaggttcgacaccaagagctactgcaggcagagtttggtcggcggcaactacggcctgctaaacaccacgacgttccagcctaaccctgattattacagtgctctactgtggcatcgcctcatggggaccgaagttctagcagtaacattcagcggcacgaacaagatccgcgcgtacgcgcactgcgcgagagattcaccaggaatcactctgctgctgatcaacctgagcggcaacgccaccgcgcgggtctcggtgacggcccaaggggctgccgcggcgcacgcgcacaggcacggcgcgaggaagcacggcggcggcaggaagttccggcacgtgcacgtccccggcttcgccggcgccggcgaggcggcagcgggcgccgtgcgacacgagtaccacctcacccccaaggacggcgacctgacgagccaggtcgtgatgctgaacggcagggcgttggccaccgacgcggcggggaacatccccgccctggaggcggtcgaggtggacgcggcgcggcccatcgccgtcacgccctactccatcgtgttcgctcgcgttccgcatttcagtgccccggcgtgtagggtagaccggtagagtagcggtttagatgggtagattcataatgggtttggcgtgattggtgatgatggacagctaagctttccatctggtgagatgaggtgaagtgaggtgcaaggcatctgtcgaaagaaaagggatgcaatgcaatgggggtgagtttgttttctttttacgattggaattgtaaaaggtcgaagaaatttatgatgatc

SEQ ID NO: 19498 - protein, 607 aa, Zea mays subsp. mays
  peptide (1)..(607): Ceres Seq. ID no. 12375887
ARDHYLEHPNRKNYNCWSRPGLATAATLLRSALLSEGIACPVPSPAGVVGPRVVGMAAAGTQLGRLLGGLWFLAALLGRPGATAAAPAVAAVDGRRAVAATGEDFVCATLDWWPPDKCDYGTCAWGRAGLLNLDLSNKVLLNAVRAFSPPLLLRLGGSLQDKVVYGYGAGRPCAPFVRNASEMHGFSQGCLPLRRWDDLNAFFRRSGAKVVFGLNALNGRVPLPDGSMGGPWDYTNAASLIRYTANKGYRIHGWELGNELSGTGVGARVGADQYAADVIALKALVDDVYRSEPSKPLVLAPGGFFDQAWFTELVVKTGPDLLSVVTHHVYNLGPGRDTHLIDKILDPSTLDGMVSTFSDLQRLLKSTGTSAVAWVGEAGGAYNSGRHLVTDAFVFSFWFLDQLGMAARFDTKSYCRQSLVGGNYGLLNTTTFQPNPDYYSALLWHRLMGTEVLAVTFSGTNKIRAYAHCARDSPGITLLLINLSGNATARVSVTAQGAAAAHAHRHGARKHGGGRKFRHVHVPGFAGAGEAAAGAVRHEYHLTPKDGDLTSQVVMLNGRALATDAAGNIPALEAVEVDAARPIAVTPYSIVFARVPHFSAPACRVDR

SEQ ID NO: 19499 - protein, 552 aa, Zea mays subsp. mays
  peptide (1)..(552): Ceres Seq. ID no. 12375888
MAAAGTQLGRLLGGLWFLAALLGRPGATAAAPAVAAVDGRRAVAATGEDFVCATLDWWPPDKCDYGTCAWGRAGLLNLDLSNKVLLNAVRAFSPPLLLRLGGSLQDKVVYGYGAGRPCAPFVRNASEMHGFSQGCLPLRRWDDLNAFFRRSGAKVVFGLNALNGRVPLPDGSMGGPWDYTNAASLIRYTANKGYRIHGWELGNELSGTGVGARVGADQYAADVIALKALVDDVYRSEPSKPLVLAPGGFFDQAWFTELVVKTGPDLLSVVTHHVYNLGPGRDTHLIDKILDPSTLDGMVSTFSDLQRLLKSTGTSAVAWVGEAGGAYNSGRHLVTDAFVFSFWFLDQLGMAARFDTKSYCRQSLVGGNYGLLNTTTFQPNPDYYSALLWHRLMGTEVLAVTFSGTNKIRAYAHCARDSPGITLLLINLSGNATARVSVTAQGAAAAHAHRHGARKHGGGRKFRHVHVPGFAGAGEAAAGAVRHEYHLTPKDGDLTSQVVMLNGRALATDAAGNIPALEAVEVDAARPIAVTPYSIVFARVPHFSAPACRVDR

SEQ ID NO: 19500 - protein, 425 aa, Zea mays subsp. mays
  peptide (1)..(425): Ceres Seq. ID no. 12375889
MHGFSQGCLPLRRWDDLNAFFRRSGAKVVFGLNALNGRVPLPDGSMGGPWDYTNAASLIRYTANKGYRIHGWELGNELSGTGVGARVGADQYAADVIALKALVDDVYRSEPSKPLVLAPGGFFDQAWFTELVVKTGPDLLSVVTHHVYNLGPGRDTHLIDKILDPSTLDGMVSTFSDLQRLLKSTGTSAVAWVGEAGGAYNSGRHLVTDAFVFSFWFLDQLGMAARFDTKSYCRQSLVGGNYGLLNTTTFQPNPDYYSALLWHRLMGTEVLAVTFSGTNKIRAYAHCARDSPGITLLLINLSGNATARVSVTAQGAAAAHAHRHGARKHGGGRKFRHVHVPGFAGAGEAAAGAVRHEYHLTPKDGDLTSQVVMLNGRALATDAAGNIPALEAVEVDAARPIAVTPYSIVFARVPHFSAPACRVDR

SEQ ID NO: 19501 - DNA, 1392 bp, Zea mays subsp. mays
  misc_feature (1)..(1392): Ceres Seq. ID no. 12380100
  misc_feature (1)..(1392): Ortholog of  Ceres SEQ ID NO 15179622 as cited in SEQ ID NO 61057
gcacgagaccattacctagaacatcctaatcgaaaagacgcaccgcacaccctagcataggaggcaaagaagtacagagggaggaggcgggcagcagatacgcggcgtgacagacacccagggccaggaagggtgctgtttatccatgctgctccggctgaagatcgtcgtcggcgtccactcggtggtgctcccggttcctgttccaggcggctatggccatggcgcctgctacgcggcagtagagccctgctggcgccgcagccggaggccagctctagcggcggcgggtggcctcgtcgcgaggcggccgaggcagagcgccacggtggtgatggcgctgaaggaggagccggagggcagcagccgccgcggcttcgccggcggcggtccgagctgggaccccgggctggagatccaagtccccttcgagcaaagaccggtgaacgagtactcctgctctcaagtatagcgccctctactcgtgggcggagctgagcccagggtccttcttcctccgcctcggcggcctgtgcctcgtgaccttcactgtgctcgcggctccaattgccgccgcaagcttcaatccaggaaaggatccactcaagttcgtgctagcagctgggatcgggacgctgcttctggtgtcactggcggttctcaggatatacctggggtggagctacgttggtgatcgcctgctgtcagcggtggtaccgtacgaagaaaccggatggtacgacggccagatgtgggtgaagccaccagaggtgttggcccgtgacaggctcctgggatcttacaaggtgaagccggtggtcaacctgctgaagcagacgctggtgggcaccggcgcggctgctcgtgggcgccgtgtcgctcttcgcgttcgccgcgccggtcgaggacttcctccacgccctgagccagcctccctcctccgccaccgcctcgtccaagccgagcttgaggaaggaggagctgctgcggctaccagtcgaggtgatgcaggacgacgacctcgctgcggccgcggccgaggccgccgacggccggcccgtctactgcagggaccgctactaccgggccctcgccggcggtcagtactgcaggtgggacgacctgctcaactgataaatacctagagcagtattgctgtggtacgacgcggcaggacaggacgtattttttttgtcagatgggaaatttcggactgaactgctagaaattgagttcttaatggcacacaagcataaggaacagcaagaaaaagcaacacagaatcagagaaaaaacaagagtttatatattcacttttctctctttgtttctggagttacatctggtctttccgtttcttgagttacctctgatctttttgtttcttgagtt

SEQ ID NO: 19502 - protein, 131 aa, Zea mays subsp. mays
  peptide (1)..(131): Ceres Seq. ID no. 12380101
MWVKPPEVLARDRLLGSYKVKPVVNLLKQTLVGTGAAARGRRVALRVRRAGRGLPPRPEPASLLRHRLVQAELEEGGAAAATSRGDAGRRPRCGRGRGRRRPARLLQGPLLPGPRRRSVLQVGRPAQLINT

SEQ ID NO: 19503 - protein, 108 aa, Zea mays subsp. mays
  peptide (1)..(108): Ceres Seq. ID no. 12380102
MLLRLKIVVGVHSVVLPVPVPGGYGHGACYAAVEPCWRRSRRPALAAAGGLVARRPRQSATVVMALKEEPEGSSRRGFAGGGPSWDPGLEIQVPFEQRPVNEYSCSQV

SEQ ID NO: 19504 - DNA, 1054 bp, Zea mays subsp. mays
  misc_feature (1)..(1054): Ceres Seq. ID no. 12419744
  misc_feature (1)..(1054): Ortholog of  Ceres SEQ ID NO 15226744 as cited in SEQ ID NO 61720
aaaaaagatgtcgaactccacgatcgatcactgatcgacatcgctgtccgctgcccggcttcctttctctccccatatccatatcagatcctgcggcgaattccttccaactccaggatcgagagcacacgcagatggcgaggcacccgcgcgcgccgctgctccggcgtctgctcctcctggcggccctcgcggcctcctgctcctactacctcctcttcctgcaggcgcaggcctccgtcccgccgcggtacgacgggttcgcctacggcggcggcgccgcgacggcctggaaggacgccgtcctcgtcgaggcctttctcgacccgctctgccccgacagccgcgacgcctggcagccgctgaagctcgccgtcgagcgatacgcgccgcgggtctcactcatcgtccacccgttcccactaccataccacacatatgcattctatgcctgccgcgcgctttacatagctaacaagttgaattcatcatcgacatatccattgctggagctgttcttcaagaaccaggaaaagttctacaattctgccacatcatctctctcgggcccttccgtagctctaggaatgtcgaagatggctgcgcagactgttggtaactcagtatccgagtttctgtcgggcttcagcgatgggaagacagactcggcagcgagagtttcattcaagtacgggtgcacgaggggagtctttggcgcgccgttcttctttgtgaatggcttcctccagcctgggggcggatcgcctatcgactacagcacgtggatcggnatcctanacccccttgtttcccagaacggtgaacggatcgagatgtttacttcgatgtaagtgattgaagtggccttgctacagaggatacggtcgtacagatgtttcgctagtgccgacggcggacaagcaaacagctattatgcaattgcaaactgtgtgtaagctctgcagtggtaaatagcatcccactttgctcgttgtactgttaagctagcagttgtgtgctagctagtatatcggggtaagtatgtgaagaagct

SEQ ID NO: 19505 - protein, 282 aa, Zea mays subsp. mays
  peptide (1)..(282): Ceres Seq. ID no. 12419745
  misc_feature (263)..(263): Xaa is any aa, unknown or other
  misc_feature (266)..(266): Xaa is any aa, unknown or other
KRCRTPRSITDRHRCPLPGFLSLPISISDPAANSFQLQDREHTQMARHPRAPLLRRLLLLAALAASCSYYLLFLQAQASVPPRYDGFAYGGGAATAWKDAVLVEAFLDPLCPDSRDAWQPLKLAVERYAPRVSLIVHPFPLPYHTYAFYACRALYIANKLNSSSTYPLLELFFKNQEKFYNSATSSLSGPSVALGMSKMAAQTVGNSVSEFLSGFSDGKTDSAARVSFKYGCTRGVFGAPFFFVNGFLQPGGGSPIDYSTWIXILXPLVSQNGERIEMFTSM

SEQ ID NO: 19506 - protein, 238 aa, Zea mays subsp. mays
  peptide (1)..(238): Ceres Seq. ID no. 12419746
  misc_feature (219)..(219): Xaa is any aa, unknown or other
  misc_feature (222)..(222): Xaa is any aa, unknown or other
MARHPRAPLLRRLLLLAALAASCSYYLLFLQAQASVPPRYDGFAYGGGAATAWKDAVLVEAFLDPLCPDSRDAWQPLKLAVERYAPRVSLIVHPFPLPYHTYAFYACRALYIANKLNSSSTYPLLELFFKNQEKFYNSATSSLSGPSVALGMSKMAAQTVGNSVSEFLSGFSDGKTDSAARVSFKYGCTRGVFGAPFFFVNGFLQPGGGSPIDYSTWIXILXPLVSQNGERIEMFTSM

SEQ ID NO: 19507 - DNA, 466 bp, Zea mays subsp. mays
  misc_feature (1)..(466): Ceres Seq. ID no. 1959522
  misc_feature (1)..(466): Ortholog of  Ceres SEQ ID NO 14307896 as cited in SEQ ID NO 66915
tcagaacattgaagagtttacatggttaaactcaagctacagtccagtgctgaagcagttggaaacgcggtttatgattgattactacttcagaactgggcatgctaggcacgatgaaaatcccaagtttcggaaccccaagtacttgtcaattctcaaccatctgaggttctatctccctgagatcttcccaagacttaacaaggtgttatttctggatgatgatactgtagtgcagcgagacctaagtgcgctttggttggtagatctcaaaggcaaggttaatggtgctgtcgagacctgtagacaggacttccataggtttgataagtacctcaacttctcaaaccctcttattgccaagaattttgatccacatgcttgtggttgggcatatggcatgaacatgtttgatttgtccgactggagaaagcaaaacatcactgaggtctaccatacctggcag

SEQ ID NO: 19508 - protein, 155 aa, Zea mays subsp. mays
  peptide (1)..(155): Ceres Seq. ID no. 1959523
QNIEEFTWLNSSYSPVLKQLETRFMIDYYFRTGHARHDENPKFRNPKYLSILNHLRFYLPEIFPRLNKVLFLDDDTVVQRDLSALWLVDLKGKVNGAVETCRQDFHRFDKYLNFSNPLIAKNFDPHACGWAYGMNMFDLSDWRKQNITEVYHTWQ

SEQ ID NO: 19509 - protein, 131 aa, Zea mays subsp. mays
  peptide (1)..(131): Ceres Seq. ID no. 1959524
MIDYYFRTGHARHDENPKFRNPKYLSILNHLRFYLPEIFPRLNKVLFLDDDTVVQRDLSALWLVDLKGKVNGAVETCRQDFHRFDKYLNFSNPLIAKNFDPHACGWAYGMNMFDLSDWRKQNITEVYHTWQ

SEQ ID NO: 19510 - DNA, 1875 bp, Zea mays subsp. mays; identical to SEQ ID NO: 2869
  misc_feature (1)..(1875): Ceres Seq. ID no. 12364204
  misc_feature (1)..(1875): Ortholog of  Ceres SEQ ID NO 14307534 as cited in SEQ ID NO 55715
  misc_feature (1)..(1875): Ortholog of  Ceres SEQ ID NO 14307548 as cited in SEQ ID NO 58859

SEQ ID NO: 19511 - protein, 516 aa, Zea mays subsp. mays; identical to SEQ ID NO: 2870
  peptide (1)..(516): Ceres Seq. ID no. 12364205

SEQ ID NO: 19512 - protein, 344 aa, Zea mays subsp. mays; identical to SEQ ID NO: 2871
  peptide (1)..(344): Ceres Seq. ID no. 12364206

SEQ ID NO: 19513 - protein, 279 aa, Zea mays subsp. mays; identical to SEQ ID NO: 2872
  peptide (1)..(279): Ceres Seq. ID no. 12364207

SEQ ID NO: 19514 - DNA, 2064 bp, Zea mays subsp. mays
  misc_feature (1)..(2064): Ceres Seq. ID no. 12364043
  misc_feature (1)..(2064): Ortholog of  Ceres SEQ ID NO 15174879 as cited in SEQ ID NO 53786
  misc_feature (1)..(2064): Ortholog of  Ceres SEQ ID NO 14313336 as cited in SEQ ID NO 55501
  misc_feature (1)..(2064): Ortholog of  Ceres SEQ ID NO 13655640 as cited in SEQ ID NO 63844
  misc_feature (1)..(2064): Ortholog of  Ceres SEQ ID NO 13584744 as cited in SEQ ID NO 69137
gcacgagaccattacctagaacatcctaatcgaaaaatagtggtctatgtcaaatcttctagcgctcgcaattcttctcctctccaccacgccggcgccgacggccggtgaacagaccatctgcagcgatgccacgtacgagcgaaacagcacatacaagtccagtctgaggtcggtagccggcgcactgaccggggacgccgcgaggctgcactcgtccaccggcgctgcaggggagggccccgacaaggtctacggcgccgtgctctgccgggcggacacagcgggtgctgactgcgccaggcgcctccgggacgcccttgccgccatcaccgacggggacggccgctcgcgttgcgcgctccacagggacgtggccgtctactccgagctgtaccagctccgtttctccgacagggacttcctcgccgacttcagcaacgcgccggaatgggtcgacgtcacgaacccaggccccgtgccgctcgccgtggccgcgcggttcgaccagcgggtcacggagctgctgagcgcgctcgctgacgcggcggcggggcgaccgggcaggtgggccgtcggcgaagcgccgtggtcgtcgtcggggggcagggaccgggcggtgtacgcgctggcgcagtgcacgctggacatgccgccggaccactgccgggcctgcctcgatggcgccatggcagagcggcgacggaaggtcggcggcggcaagatgggcgcggcagtcttcggggcgcggtgcaccctgcggtatgagatggatctgcagttcttcaacgtcactggcaacagcaagatgctgtccctgcttgggaagaagaaagaccgtgcgttcgtcatcgttgcaacagcttacgcttcggcaatcctctgtacacgcttgcttttctggctgctaagcgtctggaggaaacaaaaaaggaaaatggacttgacggaggagccccagaatgtggatgaaatactcaggtcatggagaattgaagatgctagtttagagttctcgctgtatgatttctctcagattgctgatgccacagtcaacttctcacccaaaaatatgataggggagggcggatttggcccagtttacaagggagtacttactgatggacaagaggtagcgataaaaagactgtctgctcggtcacgacaaggtctagtagagttcaagaatgagatccaggttatagcaaagcttcagcacagaaacctcgtcaggctccttggctgttgcatccatgaagaagagaagatgctggtctacgaatacctgacgaacaaaagcttggaccacttcatttttgatccaatcagacaggcatcgcttgattggaagagacggattaaaatagttgatggtatagcccagggactcctgtacctccacaatctctcgagaatacgcatcatccacagggacttgaaagcaggtaacatcctgttagattctgacctaaacccgaaaatctctgatttcgggatggcgaggatatttccatcggatgccactcaagcaacagccagcagactcgtgggcacatatggatacatggctcctgaatatgtgtctgatggccttctctcgatcaagtcagatgttttcagtttcggggtcctgcttcttgagattataagtggaaagaggagctcaggttttcagcacaatggagagttctacaaccttcttgaatacgcctgggaactgtggaaggatagaagatggaatgagttcattgatcaatcctttggtgatgactacgaactggaagagctgatgaaataccttgctgtggcattgctgtgtgttcaagaaaaaacagtagatcgtcccacaatgcctgatgttgttgcagttcttagcagcgatggcgtcactttgccagaaccaaagcagccagcttactcctatgcgaaagtagatgtgtcagtaaatgtcgctgtgttgagtagcagaaatgatgttaccatcactactacaaatggcagataatagaatgtaatactgttaataaagtgtgcgctacaggtcttggtcatcctccttgtgtt

SEQ ID NO: 19515 - protein, 652 aa, Zea mays subsp. mays
  peptide (1)..(652): Ceres Seq. ID no. 12364044
MSNLLALAILLLSTTPAPTAGEQTICSDATYERNSTYKSSLRSVAGALTGDAARLHSSTGAAGEGPDKVYGAVLCRADTAGADCARRLRDALAAITDGDGRSRCALHRDVAVYSELYQLRFSDRDFLADFSNAPEWVDVTNPGPVPLAVAARFDQRVTELLSALADAAAGRPGRWAVGEAPWSSSGGRDRAVYALAQCTLDMPPDHCRACLDGAMAERRRKVGGGKMGAAVFGARCTLRYEMDLQFFNVTGNSKMLSLLGKKKDRAFVIVATAYASAILCTRLLFWLLSVWRKQKRKMDLTEEPQNVDEILRSWRIEDASLEFSLYDFSQIADATVNFSPKNMIGEGGFGPVYKGVLTDGQEVAIKRLSARSRQGLVEFKNEIQVIAKLQHRNLVRLLGCCIHEEEKMLVYEYLTNKSLDHFIFDPIRQASLDWKRRIKIVDGIAQGLLYLHNLSRIRIIHRDLKAGNILLDSDLNPKISDFGMARIFPSDATQATASRLVGTYGYMAPEYVSDGLLSIKSDVFSFGVLLLEIISGKRSSGFQHNGEFYNLLEYAWELWKDRRWNEFIDQSFGDDYELEELMKYLAVALLCVQEKTVDRPTMPDVVAVLSSDGVTLPEPKQPAYSYAKVDVSVNVAVLSSRNDVTITTTNGR

SEQ ID NO: 19516 - protein, 451 aa, Zea mays subsp. mays
  peptide (1)..(451): Ceres Seq. ID no. 12364045
MPPDHCRACLDGAMAERRRKVGGGKMGAAVFGARCTLRYEMDLQFFNVTGNSKMLSLLGKKKDRAFVIVATAYASAILCTRLLFWLLSVWRKQKRKMDLTEEPQNVDEILRSWRIEDASLEFSLYDFSQIADATVNFSPKNMIGEGGFGPVYKGVLTDGQEVAIKRLSARSRQGLVEFKNEIQVIAKLQHRNLVRLLGCCIHEEEKMLVYEYLTNKSLDHFIFDPIRQASLDWKRRIKIVDGIAQGLLYLHNLSRIRIIHRDLKAGNILLDSDLNPKISDFGMARIFPSDATQATASRLVGTYGYMAPEYVSDGLLSIKSDVFSFGVLLLEIISGKRSSGFQHNGEFYNLLEYAWELWKDRRWNEFIDQSFGDDYELEELMKYLAVALLCVQEKTVDRPTMPDVVAVLSSDGVTLPEPKQPAYSYAKVDVSVNVAVLSSRNDVTITTTNGR

SEQ ID NO: 19517 - protein, 438 aa, Zea mays subsp. mays
  peptide (1)..(438): Ceres Seq. ID no. 12364046
MAERRRKVGGGKMGAAVFGARCTLRYEMDLQFFNVTGNSKMLSLLGKKKDRAFVIVATAYASAILCTRLLFWLLSVWRKQKRKMDLTEEPQNVDEILRSWRIEDASLEFSLYDFSQIADATVNFSPKNMIGEGGFGPVYKGVLTDGQEVAIKRLSARSRQGLVEFKNEIQVIAKLQHRNLVRLLGCCIHEEEKMLVYEYLTNKSLDHFIFDPIRQASLDWKRRIKIVDGIAQGLLYLHNLSRIRIIHRDLKAGNILLDSDLNPKISDFGMARIFPSDATQATASRLVGTYGYMAPEYVSDGLLSIKSDVFSFGVLLLEIISGKRSSGFQHNGEFYNLLEYAWELWKDRRWNEFIDQSFGDDYELEELMKYLAVALLCVQEKTVDRPTMPDVVAVLSSDGVTLPEPKQPAYSYAKVDVSVNVAVLSSRNDVTITTTNGR

SEQ ID NO: 19518 - DNA, 1292 bp, Zea mays subsp. mays
  misc_feature (1)..(1292): Ceres Seq. ID no. 12358774
  misc_feature (1)..(1292): Ortholog of  Ceres SEQ ID NO 15225703 as cited in SEQ ID NO 59527
  misc_feature (1)..(1292): Ortholog of  Ceres SEQ ID NO 12615972 as cited in SEQ ID NO 62455
  misc_feature (1)..(1292): Ortholog of  Ceres SEQ ID NO 13596229 as cited in SEQ ID NO 68800
  misc_feature (1)..(1292): Ortholog of  Ceres SEQ ID NO 15179393 as cited in SEQ ID NO 0
ttgcacgacgtctccaccactacaccacacctcaagtccacaacaccaccagcctcgtctcagccgcttcagcataccacaccgcacgcaaacccaccgcgcgctacgaccaccaccgtcaccatggccgccgcgcgctacgacgtggagaagggcgggaggaataacggggatgggaagccttcgccgccgccgccgggccacctgtacccgcagcgcgacggggagagggagtggttgccgtggttggtgccgctcgtcgtggccgtcaacatcgtgctcttcgccgtggcgatgtacgtcaacaactgcccggcccacgccgcctcgtctcgccgcggcggcgccggatcatgcgtcgcccgcgggttcctccaccgcttctcgttccagccgctcagcgagaacccgctcctcgggccctcgtcggccacgctgcagaagctgggagcgcttgtatgggacaaagttgtgcgggagcaccaggggtggaggctcgtcacctgcatctggctgcacgccggtgttgcccacctcctggccaacatgatcagcctcgtgctcatcgggctcagactggagcaacagtttggatacgtgagagttggcatcatctaccttgtctctggcgtcggaggcagcgtgctttcgtctctgttcatcaggaacaacatctctgtcggcgcttccggagctctgttcgggctccttggggccatgctgtcggagctcttcaccaactggaccatctatgcaaacaaggctgcagccctggtgaccctgctggtcgtcatcgccatcaacctcgccatcggcatcctcccgcacgtcgacaacttcgcgcacatcggagggttcctcaccggcttcctcctcgggttcgtcttactgatgcgcccgcactacggctggatgcagcgctacgccctgccctccgacgtcaagtacaccaccaagaagtacctggcctaccagtgggctctgctggccgtggcctcggtcctcgctgtcatcgggttcgccgtagggctggggatgcttttcagaggagtgaacgcgaatgatcactgcggctggtgccactacctcagctgtgttccgacctccagatggagctgtgggaagtgaagatcggcgtgctgacaaaatggacttgaagccaggatagagcccatggccgcccatgggaccttttcgagcaagcatttccatgaatagatagatatacagctcgcagtcttactgtacataatgtcaccaggatgtggtttatatatgacattatttatgct

SEQ ID NO: 19519 - protein, 375 aa, Zea mays subsp. mays
  peptide (1)..(375): Ceres Seq. ID no. 12358775
LHDVSTTTPHLKSTTPPASSQPLQHTTPHANPPRATTTTVTMAAARYDVEKGGRNNGDGKPSPPPPGHLYPQRDGEREWLPWLVPLVVAVNIVLFAVAMYVNNCPAHAASSRRGGAGSCVARGFLHRFSFQPLSENPLLGPSSATLQKLGALVWDKVVREHQGWRLVTCIWLHAGVAHLLANMISLVLIGLRLEQQFGYVRVGIIYLVSGVGGSVLSSLFIRNNISVGASGALFGLLGAMLSELFTNWTIYANKAAALVTLLVVIAINLAIGILPHVDNFAHIGGFLTGFLLGFVLLMRPHYGWMQRYALPSDVKYTTKKYLAYQWALLAVASVLAVIGFAVGLGMLFRGVNANDHCGWCHYLSCVPTSRWSCGK

SEQ ID NO: 19520 - protein, 334 aa, Zea mays subsp. mays
  peptide (1)..(334): Ceres Seq. ID no. 12358776
MAAARYDVEKGGRNNGDGKPSPPPPGHLYPQRDGEREWLPWLVPLVVAVNIVLFAVAMYVNNCPAHAASSRRGGAGSCVARGFLHRFSFQPLSENPLLGPSSATLQKLGALVWDKVVREHQGWRLVTCIWLHAGVAHLLANMISLVLIGLRLEQQFGYVRVGIIYLVSGVGGSVLSSLFIRNNISVGASGALFGLLGAMLSELFTNWTIYANKAAALVTLLVVIAINLAIGILPHVDNFAHIGGFLTGFLLGFVLLMRPHYGWMQRYALPSDVKYTTKKYLAYQWALLAVASVLAVIGFAVGLGMLFRGVNANDHCGWCHYLSCVPTSRWSCGK

SEQ ID NO: 19521 - protein, 277 aa, Zea mays subsp. mays
  peptide (1)..(277): Ceres Seq. ID no. 12358777
MYVNNCPAHAASSRRGGAGSCVARGFLHRFSFQPLSENPLLGPSSATLQKLGALVWDKVVREHQGWRLVTCIWLHAGVAHLLANMISLVLIGLRLEQQFGYVRVGIIYLVSGVGGSVLSSLFIRNNISVGASGALFGLLGAMLSELFTNWTIYANKAAALVTLLVVIAINLAIGILPHVDNFAHIGGFLTGFLLGFVLLMRPHYGWMQRYALPSDVKYTTKKYLAYQWALLAVASVLAVIGFAVGLGMLFRGVNANDHCGWCHYLSCVPTSRWSCGK

SEQ ID NO: 19522 - DNA, 1065 bp, Zea mays subsp. mays
  misc_feature (1)..(1065): Ceres Seq. ID no. 12419192
  misc_feature (1)..(1065): Ortholog of  Ceres SEQ ID NO 14311859 as cited in SEQ ID NO 51658
  misc_feature (1)..(1065): Ortholog of  Ceres SEQ ID NO 13638685 as cited in SEQ ID NO 51871
  misc_feature (1)..(1065): Ortholog of  Ceres SEQ ID NO 13599200 as cited in SEQ ID NO 0
aacacgtgagctctttttgcagtctgctcgctggcgattgcgattcccaccagtcccccagccccaggcacgaaacctaacccacccaagcggcaaccatggagccctcccccatcggcgccagcggctcggcggagcggtggcgcgcggaggcggcgcgggcgttccagcactacctggaccgctcggcgccgcacacggcggggcggtgggcgggcacgctcgtggccgcggcggtgtacgcgctgcgggtctactacgtgcggggcttctacgtcgtcacctacgggctgggcatctacctgatcaacctcctcatcggcttcctctcccccatggtcgaaccggagctcgaggccgggcccgggctcccaaccagcggctccgacgagttcaagcccttcatccgtcgcctccccgagttcaagttctggtatgccgtcacaaaagccttttgcattgcctttgtcatgaccttcttctctgtattcgacgttcctgtcttttggccaatacttctctgttattggattgtgctttttgtcctgacaatgaagcgacaaattgtgcatatgatcaagtacaagtatgtcccattcagcataggaaagcagaggtatggcggaaagaaaggccctgccgccagtgcatctaaggagtaaagacggagggagggtgtgggacctcgagagcagtgcatgtgctatctttgagggcatcctgctggcatggtggtattttgagtaccagggctactgatagtgaacgcacaccatattcgctagtggagagtggagattgcagagaagctgaccagacttttgcattggttgatgatttctgttttacgtgtcggtagtttatgtacaatggcatggagcatagctagtagatcaaatttccggatcctctgttgtactgtccctttgtggacaagttgtggacctgttggatccttgcaaacgcattgtgatccaggacctagaggacaaaatcaaactgtccagcgattgttacttggaccttccaacattgactgcatactagtaccagcgattcgtagcc

SEQ ID NO: 19523 - protein, 217 aa, Zea mays subsp. mays
  peptide (1)..(217): Ceres Seq. ID no. 12419193
TRELFLQSARWRLRFPPVPQPQARNLTHPSGNHGALPHRRQRLGGAVARGGGAGVPALPGPLGAAHGGAVGGHARGRGGVRAAGLLRAGLLRRHLRAGHLPDQPPHRLPLPHGRTGARGRARAPNQRLRRVQALHPSPPRVQVLVCRHKSLLHCLCHDLLLCIRRSCLLANTSLLLDCAFCPDNEATNCAYDQVQVCPIQHRKAEVWRKERPCRQCI

SEQ ID NO: 19524 - protein, 187 aa, Zea mays subsp. mays
  peptide (1)..(187): Ceres Seq. ID no. 12419194
MEPSPIGASGSAERWRAEAARAFQHYLDRSAPHTAGRWAGTLVAAAVYALRVYYVRGFYVVTYGLGIYLINLLIGFLSPMVEPELEAGPGLPTSGSDEFKPFIRRLPEFKFWYAVTKAFCIAFVMTFFSVFDVPVFWPILLCYWIVLFVLTMKRQIVHMIKYKYVPFSIGKQRYGGKKGPAASASKE

SEQ ID NO: 19525 - protein, 108 aa, Zea mays subsp. mays
  peptide (1)..(108): Ceres Seq. ID no. 12419195
MVEPELEAGPGLPTSGSDEFKPFIRRLPEFKFWYAVTKAFCIAFVMTFFSVFDVPVFWPILLCYWIVLFVLTMKRQIVHMIKYKYVPFSIGKQRYGGKKGPAASASKE

SEQ ID NO: 19526 - DNA, 986 bp, Zea mays subsp. mays
  misc_feature (1)..(986): Ceres Seq. ID no. 12350239
  misc_feature (1)..(986): Ortholog of  Ceres SEQ ID NO 13599613 as cited in SEQ ID NO 0
  misc_feature (1)..(986): Ortholog of  Ceres SEQ ID NO 15179570 as cited in SEQ ID NO 0
aattttggactggcgaagaaaatgcaggcccccctgctgctgctgcacgtccgtcaaatagattggtagggagcccagagggtgatgggaatggcgaaggagcagcacttcgtgcttgttcatggcgaagggcatggggcctggtgctggttcaagctccgctggctcctcgagggcgctggccaccgtgtcacgtgcgttgacctggccggaggcggcgtcgatcctaccgaccccaacaccatccggtccttcaagcagtacgacaagccgctcatagacctcatctccaacttgccagacggagagaaggtgattctgatcggacatggcgctggagggctgagtgtgatccatgcaatgcatgaatttgttgacaggatcggtcaagcatttttcgtggccgccacaatgctgccgtttggatttcaagccgatgaagataagaacgatgggttaccgactttgcccgagaacgagattgagttgacacttggtgcaggagcagatgatcctccaacaaccattgccttgaggccagaattccagcgtgatcgactatcacaacaaagccctgaagaggaatcagtacttgcttcaatgctgatgcgtccgtggcctgcaacagctatcagtacagcaagcttcgaaggagatgatgagagattgaaccgaatcaaacgaactttcataaagatggagcgcgaccacatgctggatcctcaacagcaagactccatgatcaaaaagtggccacccagtgaggttttggtcatagatacagatcacagccccttcttctctgcaccagaacagctgttcaatttaatagtcaaatctctatgatgacaaatgcagaaagctactgactggggttgcccaaattcttgtaacactacccacaaacaataatcaccacaagatttaggacctcagatttgtcaaacatgcttctcaatgaatcttcctggcatatccgcatatct

SEQ ID NO: 19527 - protein, 253 aa, Zea mays subsp. mays
  peptide (1)..(253): Ceres Seq. ID no. 12350240
MGMAKEQHFVLVHGEGHGAWCWFKLRWLLEGAGHRVTCVDLAGGGVDPTDPNTIRSFKQYDKPLIDLISNLPDGEKVILIGHGAGGLSVIHAMHEFVDRIGQAFFVAATMLPFGFQADEDKNDGLPTLPENEIELTLGAGADDPPTTIALRPEFQRDRLSQQSPEEESVLASMLMRPWPATAISTASFEGDDERLNRIKRTFIKMERDHMLDPQQQDSMIKKWPPSEVLVIDTDHSPFFSAPEQLFNLIVKSL

SEQ ID NO: 19528 - protein, 251 aa, Zea mays subsp. mays
  peptide (1)..(251): Ceres Seq. ID no. 12350241
MAKEQHFVLVHGEGHGAWCWFKLRWLLEGAGHRVTCVDLAGGGVDPTDPNTIRSFKQYDKPLIDLISNLPDGEKVILIGHGAGGLSVIHAMHEFVDRIGQAFFVAATMLPFGFQADEDKNDGLPTLPENEIELTLGAGADDPPTTIALRPEFQRDRLSQQSPEEESVLASMLMRPWPATAISTASFEGDDERLNRIKRTFIKMERDHMLDPQQQDSMIKKWPPSEVLVIDTDHSPFFSAPEQLFNLIVKSL

SEQ ID NO: 19529 - protein, 161 aa, Zea mays subsp. mays
  peptide (1)..(161): Ceres Seq. ID no. 12350242
MHEFVDRIGQAFFVAATMLPFGFQADEDKNDGLPTLPENEIELTLGAGADDPPTTIALRPEFQRDRLSQQSPEEESVLASMLMRPWPATAISTASFEGDDERLNRIKRTFIKMERDHMLDPQQQDSMIKKWPPSEVLVIDTDHSPFFSAPEQLFNLIVKSL

SEQ ID NO: 19530 - DNA, 2237 bp, Zea mays subsp. mays
  misc_feature (1)..(2237): Ceres Seq. ID no. 12368411
  misc_feature (1)..(2237): Ortholog of  Ceres SEQ ID NO 14308413 as cited in SEQ ID NO 55196
gcacgagaccattacctagaacatcctaatcgaaaaatctcccagccccgctccccaaatctcagccccgctccttcccagtcccagtcccagatccaggatgtcctcctccgacccggacgacgcccccgacgggggcgaggactcgcccctcttccgccgcagcggggggccgtcctccggcggcaccgttggcgacgtccccgtctcgcagtcgctcatcaaggcggcaagcaacgtgtgcttctccctcttcgtgctcgccgtccttgtcgtcaccgtcgtcgccgtcacataccagccgccggacccctggctccagtcctccgccgccatcaccacctcgctctcccgcgtcctccccaactccaccttcctcgtccccgacgactcgctcctccccaccggcgaggatttcaactcctccaccgccgtcccagccccggtgcgggatgacgatgacgcggctgcggccgtcagcgccgcctccgccgcggccgcgggcaacaggacctgcgacccggacgcgccgctgaactgctccgacccgcgcgtcctcgccgccgtcaaggcgttcaacgccagggccttcttccggaagtccatcgtgtttctcagctacgaggcgccggtgtccggccccaagcctggccagtgcgatgtcgcctggaggttccggaaccgccgggagaagtcgtggcgccgctacagggactaccgtcgcttcagcctcgcctcgggcgatggctgcgctcttgacatcgtcagcgtcggcaagttccgctcggggacgaatgcagctcgccggccgtatcctaagggctcgaagtcgaagaggccccgcgtgtcgccgccgcctgtcgatgcggagatcaatgacacaatccctgtcgtcggatcagaggcagagttcaagaagggaaagtacttgtactacatgagaggaggtgaccattgcaagagcatgaaccagttcgtctggagcttcttgtgtggactcggcgaagccaagttcctcaaccggacgttcgtgatggatctgaacatctgtttgtccggggcacacacggtcgacgggaaggatgtggatgggaaagatttcccggtactatttcgatttcgagcacttgaaggagagtgtgccggtggtggaggaaggggacttcctgaaggattggaagcgttgggataagaagaagggcccaggacggatcacagtgcggaaggttccatcgtacaaggtaacaccaatgcagctgaagagggacaagagcaacatcatctggaggcaatttaatggccatgagcccgagaattactggtaccgagtttgcgaaggacgagctgccaaagtcatccaaaggccttggtatgctatctggaagtccaagagactgatgaacattgtgactgagattgcaggtaggatggattgggattacgacggtttacatgttgtccgagggtggaaggcgcagaacaagcaaatgtatccaaacctggattccgacacgtcgcctgatgcgctcgttgataaggtgaccaagcttgttaagccgatgagagatctctacatcgcaactaatgagccattctataactacttcgacaagctcaggtcacacttccatgtccatttgcttgatgattacaaggagctttggtcaaacactagtgaatggtacaacgagacaacaacacttagtcggggtaaaccagttccattcgacgcctacatgagggtgattgtggacactgaggtattttacagatcgaagacacaggttgagacgttcaacaacttgacaagggattgcaaagatggaatcaatacgtgcaacttgtgacacatgagttcacgcttcggatcatttgttggtgttcaatatacccttctagtggctggaacatcagaactcagtggaactcatccagggtttgtcttttggcattaccatcgttatgtatttcttgtcatggaatgtttagctggtttcatgtttatctgagttgtgtgctctccatttttttttttcttttgtagtttatgtactactcttccagagtccagacgtccgaaaaatttgtatttagtgggcaatctgcaacatctatgctctctgtacccgcactaaattaagtgagaactatagcttcacctttacagtgtatctgttttcacgagtcacacgcttcttgcccgaatatttggaggaaatgaatttgtcagtgagctc

SEQ ID NO: 19531 - protein, 363 aa, Zea mays subsp. mays
  peptide (1)..(363): Ceres Seq. ID no. 12368412
MSSSDPDDAPDGGEDSPLFRRSGGPSSGGTVGDVPVSQSLIKAASNVCFSLFVLAVLVVTVVAVTYQPPDPWLQSSAAITTSLSRVLPNSTFLVPDDSLLPTGEDFNSSTAVPAPVRDDDDAAAAVSAASAAAAGNRTCDPDAPLNCSDPRVLAAVKAFNARAFFRKSIVFLSYEAPVSGPKPGQCDVAWRFRNRREKSWRRYRDYRRFSLASGDGCALDIVSVGKFRSGTNAARRPYPKGSKSKRPRVSPPPVDAEINDTIPVVGSEAEFKKGKYLYYMRGGDHCKSMNQFVWSFLCGLGEAKFLNRTFVMDLNICLSGAHTVDGKDVDGKDFPVLFRFRALEGECAGGGGRGLPEGLEALG

SEQ ID NO: 19532 - protein, 254 aa, Zea mays subsp. mays
  peptide (1)..(254): Ceres Seq. ID no. 12368413
MWMGKISRYYFDFEHLKESVPVVEEGDFLKDWKRWDKKKGPGRITVRKVPSYKVTPMQLKRDKSNIIWRQFNGHEPENYWYRVCEGRAAKVIQRPWYAIWKSKRLMNIVTEIAGRMDWDYDGLHVVRGWKAQNKQMYPNLDSDTSPDALVDKVTKLVKPMRDLYIATNEPFYNYFDKLRSHFHVHLLDDYKELWSNTSEWYNETTTLSRGKPVPFDAYMRVIVDTEVFYRSKTQVETFNNLTRDCKDGINTCNL

SEQ ID NO: 19533 - protein, 252 aa, Zea mays subsp. mays
  peptide (1)..(252): Ceres Seq. ID no. 12368414
MGKISRYYFDFEHLKESVPVVEEGDFLKDWKRWDKKKGPGRITVRKVPSYKVTPMQLKRDKSNIIWRQFNGHEPENYWYRVCEGRAAKVIQRPWYAIWKSKRLMNIVTEIAGRMDWDYDGLHVVRGWKAQNKQMYPNLDSDTSPDALVDKVTKLVKPMRDLYIATNEPFYNYFDKLRSHFHVHLLDDYKELWSNTSEWYNETTTLSRGKPVPFDAYMRVIVDTEVFYRSKTQVETFNNLTRDCKDGINTCNL

SEQ ID NO: 19534 - DNA, 1417 bp, Zea mays subsp. mays
  misc_feature (1)..(1417): Ceres Seq. ID no. 12633968
  misc_feature (1)..(1417): Ortholog of  Ceres SEQ ID NO 13596891 as cited in SEQ ID NO 62868
  misc_feature (1)..(1417): Ortholog of  Ceres SEQ ID NO 12617235 as cited in SEQ ID NO 63990
  misc_feature (1)..(1417): Ortholog of  Ceres SEQ ID NO 13655371 as cited in SEQ ID NO 68945
gcacgagaccattacctagaacatcctaatcgaaaaagaaaaaggcttcgccttggtccttggatccccccacacaacgcagcacccgcactctccaggcgtctgccaatccgaaacgaaacccacccgtaggcaaaccaggactgagattgagctgagagcagcacagtcatggcggggcaggaggtggcgaacaagcgggtggtactgaagcgctacgtgacggggttccccggcgcggacgacatggaggtggtcaccggcaccgcgcgcgtggccgtgccgccggggtcgacggccatggtgctcaagaacctctacgtgtcgtgcgacccttacatgcgcggccgtatgaccaagcacgagaggcccagctacgtcccggacttcgtcgtgggggaggttttggaaaactttggcgtctgcaaggtgatagcatctgggcaccaggatttcaaggttggggatcttgtgtgggggatgaccggatgggaggagtacactctcatccataacccggagtcatttttcaagatcaatcatcctgaattgcctctgtcctactacacaggcgttcttggcatgccgggccttactgcttgggctggatttttcgatgtgggcaagcccaagaaaggcgataatgtcttcgtctcagcagcatcaggagccgttggtcagcttgttgggcagtttgctaagctcacaggatgttatgttgtcggcagtgctggttctgacgagaaggttaatcttctgaaaacaaagtttggcttcgatgaagcattcaactacaagaaagagcaggacctcgatgccgccttgagaaggtacttcccagagggcattgacatctacttcgagaacgtgggtggcagcacactggaagccgtgcttcccaacatgcgtatccatggtcggatccctacctgcggaatgatctcgcagtacaatctggaggagccagagggtgtgcacaacctattcgaaatcatcgctaagcgcctgcgcatggagggtttcatggtcttcgactactacggccagtaccacaagttcgagcaagagatggccgggtacctcaaggcggggaagatagcctacgtcgaggacattgctgaggggctagagaaggcgccggaggcactcatcgggctcttcaccgggcgcaacgtcggcaagcaactggtcgccattgcgcgggaatgaatgctggacatccatattatatctacgttgagaataatgtcagcatgcgtgttcagatgtgttaggaattgatgatttgtagtgcttgcagttttgtgctgttcgtgtgaaatgtttcgattttctgccgtttgttttctgggcgatatgcgtgtgaaaactcagcacacgcgcttcttctgaggagaaatagacaagcagtttgccg

SEQ ID NO: 19535 - protein, 345 aa, Zea mays subsp. mays
  peptide (1)..(345): Ceres Seq. ID no. 12633969
MAGQEVANKRVVLKRYVTGFPGADDMEVVTGTARVAVPPGSTAMVLKNLYVSCDPYMRGRMTKHERPSYVPDFVVGEVLENFGVCKVIASGHQDFKVGDLVWGMTGWEEYTLIHNPESFFKINHPELPLSYYTGVLGMPGLTAWAGFFDVGKPKKGDNVFVSAASGAVGQLVGQFAKLTGCYVVGSAGSDEKVNLLKTKFGFDEAFNYKKEQDLDAALRRYFPEGIDIYFENVGGSTLEAVLPNMRIHGRIPTCGMISQYNLEEPEGVHNLFEIIAKRLRMEGFMVFDYYGQYHKFEQEMAGYLKAGKIAYVEDIAEGLEKAPEALIGLFTGRNVGKQLVAIARE

SEQ ID NO: 19536 - protein, 320 aa, Zea mays subsp. mays
  peptide (1)..(320): Ceres Seq. ID no. 12633970
MEVVTGTARVAVPPGSTAMVLKNLYVSCDPYMRGRMTKHERPSYVPDFVVGEVLENFGVCKVIASGHQDFKVGDLVWGMTGWEEYTLIHNPESFFKINHPELPLSYYTGVLGMPGLTAWAGFFDVGKPKKGDNVFVSAASGAVGQLVGQFAKLTGCYVVGSAGSDEKVNLLKTKFGFDEAFNYKKEQDLDAALRRYFPEGIDIYFENVGGSTLEAVLPNMRIHGRIPTCGMISQYNLEEPEGVHNLFEIIAKRLRMEGFMVFDYYGQYHKFEQEMAGYLKAGKIAYVEDIAEGLEKAPEALIGLFTGRNVGKQLVAIARE

SEQ ID NO: 19537 - protein, 302 aa, Zea mays subsp. mays
  peptide (1)..(302): Ceres Seq. ID no. 12633971
MVLKNLYVSCDPYMRGRMTKHERPSYVPDFVVGEVLENFGVCKVIASGHQDFKVGDLVWGMTGWEEYTLIHNPESFFKINHPELPLSYYTGVLGMPGLTAWAGFFDVGKPKKGDNVFVSAASGAVGQLVGQFAKLTGCYVVGSAGSDEKVNLLKTKFGFDEAFNYKKEQDLDAALRRYFPEGIDIYFENVGGSTLEAVLPNMRIHGRIPTCGMISQYNLEEPEGVHNLFEIIAKRLRMEGFMVFDYYGQYHKFEQEMAGYLKAGKIAYVEDIAEGLEKAPEALIGLFTGRNVGKQLVAIARE

SEQ ID NO: 19538 - DNA, 1051 bp, Zea mays subsp. mays
  misc_feature (1)..(1051): Ceres Seq. ID no. 12387956
  misc_feature (1)..(1051): Ortholog of  Ceres SEQ ID NO 13638658 as cited in SEQ ID NO 51921
  misc_feature (1)..(1051): Ortholog of  Ceres SEQ ID NO 14306522 as cited in SEQ ID NO 53365
  misc_feature (1)..(1051): Ortholog of  Ceres SEQ ID NO 15175175 as cited in SEQ ID NO 0
gcacgagaccattacctagaacatcctaatcgaaaaaaggaaacgagaagacaaggcctccgcggctccgcccccgatgcctccgctcctcacctcacccgcctccctcccctccgcctcccctctcctcgtctcctgtatcggcgctctccaccgccccggccccttcctccaccagcgcgccgccgcctcggtccacttcctcgcgccgcacaggaagacccgaccgccccccgcgatgagctggcttgggaagctgggcctgagcgggcttggaggcagcccgcgcgcgtcggaggcgtcggcagcgctggcgcaggggcccgacgaggaccagcccgcgccggggaacgagttcgcgcaattcggcgccggctgcttctggggcgtggagctcgcgttccagctcgtgccgggagtcacccgcacggaggtcggctacagccagggcaacatccacgatccgacctacgaggacgtctgcaccggcaccacaaaccacaacgaggtcgtccgcgtgcagtacgacccggccgcctgcaagtacgacgacctcctcgacaccttctgggcgcgccacgaccccactactcccaaccgacagggcaatgatgttggaacacagtataggtcagggatatactactataacccagagcaggagaaggcggcaagagagtccctggagaagcagcagaagcttctgaaccggaagatcgtcaccgagatcgttccagcgaagaggttctatagagcagaagagtaccatcagcagtacctggagaagggcggccgcttcggcttcgggcaatctgcagccaagggctgcaatgaccccatccgatgctacggatgagccaaatggacctctacgtgcatggtgtgaatcgtaactgaataagggatgcatcaaagccagattttatactgctttcctaggtttgttttgccactattgaacggctgtaagagtttagctatatactaccatggtactccaatcatcgtgtacaaaaccatattgtattacatgcaagtgcgagtgagattt

SEQ ID NO: 19539 - protein, 259 aa, Zea mays subsp. mays
  peptide (1)..(259): Ceres Seq. ID no. 12387957
MPPLLTSPASLPSASPLLVSCIGALHRPGPFLHQRAAASVHFLAPHRKTRPPPAMSWLGKLGLSGLGGSPRASEASAALAQGPDEDQPAPGNEFAQFGAGCFWGVELAFQLVPGVTRTEVGYSQGNIHDPTYEDVCTGTTNHNEVVRVQYDPAACKYDDLLDTFWARHDPTTPNRQGNDVGTQYRSGIYYYNPEQEKAARESLEKQQKLLNRKIVTEIVPAKRFYRAEEYHQQYLEKGGRFGFGQSAAKGCNDPIRCYG

SEQ ID NO: 19540 - protein, 205 aa, Zea mays subsp. mays
  peptide (1)..(205): Ceres Seq. ID no. 12387958
MSWLGKLGLSGLGGSPRASEASAALAQGPDEDQPAPGNEFAQFGAGCFWGVELAFQLVPGVTRTEVGYSQGNIHDPTYEDVCTGTTNHNEVVRVQYDPAACKYDDLLDTFWARHDPTTPNRQGNDVGTQYRSGIYYYNPEQEKAARESLEKQQKLLNRKIVTEIVPAKRFYRAEEYHQQYLEKGGRFGFGQSAAKGCNDPIRCYG

SEQ ID NO: 19541 - protein, 203 aa, Zea mays subsp. mays
  peptide (1)..(203): Ceres Seq. ID no. 12387959
ARDHYLEHPNRKKETRRQGLRGSAPDASAPHLTRLPPLRLPSPRLLYRRSPPPRPLPPPARRRLGPLPRAAQEDPTAPRDELAWEAGPERAWRQPARVGGVGSAGAGARRGPARAGERVRAIRRRLLLGRGARVPARAGSHPHGGRLQPGQHPRSDLRGRLHRHHKPQRGRPRAVRPGRLQVRRPPRHLLGAPRPHYSQPTGQ

SEQ ID NO: 19542 - DNA, 1755 bp, Zea mays subsp. mays
  misc_feature (1)..(1755): Ceres Seq. ID no. 12384370
  misc_feature (1)..(1755): Ortholog of  Ceres SEQ ID NO 14311862 as cited in SEQ ID NO 51654
  misc_feature (1)..(1755): Ortholog of  Ceres SEQ ID NO 13597334 as cited in SEQ ID NO 64244
  misc_feature (1)..(1755): Ortholog of  Ceres SEQ ID NO 14303165 as cited in SEQ ID NO 65181
  misc_feature (1)..(1755): Ortholog of  Ceres SEQ ID NO 15224550 as cited in SEQ ID NO 0
gcacgagaccattacctagaacatcctaatcgaaaactctgtctccctcgtgctgccctcgccctccttttttttttagtttacccgccgtcccgcgcgccgccgtttcggttgctcggctagagggactagggagtgccagcgagtccatggcagcggcgagggcgtgcttcgtcgcgctggcgctggtggcggcgctcttcgtggccggatcggcggcagcggcggcggggaatgccggaggccgctcgcagctgacgctcaggcagcggcgccggcagctgctgcggcagcggcaggtgcgcagccacctcaagaggctcaacaaggcgccgctcgccaccatcgagagtccagacggagacatcatagactgcgtgcatatctccaaccagcccgccttggatcaccccttcctcaagaaccacaccgtccagatgcggcctgcataccacccggaaggtctgtacgacgacgagtccaaggttgcatcgcagcggaacgcgcagacgatcacccagatgtggcatcagaacggcaggtgccccgagggcacgataccgatcaggcggaccaaggaggaggacgtgctgagggccagctccgtcaggaggtatggcaagaagaagcgcaggagtgcccccaaccccatgtcggttgaccctgacatgctcaacgagagcggccaccagcacgccatagcgtacgtggaaggagacaagtactacggcgccaaggctaccatcaatgtgtggcagccgaagatcgagcaggccaatgagttcagcctgtcccagctctggatcctggggggctccttcggccaggacctcaacagcatcgaagcaggatggcaggttagcccagacctgtatggggacaacaacactaggctcttcacctactggactagcgatgcctaccaggcaacaggatgctacaacctgctgtgctcggggttcatccagataaacaaccagatcgccatgggcgccagcatcttccctatctccaactacggcggctcccagtatgacatcaacatcttggtctggaaggaccccaaggagggcaactggtggctgcagttcggcaacgactacgtcctggggtactggccgtcgttcctcttctcgtacctggcggacagtgcctccatgatcgagtggggcggcgaggtggtgaactcggagcccgacggcagccacaccagcacgcagatgggcagcggccacttccccgaggaagggttcggcaaggccagctacttcaggaacgtccaggtggtggactccaccaacaacctcaaggcgcccaggggcgtgggcaccttcaccgagcagtccagctgctacgacgtgcaggacggcagcaacgccgactggggcacatacttctactacggcgggcccgggaagaactcaaactgtccatagcccaagactgactgagctgagccgccgcctatcacactcactaccagagccgcctaaccttaacacacctcagctgtatcattcatgcatccggtcaattagtttatactgcctcagatttttaacttttttttcgttttgtttcgctctttcttgcttctacctaccccctagtttactgactcctaccctaggtgagtgagcgtgtgtgttgtagacatgtgagattgttctctctgcctcagagagagtgagatgaaggagagatgtcggtcgtctggttctagggaagagatgaggaggactagggggtaggtag

SEQ ID NO: 19543 - protein, 428 aa, Zea mays subsp. mays
  peptide (1)..(428): Ceres Seq. ID no. 12384371
MAAARACFVALALVAALFVAGSAAAAAGNAGGRSQLTLRQRRRQLLRQRQVRSHLKRLNKAPLATIESPDGDIIDCVHISNQPALDHPFLKNHTVQMRPAYHPEGLYDDESKVASQRNAQTITQMWHQNGRCPEGTIPIRRTKEEDVLRASSVRRYGKKKRRSAPNPMSVDPDMLNESGHQHAIAYVEGDKYYGAKATINVWQPKIEQANEFSLSQLWILGGSFGQDLNSIEAGWQVSPDLYGDNNTRLFTYWTSDAYQATGCYNLLCSGFIQINNQIAMGASIFPISNYGGSQYDINILVWKDPKEGNWWLQFGNDYVLGYWPSFLFSYLADSASMIEWGGEVVNSEPDGSHTSTQMGSGHFPEEGFGKASYFRNVQVVDSTNNLKAPRGVGTFTEQSSCYDVQDGSNADWGTYFYYGGPGKNSNCP

SEQ ID NO: 19544 - protein, 332 aa, Zea mays subsp. mays
  peptide (1)..(332): Ceres Seq. ID no. 12384372
MRPAYHPEGLYDDESKVASQRNAQTITQMWHQNGRCPEGTIPIRRTKEEDVLRASSVRRYGKKKRRSAPNPMSVDPDMLNESGHQHAIAYVEGDKYYGAKATINVWQPKIEQANEFSLSQLWILGGSFGQDLNSIEAGWQVSPDLYGDNNTRLFTYWTSDAYQATGCYNLLCSGFIQINNQIAMGASIFPISNYGGSQYDINILVWKDPKEGNWWLQFGNDYVLGYWPSFLFSYLADSASMIEWGGEVVNSEPDGSHTSTQMGSGHFPEEGFGKASYFRNVQVVDSTNNLKAPRGVGTFTEQSSCYDVQDGSNADWGTYFYYGGPGKNSNCP

SEQ ID NO: 19545 - protein, 304 aa, Zea mays subsp. mays
  peptide (1)..(304): Ceres Seq. ID no. 12384373
MWHQNGRCPEGTIPIRRTKEEDVLRASSVRRYGKKKRRSAPNPMSVDPDMLNESGHQHAIAYVEGDKYYGAKATINVWQPKIEQANEFSLSQLWILGGSFGQDLNSIEAGWQVSPDLYGDNNTRLFTYWTSDAYQATGCYNLLCSGFIQINNQIAMGASIFPISNYGGSQYDINILVWKDPKEGNWWLQFGNDYVLGYWPSFLFSYLADSASMIEWGGEVVNSEPDGSHTSTQMGSGHFPEEGFGKASYFRNVQVVDSTNNLKAPRGVGTFTEQSSCYDVQDGSNADWGTYFYYGGPGKNSNCP

SEQ ID NO: 19546 - DNA, 1214 bp, Zea mays subsp. mays
  misc_feature (1)..(1214): Ceres Seq. ID no. 12359952
  misc_feature (1)..(1214): Ortholog of  Ceres SEQ ID NO 15177965 as cited in SEQ ID NO 58545
agcggcggcttggccacctctgagcctcaagccctcaacctccctcttcggcgcgtaacgtcagtcctcaggtattggcagcataaagtgttagatttgtccttgattgaggtaccccttcaaaggtcaagatgttgtggcgcgcagtacgcagtatggatgtaataatgcattcttcgagtttccttcttccgaaactgtatcaacctgtcaacaaaccagtcaagaactatgctttagttgttctaaaccagcatcttccacgattcatgcctcgactctgggatcatgcaaacttgaagatctgcgctgatggaggagctaatcatatttttgatgagatgtatcagataaccaatgatgaagacaaaaaaagcaccagaaataagtatgttccagaaataattgaaggggacatggattctataagacctgaagtaaaactgttctactctagtcagggatccaaaatttctgataagtcacataaccaggagacaacagatctacacaaatgtatttctcgaatccatcattgtacgcctgatgatgaaaaaccaaatctctgtgtacttgttactggagcactaggtggaaggtttgatcacgaggcggcaaatatcaatgttctgtatctgttttcggacatgaggattgtcctcctatcagacgattgcttgatccgacttcttccgagaacacatcgccatgagctttatattgagtcgtctgttgaaggaccccattgtgggcttttccctgttggagcaccatcaacaagcacaacaactactggcctgaaatggaatctaagtgaatcaaagatgagatttgggagcatgataagcacatccaacattgtgcagtcggagaaagtaactgtagaatctgatgcagatctcttgtggacaatttctctgcgaaatctgacataagcagttcctagtttgttatcttttttcttctctttcctgtcaagtggcaaccaagctcttgtacagccacttttgtgtttatgagttgtgtgtctggtaaataaataccatctgatgacaaatcgatgaggtctcatcattagacaggatgtctaccacgatcttgaactgctgatgaattatgtgaataacacgagcaggcatgatggttgtatcctctctagttgtataactgtattgttgtacttgcaacggggtttcttgtataaaattgttctc

SEQ ID NO: 19547 - protein, 267 aa, Zea mays subsp. mays
  peptide (1)..(267): Ceres Seq. ID no. 12359953
MLWRAVRSMDVIMHSSSFLLPKLYQPVNKPVKNYALVVLNQHLPRFMPRLWDHANLKICADGGANHIFDEMYQITNDEDKKSTRNKYVPEIIEGDMDSIRPEVKLFYSSQGSKISDKSHNQETTDLHKCISRIHHCTPDDEKPNLCVLVTGALGGRFDHEAANINVLYLFSDMRIVLLSDDCLIRLLPRTHRHELYIESSVEGPHCGLFPVGAPSTSTTTTGLKWNLSESKMRFGSMISTSNIVQSEKVTVESDADLLWTISLRNLT

SEQ ID NO: 19548 - protein, 259 aa, Zea mays subsp. mays
  peptide (1)..(259): Ceres Seq. ID no. 12359954
MDVIMHSSSFLLPKLYQPVNKPVKNYALVVLNQHLPRFMPRLWDHANLKICADGGANHIFDEMYQITNDEDKKSTRNKYVPEIIEGDMDSIRPEVKLFYSSQGSKISDKSHNQETTDLHKCISRIHHCTPDDEKPNLCVLVTGALGGRFDHEAANINVLYLFSDMRIVLLSDDCLIRLLPRTHRHELYIESSVEGPHCGLFPVGAPSTSTTTTGLKWNLSESKMRFGSMISTSNIVQSEKVTVESDADLLWTISLRNLT

SEQ ID NO: 19549 - protein, 255 aa, Zea mays subsp. mays
  peptide (1)..(255): Ceres Seq. ID no. 12359955
MHSSSFLLPKLYQPVNKPVKNYALVVLNQHLPRFMPRLWDHANLKICADGGANHIFDEMYQITNDEDKKSTRNKYVPEIIEGDMDSIRPEVKLFYSSQGSKISDKSHNQETTDLHKCISRIHHCTPDDEKPNLCVLVTGALGGRFDHEAANINVLYLFSDMRIVLLSDDCLIRLLPRTHRHELYIESSVEGPHCGLFPVGAPSTSTTTTGLKWNLSESKMRFGSMISTSNIVQSEKVTVESDADLLWTISLRNLT

SEQ ID NO: 19550 - DNA, 2673 bp, Zea mays subsp. mays
  misc_feature (1)..(2673): Ceres Seq. ID no. 12375740
  misc_feature (1)..(2673): Ortholog of  Ceres SEQ ID NO 13663928 as cited in SEQ ID NO 60804
gcacgagaccattacctagaacatcctaatcgaaaagtaaacctagctgctctacctacccgcacccccaccccgtggagagcaagtgcagccatggcggcggatcgggagaaggagcgcgaggcggagctggagggcgccatgtacactaactgcctactcctcggcctcgatcccgcggtcctcggctctccctcttcccccgccggccgcgtgggcctatttcgtcactccaacccccgccttggcgagcaactcctctacttccttctctcctcgctccgcggccccgcgcagtccgcgaaggattttgacaaggtctggccaatcttcgactccgctcagtccagggagttcaggaagatcgtgcaagggatcatcagcgagctggaacagcatggggcactgcctcggagcaattctagggtctcgtcacttgccacatgctgcggaccgagatttgttgagcttttgtggcaactatctgtacatgccctgagagaagtccacaagagaacatttgcagctgatgttgtatcaaatccactacctgcagcactaacagatgtttcttatcttcatgctgcttctttactcccagtaaccaaggcaagaatagctctggagaggcgtaaatttcttaaaaatgcaaacatagctgttcagaggcaaatgacatggtcaaatttggcccatgagatgacagctgagttccgaagtctatgtgctgaagaggcttatttgcaacaagagttagagaaactacaagatatgagaaacaaagcaaaactggaaggcgaactctgggacgaacggctctcaggctcatctgggcagaactctcatttggtttctaaggcaactcgtctttgggaatcaatattggctcgcaaaggccagcacgaggttttagcttctggaccaattgaagatcttatagcacatcgggagcacagataccggatatcaggatcacagttactagcagcaatggatatgagttcaagtgttccacattctgagttactatcatctaaagctggtgaaacttctataattttggagaagcaggaagaattttctcagctattccaagaaaaggaagaagcccttacaaggtcagatgataggaatggacgtactcagcaaactgtttatgtagctgaaattcttcgccgctggacccatgctttacaacgtattcataaacaatctcttcatttggccaaagcgaatgatggagaggggcctgaattactgaggagtgcatccagcggagaggccagtactcattctgattcgttaactgcaacattagctgaacatcgccagcatttagtcagtatacagggtctaattaatcaactcaaggaggctattccagcaatgcagcagtctatagacgaactctcagaagaagtgaatagtgtatctattaactcaatggaccaattgaactcgaggctgccactgccagtacaaattgcagggtttggaacatcagaagaaagcagcagtgaagtttcggagatcaattctaagctctcttctacacacttggataagcctgggggcagtcctgctctaaagctaccaccattatttagtctgactccaagttcttctggaaaaggaatacagacacaaaaacggagtgcattggctcgtcaacgtagccaggacatcacatcagaacagaaaacgcttaccatcccctcaactaaggatcaaatgaatggttcaatgcacgaaaatgatgactattctgctcatgacattagacgttctgttcgtgaagctgctttatctaagccattgaagaatacagagagaccacaagataaaaatagtgatgatggttcggaacacttctttattccgctgtcaattagtgctgcgaagaaggaaatggattcggtggcaaatcgatgtaaccaaagattaggtttgtcacctcagatgaagttcccaaagagcacaagctacaatgcagataccccaatcaacaaaagtccaattctgttaagtgaactcaatggacatgattcgatcagtgccatgagtttccttgacccggctggtggtctggcacatcagtcctttatcactgatgatgctctggatcaagtattctctcctctattgatggaatcttcgttgttccatgatgcagatgaggatctacttgcacccttgtcagagactgatgcagcattaatggaatattaagcttcacatgtgcactatgtaatattttgaccactgcagacgcagcctggaggttattgtggcttatgtttgtcttattgactattcggctagttgcttgcgagttgcaaccatgttgagatacagatgcttcatcagaatttgtggggtatatgttgactattgatgcggggagaggtgatattgatgctgttttttccccttctggacaaggctctataggtgccggcgttgtaccaactgtagtggacgcaataggaaagcccaatcttgtatatttagttactatacatcagcagtatttgtgctgtaatactttttcgaattgctgaaatatgtgtttttctgctagttgcgtcctcctgagttttctcagtttcagtgtacgaaattgcaaatcacgaatctaatgaggttaagccaacggggactgtgttcagagtt

SEQ ID NO: 19551 - protein, 742 aa, Zea mays subsp. mays
  peptide (1)..(742): Ceres Seq. ID no. 12375741
ARDHYLEHPNRKVNLAALPTRTPTPWRASAAMAADREKEREAELEGAMYTNCLLLGLDPAVLGSPSSPAGRVGLFRHSNPRLGEQLLYFLLSSLRGPAQSAKDFDKVWPIFDSAQSREFRKIVQGIISELEQHGALPRSNSRVSSLATCCGPRFVELLWQLSVHALREVHKRTFAADVVSNPLPAALTDVSYLHAASLLPVTKARIALERRKFLKNANIAVQRQMTWSNLAHEMTAEFRSLCAEEAYLQQELEKLQDMRNKAKLEGELWDERLSGSSGQNSHLVSKATRLWESILARKGQHEVLASGPIEDLIAHREHRYRISGSQLLAAMDMSSSVPHSELLSSKAGETSIILEKQEEFSQLFQEKEEALTRSDDRNGRTQQTVYVAEILRRWTHALQRIHKQSLHLAKANDGEGPELLRSASSGEASTHSDSLTATLAEHRQHLVSIQGLINQLKEAIPAMQQSIDELSEEVNSVSINSMDQLNSRLPLPVQIAGFGTSEESSSEVSEINSKLSSTHLDKPGGSPALKLPPLFSLTPSSSGKGIQTQKRSALARQRSQDITSEQKTLTIPSTKDQMNGSMHENDDYSAHDIRRSVREAALSKPLKNTERPQDKNSDDGSEHFFIPLSISAAKKEMDSVANRCNQRLGLSPQMKFPKSTSYNADTPINKSPILLSELNGHDSISAMSFLDPAGGLAHQSFITDDALDQVFSPLLMESSLFHDADEDLLAPLSETDAALMEY

SEQ ID NO: 19552 - protein, 711 aa, Zea mays subsp. mays
  peptide (1)..(711): Ceres Seq. ID no. 12375742
MAADREKEREAELEGAMYTNCLLLGLDPAVLGSPSSPAGRVGLFRHSNPRLGEQLLYFLLSSLRGPAQSAKDFDKVWPIFDSAQSREFRKIVQGIISELEQHGALPRSNSRVSSLATCCGPRFVELLWQLSVHALREVHKRTFAADVVSNPLPAALTDVSYLHAASLLPVTKARIALERRKFLKNANIAVQRQMTWSNLAHEMTAEFRSLCAEEAYLQQELEKLQDMRNKAKLEGELWDERLSGSSGQNSHLVSKATRLWESILARKGQHEVLASGPIEDLIAHREHRYRISGSQLLAAMDMSSSVPHSELLSSKAGETSIILEKQEEFSQLFQEKEEALTRSDDRNGRTQQTVYVAEILRRWTHALQRIHKQSLHLAKANDGEGPELLRSASSGEASTHSDSLTATLAEHRQHLVSIQGLINQLKEAIPAMQQSIDELSEEVNSVSINSMDQLNSRLPLPVQIAGFGTSEESSSEVSEINSKLSSTHLDKPGGSPALKLPPLFSLTPSSSGKGIQTQKRSALARQRSQDITSEQKTLTIPSTKDQMNGSMHENDDYSAHDIRRSVREAALSKPLKNTERPQDKNSDDGSEHFFIPLSISAAKKEMDSVANRCNQRLGLSPQMKFPKSTSYNADTPINKSPILLSELNGHDSISAMSFLDPAGGLAHQSFITDDALDQVFSPLLMESSLFHDADEDLLAPLSETDAALMEY

SEQ ID NO: 19553 - protein, 695 aa, Zea mays subsp. mays
  peptide (1)..(695): Ceres Seq. ID no. 12375743
MYTNCLLLGLDPAVLGSPSSPAGRVGLFRHSNPRLGEQLLYFLLSSLRGPAQSAKDFDKVWPIFDSAQSREFRKIVQGIISELEQHGALPRSNSRVSSLATCCGPRFVELLWQLSVHALREVHKRTFAADVVSNPLPAALTDVSYLHAASLLPVTKARIALERRKFLKNANIAVQRQMTWSNLAHEMTAEFRSLCAEEAYLQQELEKLQDMRNKAKLEGELWDERLSGSSGQNSHLVSKATRLWESILARKGQHEVLASGPIEDLIAHREHRYRISGSQLLAAMDMSSSVPHSELLSSKAGETSIILEKQEEFSQLFQEKEEALTRSDDRNGRTQQTVYVAEILRRWTHALQRIHKQSLHLAKANDGEGPELLRSASSGEASTHSDSLTATLAEHRQHLVSIQGLINQLKEAIPAMQQSIDELSEEVNSVSINSMDQLNSRLPLPVQIAGFGTSEESSSEVSEINSKLSSTHLDKPGGSPALKLPPLFSLTPSSSGKGIQTQKRSALARQRSQDITSEQKTLTIPSTKDQMNGSMHENDDYSAHDIRRSVREAALSKPLKNTERPQDKNSDDGSEHFFIPLSISAAKKEMDSVANRCNQRLGLSPQMKFPKSTSYNADTPINKSPILLSELNGHDSISAMSFLDPAGGLAHQSFITDDALDQVFSPLLMESSLFHDADEDLLAPLSETDAALMEY

SEQ ID NO: 19554 - DNA, 448 bp, Zea mays subsp. mays
  misc_feature (1)..(448): Ceres Seq. ID no. 4614514
  misc_feature (1)..(448): Ortholog of  Ceres SEQ ID NO 15176588 as cited in SEQ ID NO 60461
tttgagaagcttgggccaagcctatatgactttctgcgaaagaatagctaccgttcatttcctattgaccttgtccgagaatttgccagacaaatattagagtctgttgcatttatgcatgacttgcgacttattcacacggatctgaagccagagaacattctccttgtttcatcagagtctatcagggtgcctgattataaggtttctatacgaccaccaaaggatggttctttctttaagaaccttccaaaatctagtgctatcaagctgattgattttgggagtacaactttcgagagccaagaccacaattatgtggtgtcgacaagacattatcgtgcaccagaagttatccttggtcttgggtggaactatccatgcgacttgtggagtgtgggttgcattttagttgagctttgttcgggggaagctctctttcaaacac

SEQ ID NO: 19555 - protein, 149 aa, Zea mays subsp. mays
  peptide (1)..(149): Ceres Seq. ID no. 4614515
FEKLGPSLYDFLRKNSYRSFPIDLVREFARQILESVAFMHDLRLIHTDLKPENILLVSSESIRVPDYKVSIRPPKDGSFFKNLPKSSAIKLIDFGSTTFESQDHNYVVSTRHYRAPEVILGLGWNYPCDLWSVGCILVELCSGEALFQT

SEQ ID NO: 19556 - protein, 111 aa, Zea mays subsp. mays
  peptide (1)..(111): Ceres Seq. ID no. 4614516
MHDLRLIHTDLKPENILLVSSESIRVPDYKVSIRPPKDGSFFKNLPKSSAIKLIDFGSTTFESQDHNYVVSTRHYRAPEVILGLGWNYPCDLWSVGCILVELCSGEALFQT

SEQ ID NO: 19557 - DNA, 1621 bp, Zea mays subsp. mays
  misc_feature (1)..(1621): Ceres Seq. ID no. 12391606
  misc_feature (1)..(1621): Ortholog of  Ceres SEQ ID NO 13596180 as cited in SEQ ID NO 67941
  misc_feature (1)..(1621): Ortholog of  Ceres SEQ ID NO 13591190 as cited in SEQ ID NO 68044
  misc_feature (1)..(1621): Ortholog of  Ceres SEQ ID NO 14313563 as cited in SEQ ID NO 68700
aggctctgggtctcgcatcacgatcagatccaatccaaggccgcgccccagcccggcggatggattccgccgccgtggccatcgtgacggtgccgttcccggcgcagggccacctgaaccagctgctgcacctgtccctgctcctggcatcgcgggggcttcctgtccacttcgtcgcgccggagccgcacctccgggaggcccgcgcgcgcctgcacggctgggggcccgaccccgcgtcggtgtgcttccgcgcgctggacgtgcccgcgcacgactccccctccccggacccatcctccccgttcccggcgcacatgcagcccctgttcgaggccttctgcaccggcgcgcgggcctcgctagccgcgctcctggcggagctggccgcgtcgcaccgccgcgtcgtcgtcctctacgaccgcatggcggccttcgcggcggccgaggccgcgcgcttacccaacgccgaggccctcggcgtgcactgcctcgccgcctcctacaacgtcgggtgggcggacccggggcacgccctcctgcgccgccacggcctcgtgttccacccgcccgacgcttgcgccacgccggagttcgtcgcgctcgccaggcggatgggccaggagcgccggcgcgcgcccggagccggcatggtcgtcaacacctgccgcgcgctcgagggcgacttcctcgacgcactccgggggatcccgtcctccgacggcccaaggctgttcgccgtcgggcctctcagcccggtgctccccctccccggcgcgagcgggactcggcacgagtgcctgggctggctcgacgcgcagccgccctcgtcggtgctctacgtgtcgttcggtacgacgtcgtcgctccgcccggagcaggtgcgcgagctggccgccgcgctgcgggacagcggggcgcgcttcgtgtgggcgctgcgggacgccgaccgcgcgggcatgcgcggcggagagggggatactacgaccgaggccctccacgccgccgcggcgtccgagctcggccccgacggcgctggcgtggtggtcaccgggtgggcgccgcagctggagatcctggcgcacggcgccaccgcggcgttcatgagccactgcggctggaactccaccgtggagagcatcagccacgggaagcccatcctggcgtggcccatgcatagcgaccagccctgggacgccgagctcgtgtgcaagtacctccgcgccggcgtcctggtgcgcccgtgggagcggcgccatgacgtgacccccgcggccgacatccgcgacgctatcgacagggtcatggcctcggaggaaggggctgagatccggcggcgggccggggcgctcggggaggccgttcgcggcgccgtggccgagggcgggtcgtctaggcaggacctggaggagctcgtcgcgtacgtgacgaggtgattccgtcgcgatggcccatgcggcgactgtgccgcgtggcggcgctgctgcctgcattaacgatttgtttccatggactatattagttgaaatgaaatccgaaggttttaggccaggctatggtttcatttgagggttggccaggccatcttcagtagtctatctatctattttataaacttgtg

SEQ ID NO: 19558 - protein, 477 aa, Zea mays subsp. mays
  peptide (1)..(477): Ceres Seq. ID no. 12391607
ALGLASRSDPIQGRAPARRMDSAAVAIVTVPFPAQGHLNQLLHLSLLLASRGLPVHFVAPEPHLREARARLHGWGPDPASVCFRALDVPAHDSPSPDPSSPFPAHMQPLFEAFCTGARASLAALLAELAASHRRVVVLYDRMAAFAAAEAARLPNAEALGVHCLAASYNVGWADPGHALLRRHGLVFHPPDACATPEFVALARRMGQERRRAPGAGMVVNTCRALEGDFLDALRGIPSSDGPRLFAVGPLSPVLPLPGASGTRHECLGWLDAQPPSSVLYVSFGTTSSLRPEQVRELAAALRDSGARFVWALRDADRAGMRGGEGDTTTEALHAAAASELGPDGAGVVVTGWAPQLEILAHGATAAFMSHCGWNSTVESISHGKPILAWPMHSDQPWDAELVCKYLRAGVLVRPWERRHDVTPAADIRDAIDRVMASEEGAEIRRRAGALGEAVRGAVAEGGSSRQDLEELVAYVTR

SEQ ID NO: 19559 - protein, 458 aa, Zea mays subsp. mays
  peptide (1)..(458): Ceres Seq. ID no. 12391608
MDSAAVAIVTVPFPAQGHLNQLLHLSLLLASRGLPVHFVAPEPHLREARARLHGWGPDPASVCFRALDVPAHDSPSPDPSSPFPAHMQPLFEAFCTGARASLAALLAELAASHRRVVVLYDRMAAFAAAEAARLPNAEALGVHCLAASYNVGWADPGHALLRRHGLVFHPPDACATPEFVALARRMGQERRRAPGAGMVVNTCRALEGDFLDALRGIPSSDGPRLFAVGPLSPVLPLPGASGTRHECLGWLDAQPPSSVLYVSFGTTSSLRPEQVRELAAALRDSGARFVWALRDADRAGMRGGEGDTTTEALHAAAASELGPDGAGVVVTGWAPQLEILAHGATAAFMSHCGWNSTVESISHGKPILAWPMHSDQPWDAELVCKYLRAGVLVRPWERRHDVTPAADIRDAIDRVMASEEGAEIRRRAGALGEAVRGAVAEGGSSRQDLEELVAYVTR

SEQ ID NO: 19560 - protein, 392 aa, Zea mays subsp. mays
  peptide (1)..(392): Ceres Seq. ID no. 12391609
GSGSRITIRSNPRPRPSPADGFRRRGHRDGAVPGAGPPEPAAAPVPAPGIAGASCPLRRAGAAPPGGPRAPARLGARPRVGVLPRAGRARARLPLPGPILPVPGAHAAPVRGLLHRRAGLASRAPGGAGRVAPPRRRPLRPHGGLRGGRGRALTQRRGPRRALPRRLLQRRVGGPGARPPAPPRPRVPPARRLRHAGVRRARQADGPGAPARARSRHGRQHLPRARGRLPRRTPGDPVLRRPKAVRRRASQPGAPPPRRERDSARVPGLARRAAALVGALRVVRYDVVAPPGAGARAGRRAAGQRGALRVGAAGRRPRGHARRRGGYYDRGPPRRRGVRARPRRRWRGGHRVGAAAGDPGARRHRGVHEPLRLELHRGEHQPREAHPGVAHA

SEQ ID NO: 19561 - DNA, 2139 bp, Zea mays subsp. mays
  misc_feature (1)..(2139): Ceres Seq. ID no. 12419732
  misc_feature (1)..(2139): Ortholog of  Ceres SEQ ID NO 13657610 as cited in SEQ ID NO 66165
gcacgagaccattacctagaacatcctaatcaaaaaaacaaattggcactgctcgtcgccgacccctcctccctccccgcgtcccccgacaagccatccgcggccatgatcaccgcgctggacctctaccacgtgctgacggcggtggtgccgctgtacgtggccatgacgctggcgtacggctccgtccgctggtggcgcatcttcacgccggaccagtgctccgggatcaaccgcttcgtggcgctcttcgccgtgccgctcctctccttccacttcatctccaccaacgaccccttcgccatgaacctgcgcttcctggccgccgacacgctgcagaaggtggccgtcctcgcgctgctggcgctggcctcccgcggcctctcctccccgcgcgcgctcgggctcgactggagcatcacgctcttctccctctccacgctccccaacacgctcgtcatgggcatcccgctgctgcgaggcatgtacggccgcgtcgtcggccggcacgctcatggtccaggtcgtcgtcctccagtgcatcatctggtacacgctcatgctcttcctcttcgagtaccgcgccgcgcgcgcgctcgtcctcgaccagttccccgacggcgccgccgcgtccatcgtctccttccgcgtcgactccgacgtcgtctcgctcgccaggggggacgtcgagctcgaggccgagcccgacggcgtcgccggcgccggcgccgtctcctcccgcggcggggacgccgggcgggtgcgcgtcaccgtgcgcaagtccaccagctcgcgctccgaggccgcgtgctcgcactcgcactcccagaccatgcagccccgtgtgtccaacctctccggcgtggagatctactcgctgcagtcgtcgcgcaaccccaccccgcgcgggtccagcttcaaccacgccgacttcttcaacatcgtcggcgccgccgccaagggaggcggaggagcggcgggggacgaggagaagggcgcatgcggcggcggcggcggaggacactcgccgcagccgcaggccgtcgccgtgccggccaagaggaaggacctgcacatgctcgtctggagctccagcgcctcgcccgtgtccgagcgcgccgccgtgcacgtcttcggcgccggcggcgctgaccatgccgacgtcctcgccaaaggagcccaggcctacgacgagtacgggcgcgacgactacagcagcaggacgaagaacgggagcggcggcgcggacaagggcgggccgacgctgtcgaagctggggtccaactcgacggcgcagctgtaccccaaggacgacggcaaggggagggcggcggcggtggcgatgccgccggcgagcgtgatgacgcggctcatcctcatcatggtgtggaggaagctgatccggaaccccaacacctactccagcctcatcggcgtcgtctggtccctggtctcctacaggtggggcatcgagatgccagcgatcatcgcccggtcgatttcgatcctgtcggacgcgggtctcgggatggccatgttcagcctaggcctgttcatggcgctgcagccgaggatcatcgcgtgcgggaacaagctggcggccatcgcgatgggcgtccggttcgtcgcaggccccgcggtcatggccgccgcctccatcgccgtcggtctgcgcggcgtcctcctccacatcgccatcgtccaggctgctctgcctcaggggatcgtgccgttcgtgttcgccaaggagtacggcgttcatcccgacatcctgagcacagccgtgatcttcgggatgctcatcgctctgcccatcaccctggtctactacatcttgctggggctgtgagcctctctcgctcgcttcttcagcgtgcggaaggcgccatgctgtggtgtatcggccccacatgaaatttctgatgagcattagcgattactattagcttaggtagggaaacgaaagatagctccgacgacagcgatctattcagtgattcagtgagtgaggcattgcgatctgtcaaacatgctgacctgcggtcgaagaatcgatatatatatatcttatcttgcttcatgctgtcttaagataaacattatatatcttgtttcctttggagaaatattagcaatttt

SEQ ID NO: 19562 - protein, 444 aa, Zea mays subsp. mays
  peptide (1)..(444): Ceres Seq. ID no. 12419733
MVQVVVLQCIIWYTLMLFLFEYRAARALVLDQFPDGAAASIVSFRVDSDVVSLARGDVELEAEPDGVAGAGAVSSRGGDAGRVRVTVRKSTSSRSEAACSHSHSQTMQPRVSNLSGVEIYSLQSSRNPTPRGSSFNHADFFNIVGAAAKGGGGAAGDEEKGACGGGGGGHSPQPQAVAVPAKRKDLHMLVWSSSASPVSERAAVHVFGAGGADHADVLAKGAQAYDEYGRDDYSSRTKNGSGGADKGGPTLSKLGSNSTAQLYPKDDGKGRAAAVAMPPASVMTRLILIMVWRKLIRNPNTYSSLIGVVWSLVSYRWGIEMPAIIARSISILSDAGLGMAMFSLGLFMALQPRIIACGNKLAAIAMGVRFVAGPAVMAAASIAVGLRGVLLHIAIVQAALPQGIVPFVFAKEYGVHPDILSTAVIFGMLIALPITLVYYILLGL

SEQ ID NO: 19563 - protein, 429 aa, Zea mays subsp. mays
  peptide (1)..(429): Ceres Seq. ID no. 12419734
MLFLFEYRAARALVLDQFPDGAAASIVSFRVDSDVVSLARGDVELEAEPDGVAGAGAVSSRGGDAGRVRVTVRKSTSSRSEAACSHSHSQTMQPRVSNLSGVEIYSLQSSRNPTPRGSSFNHADFFNIVGAAAKGGGGAAGDEEKGACGGGGGGHSPQPQAVAVPAKRKDLHMLVWSSSASPVSERAAVHVFGAGGADHADVLAKGAQAYDEYGRDDYSSRTKNGSGGADKGGPTLSKLGSNSTAQLYPKDDGKGRAAAVAMPPASVMTRLILIMVWRKLIRNPNTYSSLIGVVWSLVSYRWGIEMPAIIARSISILSDAGLGMAMFSLGLFMALQPRIIACGNKLAAIAMGVRFVAGPAVMAAASIAVGLRGVLLHIAIVQAALPQGIVPFVFAKEYGVHPDILSTAVIFGMLIALPITLVYYILLGL

SEQ ID NO: 19564 - protein, 383 aa, Zea mays subsp. mays
  peptide (1)..(383): Ceres Seq. ID no. 12419735
ARDHYLEHPNQKNKLALLVADPSSLPASPDKPSAAMITALDLYHVLTAVVPLYVAMTLAYGSVRWWRIFTPDQCSGINRFVALFAVPLLSFHFISTNDPFAMNLRFLAADTLQKVAVLALLALASRGLSSPRALGLDWSITLFSLSTLPNTLVMGIPLLRGMYGRVVGRHAHGPGRRPPVHHLVHAHALPLRVPRRARARPRPVPRRRRRVHRLLPRRLRRRLARQGGRRARGRARRRRRRRRRLLPRRGRRAGARHRAQVHQLALRGRVLALALPDHAAPCVQPLRRGDLLAAVVAQPHPARVQLQPRRLLQHRRRRRQGRRRSGGGRGEGRMRRRRRRTLAAAAGRRRAGQEEGPAHARLELQRLARVRARRRARLRRRRR

SEQ ID NO: 19565 - DNA, 1239 bp, Zea mays subsp. mays
  misc_feature (1)..(1239): Ceres Seq. ID no. 12379487
  misc_feature (1)..(1239): Ortholog of  Ceres SEQ ID NO 12598859 as cited in SEQ ID NO 62872
  misc_feature (1)..(1239): Ortholog of  Ceres SEQ ID NO 12617350 as cited in SEQ ID NO 63777
  misc_feature (1)..(1239): Ortholog of  Ceres SEQ ID NO 13598749 as cited in SEQ ID NO 64341
  misc_feature (1)..(1239): Ortholog of  Ceres SEQ ID NO 15176153 as cited in SEQ ID NO 0
gcacgagaccattacctagaacatcctaatcgaaaaactcacggtcggaatgagcgttcaccgtcacaatcactgaatcacacaagcacgaccacgcacacgcggtaaacacgcgcgcgctcaaacagttcgaaatggcgctcgccgccgccatcatcgtcgtcttcctgcttcctggccttctcctcacggcgatggcggccacgccgtaccctcacggccgcggcgccgacgctctcgtgggcgcgtccaagaagtacgagggcagctccaacctggtggacctccgctaccacatgtccccgtcctctccgccgcgccgctccgcctctacgtgctctggtacggccgatgggaccccgcgcaccaggtccccgtccgcgacttcctcctctccctctccgacacgtccctgccgcgcccctccgtcgccgactggtgggccaccgccgcgctctacgccgaccagaccctcgccaacgtcacctgccgcgtcgacctggccggggaagccgccgacgagtcggcctcgctgggccgctcgctctcccggctcgacatccagcgcgtgctcgcctctgcggtcgccgcgggccggctccctgccgncacccgcggcggcgcctaccttgttctcacggcgcccggcgtcggcgtccaggacttctgccgcgccgtatgcggcttccactacttcaccttcccgtcgctcgtgggccacacgctgccctacgcgtgggtcgggcacagcggcggccgctgcgccgacgtctgcgcgtacccgttcgcgctgtcgtcgtacatggcccggagcggcatggcggcgctgcggccgcccaacggcgacgcgggcgtcgacggcatggtcagcgtcatcgcgcacgagctggccgagctcgccacgaacccgctcgtcaacgcgtggtacgccggggaggaccccacggcgcccaccgagatcgccgacctgtgcgagggggtgtacggtacgggcggcggcggcgggtacgccgggaaggtgtcggtggacgcgcaggggaggagctggaatgtgaatgggaggaaggggaggaaattcttggtgcagtggctgtggagcccagaggctaaggcgtgcgtggggcccaatgccagtgactaggcttattggccactgctagcatgtaactaccatgtagtagtagtttattattctcagctttactttatattatattatatataaaaaactattatatg

SEQ ID NO: 19566 - protein, 306 aa, Zea mays subsp. mays
  peptide (1)..(306): Ceres Seq. ID no. 12379488
  misc_feature (159)..(159): Xaa is any aa, unknown or other
MALAAAIIVVFLLPGLLLTAMAATPYPHGRGADALVGASKKYEGSSNLVDLRYHMSPSSPPRRSASTCSGTADGTPRTRSPSATSSSPSPTRPCRAPPSPTGGPPPRSTPTRPSPTSPAASTWPGKPPTSRPRWAARSPGSTSSACSPLRSPRAGSLPXPAAAPTLFSRRPASASRTSAAPYAASTTSPSRRSWATRCPTRGSGTAAAAAPTSARTRSRCRRTWPGAAWRRCGRPTATRASTAWSASSRTSWPSSPRTRSSTRGTPGRTPRRPPRSPTCARGCTVRAAAAGTPGRCRWTRRGGAGM

SEQ ID NO: 19567 - protein, 286 aa, Zea mays subsp. mays
  peptide (1)..(286): Ceres Seq. ID no. 12379489
  misc_feature (139)..(139): Xaa is any aa, unknown or other
MAATPYPHGRGADALVGASKKYEGSSNLVDLRYHMSPSSPPRRSASTCSGTADGTPRTRSPSATSSSPSPTRPCRAPPSPTGGPPPRSTPTRPSPTSPAASTWPGKPPTSRPRWAARSPGSTSSACSPLRSPRAGSLPXPAAAPTLFSRRPASASRTSAAPYAASTTSPSRRSWATRCPTRGSGTAAAAAPTSARTRSRCRRTWPGAAWRRCGRPTATRASTAWSASSRTSWPSSPRTRSSTRGTPGRTPRRPPRSPTCARGCTVRAAAAGTPGRCRWTRRGGAGM

SEQ ID NO: 19568 - protein, 252 aa, Zea mays subsp. mays
  peptide (1)..(252): Ceres Seq. ID no. 12379490
  misc_feature (105)..(105): Xaa is any aa, unknown or other
MSPSSPPRRSASTCSGTADGTPRTRSPSATSSSPSPTRPCRAPPSPTGGPPPRSTPTRPSPTSPAASTWPGKPPTSRPRWAARSPGSTSSACSPLRSPRAGSLPXPAAAPTLFSRRPASASRTSAAPYAASTTSPSRRSWATRCPTRGSGTAAAAAPTSARTRSRCRRTWPGAAWRRCGRPTATRASTAWSASSRTSWPSSPRTRSSTRGTPGRTPRRPPRSPTCARGCTVRAAAAGTPGRCRWTRRGGAGM

SEQ ID NO: 19569 - DNA, 1821 bp, Zea mays subsp. mays; identical to SEQ ID NO: 17449
  misc_feature (1)..(1821): Ceres Seq. ID no. 12375293
  misc_feature (1)..(1821): Ortholog of  Ceres SEQ ID NO 14307682 as cited in SEQ ID NO 54529

SEQ ID NO: 19570 - protein, 315 aa, Zea mays subsp. mays; identical to SEQ ID NO: 17450
  peptide (1)..(315): Ceres Seq. ID no. 12375294

SEQ ID NO: 19571 - protein, 253 aa, Zea mays subsp. mays; identical to SEQ ID NO: 17451
  peptide (1)..(253): Ceres Seq. ID no. 12375295

SEQ ID NO: 19572 - protein, 238 aa, Zea mays subsp. mays; identical to SEQ ID NO: 17452
  peptide (1)..(238): Ceres Seq. ID no. 12375296

SEQ ID NO: 19573 - DNA, 1486 bp, Zea mays subsp. mays
  misc_feature (1)..(1486): Ceres Seq. ID no. 12435516
  misc_feature (1)..(1486): Ortholog of  Ceres SEQ ID NO 14307589 as cited in SEQ ID NO 20466
  misc_feature (1)..(1486): Ortholog of  Ceres SEQ ID NO 14315223 as cited in SEQ ID NO 52527
  misc_feature (1)..(1486): Ortholog of  Ceres SEQ ID NO 14303324 as cited in SEQ ID NO 54563
  misc_feature (1)..(1486): Ortholog of  Ceres SEQ ID NO 14307085 as cited in SEQ ID NO 54749
  misc_feature (1)..(1486): Ortholog of  Ceres SEQ ID NO 14313599 as cited in SEQ ID NO 54989
  misc_feature (1)..(1486): Ortholog of  Ceres SEQ ID NO 15176204 as cited in SEQ ID NO 55608
  misc_feature (1)..(1486): Ortholog of  Ceres SEQ ID NO 14308575 as cited in SEQ ID NO 58782
  misc_feature (1)..(1486): Ortholog of  Ceres SEQ ID NO 13584238 as cited in SEQ ID NO 64216
aaacaaaaccctcctcgtcatccgcggccgcttttcccctgacccctgtctcgaccaatcctccctcccacacacatcacacccacaagacaaaaaaaaaaagcgcctttgagcgccgcgcgatctctggtgcttggtgtcgtcgcgacaccagcgttagtttctgtttcagcgcgcacgcgcgtttgtgctgtgggggttgggaagagccgaagagcgaggcggcagcgcgatcgagcggttcggcgggcggcggccgatccgatgggaagggcaccctgctgcgacaagaacaagggcctcaagaaagggccctggacgccggaggaggacaagctcctcgtcgactacatccagaccaacggccatggcagctggcgcctgctccccaagctcgcagggctgaaccggtgcggcaagagctgccgactgcggtggaccaactacctccggccggacatcaagcgcgggcccttcacagccgaggaggagaagtccatcgtccagctccacgccatcgtcggcaacaagtggtccatgatcgcggcacagctcccaggccggacggacaacgagatcaagaactactggaacacgcacctcaagaagcagctgcgtcggatgggcctcgacgagcccccgcccggcccggccgccggctgccccgccgcgcgccacatggcgcagtgggagacggccaggctcgaggccgaggcgcgcctctccctcctcgccgccaccgccgcctcctccggtaccactgcgaccaccaccaccaccacgtctgcagcctcctcgtcctccaccaccgtcgctggcgcggccgacaacaaggcctccaaccccgcggacatcttcctgcgcctgtggagctcggacatcggggactccttccgccgcaagacggacacgccggcggtgcccgcgcttcccggcgcccgtcgtcaagaggaaggacacggcgatcaagcaggagccgcgggcgctgctgctcggcctcggggacgactcctcggcggcgtccaacgacaacgagacggaggtggcggaggcgctggaggcggagtaccagatgttcctcgacttcgcgggcgaagagctgggactattccatggccggcacggcggcttctcgctgttcccgccgctcgacgtgctcgctgaggcgtccctggactcggctttcaagtgaagacgtagccagcaccacgtacgtacacggtactcatacgtacggcaagcggcagtggccaactggccatgcctctacggcttagctatacgcctcgaaatgcgcgcatggatgtatatagatatgcgtgtgactgcactggcatatcggcaattttttgggttaggccagcaagtgcgtggtttagcttgttattatgcagggttggttttggtaggacatcatggtgtatgggggattctctgttcattggagatgctctaatacatcacgagatgttcttcaatcttcggc

SEQ ID NO: 19574 - protein, 424 aa, Zea mays subsp. mays
  peptide (1)..(424): Ceres Seq. ID no. 12435517
TKPSSSSAAAFPLTPVSTNPPSHTHHTHKTKKKSAFERRAISGAWCRRDTSVSFCFSAHARLCCGGWEEPKSEAAARSSGSAGGGRSDGKGTLLRQEQGPQERALDAGGGQAPRRLHPDQRPWQLAPAPQARRAEPVRQELPTAVDQLPPAGHQARALHSRGGEVHRPAPRHRRQQVVHDRGTAPRPDGQRDQELLEHAPQEAAASDGPRRAPARPGRRLPRRAPHGAVGDGQARGRGAPLPPRRHRRLLRYHCDHHHHHVCSLLVLHHRRWRGRQQGLQPRGHLPAPVELGHRGLLPPQDGHAGGARASRRPSSRGRTRRSSRSRGRCCSASGTTPRRRPTTTRRRWRRRWRRSTRCSSTSRAKSWDYSMAGTAASRCSRRSTCSLRRPWTRLSSEDVASTTYVHGTHTYGKRQWPTGHASTA

SEQ ID NO: 19575 - protein, 299 aa, Zea mays subsp. mays
  peptide (1)..(299): Ceres Seq. ID no. 12435518
MGRAPCCDKNKGLKKGPWTPEEDKLLVDYIQTNGHGSWRLLPKLAGLNRCGKSCRLRWTNYLRPDIKRGPFTAEEEKSIVQLHAIVGNKWSMIAAQLPGRTDNEIKNYWNTHLKKQLRRMGLDEPPPGPAAGCPAARHMAQWETARLEAEARLSLLAATAASSGTTATTTTTTSAASSSSTTVAGAADNKASNPADIFLRLWSSDIGDSFRRKTDTPAVPALPGARRQEEGHGDQAGAAGAAARPRGRLLGGVQRQRDGGGGGAGGGVPDVPRLRGRRAGTIPWPARRLLAVPAARRAR

SEQ ID NO: 19576 - DNA, 1209 bp, Zea mays subsp. mays
  misc_feature (1)..(1209): Ceres Seq. ID no. 12368228
  misc_feature (1)..(1209): Ortholog of  Ceres SEQ ID NO 12635696 as cited in SEQ ID NO 0
gcacgagaccattacctagaacatcctaatcgaaaaagtagtttagttttgctcgcttccacaccgcaccgccgttcccttttttatatcccgcggatgcgcctggcctctgcctcggggtcggggcagctggtgacatcggattcggatcaggccgagatcgaactgctccgatccggcgcttaatttctctctctctctctcgggctagctgcccgggcaaatggacgccgagtggagcggcgacgagagcaagactggcgctgcgggcggagtttcgtcggctgattgcccaggttcgccaccgccggtgtcgccggcgccaccgtcgacgtcgccagctgctaccggtgccgggaggaggcggtcggcgaacaagcgggtggtcaccgtgccgctggcggacgtcagtggcccacggcccaagggcgtcggcgagggcaacacgccgacggacgcgtgggcgtggcgcaagtacggccagaagcccatcaagggctcgccttttccgagggcttactacaggtgcagcagctccaaggggtgcccggccaggaagcaggtggagcggagccgggcggagccggacaaggtgatcgtcacgtactcgttcgagcacagccactcggaggccatggcggcggcgagggcgcagaaccgccaggccccgaagccaaagccggcccagccacagccagtcccgccggagtcctcgtcatccggcagccacgacgtcgctgccgctgccacggtcgtctgcgccggcggcgcgcctattgcggccgagaccgaggccggcgcggaggccgtcgaggtgcacgacgagttcaggtggctctacgacggcgtgtccgtcacctcctcggcgtccccaccggacgtcgaggcggcggacgagatgctgtacggggcgatgttcttcggcgacccgcccgcgcccctccccgacgagttcggcgacgtcggcggcctgttcgacggagaagggggcgaggaggacgccatgttcgcgggtctcggcgagctgcccgagtgcgccatggtgttccggcggcacgccggcgacgggatttcggtggcaggccgggtgaagtgaagtgaatcctgaattgaaggtcctgacatgtgggccggggcaggccggactccaataaaaaccagataaactcatgtagagctccttgatctatctacttttggcttttcttc

SEQ ID NO: 19577 - protein, 290 aa, Zea mays subsp. mays
  peptide (1)..(290): Ceres Seq. ID no. 12368229
MDAEWSGDESKTGAAGGVSSADCPGSPPPVSPAPPSTSPAATGAGRRRSANKRVVTVPLADVSGPRPKGVGEGNTPTDAWAWRKYGQKPIKGSPFPRAYYRCSSSKGCPARKQVERSRAEPDKVIVTYSFEHSHSEAMAAARAQNRQAPKPKPAQPQPVPPESSSSGSHDVAAAATVVCAGGAPIAAETEAGAEAVEVHDEFRWLYDGVSVTSSASPPDVEAADEMLYGAMFFGDPPAPLPDEFGDVGGLFDGEGGEEDAMFAGLGELPECAMVFRRHAGDGISVAGRVK

SEQ ID NO: 19578 - protein, 153 aa, Zea mays subsp. mays
  peptide (1)..(153): Ceres Seq. ID no. 12368230
MAAARAQNRQAPKPKPAQPQPVPPESSSSGSHDVAAAATVVCAGGAPIAAETEAGAEAVEVHDEFRWLYDGVSVTSSASPPDVEAADEMLYGAMFFGDPPAPLPDEFGDVGGLFDGEGGEEDAMFAGLGELPECAMVFRRHAGDGISVAGRVK

SEQ ID NO: 19579 - DNA, 1971 bp, Zea mays subsp. mays; identical to SEQ ID NO: 15947
  misc_feature (1)..(1971): Ceres Seq. ID no. 13501211
  misc_feature (1)..(1971): Ortholog of  Ceres SEQ ID NO 14307843 as cited in SEQ ID NO 20508
  misc_feature (1)..(1971): Ortholog of  Ceres SEQ ID NO 15170811 as cited in SEQ ID NO 52649
  misc_feature (1)..(1971): Ortholog of  Ceres SEQ ID NO 13638331 as cited in SEQ ID NO 58047
  misc_feature (1)..(1971): Ortholog of  Ceres SEQ ID NO 15225845 as cited in SEQ ID NO 65125
  misc_feature (1)..(1971): Ortholog of  Ceres SEQ ID NO 15170135 as cited in SEQ ID NO 67647

SEQ ID NO: 19580 - protein, 511 aa, Zea mays subsp. mays; identical to SEQ ID NO: 15948
  peptide (1)..(511): Ceres Seq. ID no. 13501212

SEQ ID NO: 19581 - protein, 423 aa, Zea mays subsp. mays; identical to SEQ ID NO: 15949
  peptide (1)..(423): Ceres Seq. ID no. 13501213

SEQ ID NO: 19582 - protein, 414 aa, Zea mays subsp. mays; identical to SEQ ID NO: 15950
  peptide (1)..(414): Ceres Seq. ID no. 13501214

SEQ ID NO: 19583 - DNA, 1487 bp, Zea mays subsp. mays
  misc_feature (1)..(1487): Ceres Seq. ID no. 12367964
  misc_feature (1)..(1487): Ortholog of  Ceres SEQ ID NO 13595351 as cited in SEQ ID NO 55934
  misc_feature (1)..(1487): Ortholog of  Ceres SEQ ID NO 13639645 as cited in SEQ ID NO 57488
gcacgagaccattacctagaacatcctaatcgaaaaatcacacaaagccgccaagagtcccagcatcgatcgaacagctagctagctagctatatagcgagagggctccatccatatccatccatctgctactgctagcagctgctggctgttgctgcttgcattgagatgtggatgatcagcgcagggcgcatggagcagtgggcgccgacggcggcaatggtggccaccaacgtcgtgatcgccgtcatgacggcgctgatcaagcaggcactgagcctgggcatgaacaggctggtcctcatcactttccgccagatggtggccaccctgttccttggacccatcgcctacttcaaggaaaggaggatgagaccgaagttcacttccgagatcttcgtgtacatgtttctcagtggaattcttgggccggtgctgcttcagttacacactgtttgtcggattggattacacgacggcaacgttcgctgcaacgttcggaaatatgcttccagtggttactttcctgatatcacttgctttcaggttcgaagcactggaggtgaagagcaagtcggggagcgccaagatctcagggacgctcatctccctcggcggcgcaatgatgctcaccttctacaagggttcagcactgacacaaaccaccaccgccgccacgtcgtctccagcatccagcggcggcggccacatcaggcaacaagccggagagcacggcacggtccggtgggtgctgggctccgtctccatgctggccaacgtcgtcggcttcgcgctgtggctgctcctgcagcggaagttcacccgcaagtacccggccgtgtactcggccacggcgttcatgtcgctattcagcttcgtccaggccggggcgctggccctgtcgatccagaggaccagccttgccgttgggccctcagggggaccgtggagatcgccacggtggtgtactgtggtgtagtggcgtctggcattgggtacctgctgctcacctactgcgtggagaagagaggccccgtgttcactgccgccttcagcccgctcgcccagatcttcgtcgccggcatcgatctcttcatcctccacgagcctctctacctcggaagcgtgctgggatcagtgctggttattcttgggctctaccttgtactgtggggcaagagagaggaagctgctgctgctgctgcttcggcaaagccagtgcaggccgaggtagaacagcaagagaaagtgtgattttttccctttattgttcatcacagtacagcgtgccagagcagagggacgaacataattaactagaagcggaagcctgtgtgagtatgtgacagagagtgcatatgatcttcgagccctaaatctatgtatactactgaccaatataacgcaagaaaatgtatgctgatcgatcgatcgatcgaaatgctgtgaaattctctctcaagtacgtgctgagaaagaggttgggc

SEQ ID NO: 19584 - protein, 361 aa, Zea mays subsp. mays
  peptide (1)..(361): Ceres Seq. ID no. 12367965
MWMISAGRMEQWAPTAAMVATNVVIAVMTALIKQALSLGMNRLVLITFRQMVATLFLGPIAYFKERRMRPKFTSEIFVYMFLSGILGPVLLQLHTVCRIGLHDGNVRCNVRKYASSGYFPDITCFQVRSTGGEEQVGERQDLRDAHLPRRRNDAHLLQGFSTDTNHHRRHVVSSIQRRRPHQATSRRARHGPVGAGLRLHAGQRRRLRAVAAPAAEVHPQVPGRVLGHGVHVAIQLRPGRGAGPVDPEDQPCRWALRGTVEIATVVYCGVVASGIGYLLLTYCVEKRGPVFTAAFSPLAQIFVAGIDLFILHEPLYLGSVLGSVLVILGLYLVLWGKREEAAAAAASAKPVQAEVEQQEKV

SEQ ID NO: 19585 - protein, 359 aa, Zea mays subsp. mays
  peptide (1)..(359): Ceres Seq. ID no. 12367966
MISAGRMEQWAPTAAMVATNVVIAVMTALIKQALSLGMNRLVLITFRQMVATLFLGPIAYFKERRMRPKFTSEIFVYMFLSGILGPVLLQLHTVCRIGLHDGNVRCNVRKYASSGYFPDITCFQVRSTGGEEQVGERQDLRDAHLPRRRNDAHLLQGFSTDTNHHRRHVVSSIQRRRPHQATSRRARHGPVGAGLRLHAGQRRRLRAVAAPAAEVHPQVPGRVLGHGVHVAIQLRPGRGAGPVDPEDQPCRWALRGTVEIATVVYCGVVASGIGYLLLTYCVEKRGPVFTAAFSPLAQIFVAGIDLFILHEPLYLGSVLGSVLVILGLYLVLWGKREEAAAAAASAKPVQAEVEQQEKV

SEQ ID NO: 19586 - protein, 353 aa, Zea mays subsp. mays
  peptide (1)..(353): Ceres Seq. ID no. 12367967
MEQWAPTAAMVATNVVIAVMTALIKQALSLGMNRLVLITFRQMVATLFLGPIAYFKERRMRPKFTSEIFVYMFLSGILGPVLLQLHTVCRIGLHDGNVRCNVRKYASSGYFPDITCFQVRSTGGEEQVGERQDLRDAHLPRRRNDAHLLQGFSTDTNHHRRHVVSSIQRRRPHQATSRRARHGPVGAGLRLHAGQRRRLRAVAAPAAEVHPQVPGRVLGHGVHVAIQLRPGRGAGPVDPEDQPCRWALRGTVEIATVVYCGVVASGIGYLLLTYCVEKRGPVFTAAFSPLAQIFVAGIDLFILHEPLYLGSVLGSVLVILGLYLVLWGKREEAAAAAASAKPVQAEVEQQEKV

SEQ ID NO: 19587 - DNA, 1521 bp, Zea mays subsp. mays
  misc_feature (1)..(1521): Ceres Seq. ID no. 12367968
  misc_feature (1)..(1521): Ortholog of  Ceres SEQ ID NO 15168537 as cited in SEQ ID NO 57100
  misc_feature (1)..(1521): Ortholog of  Ceres SEQ ID NO 15178681 as cited in SEQ ID NO 63192
  misc_feature (1)..(1521): Ortholog of  Ceres SEQ ID NO 13579918 as cited in SEQ ID NO 64644
  misc_feature (1)..(1521): Ortholog of  Ceres SEQ ID NO 13654122 as cited in SEQ ID NO 68192
gcacgagaccattacctagaacatcctaatcgaaaaagtagtcagaccatagctaagctgagagcaaagatgtcttggcggcgaaaccagctacgtgcgtttctcgttctcgccgtcatcctcctcatcaccgcagctacctaccgagccaatgcgcagccggcgcctccagcagacccaacgccagccgctgacacctgcgccgaccccagcgtggaaggggcgtgccgcaacgtcccgaaggcgctgcgcctgaagctgatcgccatcccgacgatcctcgtctccagcgtgatcggcgtgtgcctgccgctcttgtcccgctctgtgcccgcgctccgccccgaccgcaacctcttcgtcatcgtcaaggccttcgcctcaggcgtcatcctcgcgacgggctacatgcacgtgctcccggactccttcagcaacctcacctcgccgtgcctgccgcggaagccgtgggccgatttctccttcaccaccttcgtcgccatgctcgccgccctgttcacgctcatggtggactcgctcatgctcagcttctacaaccggaggaagggtggcaacacctccggccgacgcactagcggcgcggtcgccgaccacgagagcccggcgcatgagcaccactggcacagccacggccatggacatggacatggacatgctgggggcatcgtggtggctgacaagcccgaggacgatgaggccagccaggtgcagctccgccggaaccgcgttgtcgttcaggtcctggagatgggcatcgtcgtgcactcggtggtgatcgggctgggcatgggagcgtcgcagaacgtgtgcaccatccggccgctggtgacggcgatgtgcttccaccagctcttcgagggcatgggactcggcggctgcatcctgcaggcggagtacggcgcgaagatgaaggcggggctggtgttcttcttctccacgacgacgccgttcgggatcgcgctggggctggcgctcaccaaggtgtacagggagaacagccccacggcgctcatcgtggtgggcctgctcaacgcggcctcggcggggctgctccactacatggcgctcgtggagctcctggccgccgacttcatggggcccaagctgcagagcagcgtcaggctccagctcctctgcttcctcgccgtcctcctcggcgccggcggcatgtccatcatggccaagtgggcgtgatcgtattcgtatctgagacgacatgacacagtactgttacaccaacactgcctgcagtctagctatctgcaagactgcatcgctgcatgcatgttcctcctatagctggctgttgtatcatttcgcgtgcttcgttgctccgtgcgcttccgtgtcgccatcaggaagctaggtatatattagacgcagatagcgttgttgtcatgactattcaacgtccacggtacaatacaaaagtagtactctatctatgtattaactatgttcttaaatatttgtcgtggtaaataaaaaaacaatataaat

SEQ ID NO: 19588 - protein, 404 aa, Zea mays subsp. mays
  peptide (1)..(404): Ceres Seq. ID no. 12367969
ARDHYLEHPNRKSSQTIAKLRAKMSWRRNQLRAFLVLAVILLITAATYRANAQPAPPADPTPAADTCADPSVEGACRNVPKALRLKLIAIPTILVSSVIGVCLPLLSRSVPALRPDRNLFVIVKAFASGVILATGYMHVLPDSFSNLTSPCLPRKPWADFSFTTFVAMLAALFTLMVDSLMLSFYNRRKGGNTSGRRTSGAVADHESPAHEHHWHSHGHGHGHGHAGGIVVADKPEDDEASQVQLRRNRVVVQVLEMGIVVHSVVIGLGMGASQNVCTIRPLVTAMCFHQLFEGMGLGGCILQAEYGAKMKAGLVFFFSTTTPFGIALGLALTKVYRENSPTALIVVGLLNAASAGLLHYMALVELLAADFMGPKLQSSVRLQLLCFLAVLLGAGGMSIMAKWA

SEQ ID NO: 19589 - protein, 381 aa, Zea mays subsp. mays
  peptide (1)..(381): Ceres Seq. ID no. 12367970
MSWRRNQLRAFLVLAVILLITAATYRANAQPAPPADPTPAADTCADPSVEGACRNVPKALRLKLIAIPTILVSSVIGVCLPLLSRSVPALRPDRNLFVIVKAFASGVILATGYMHVLPDSFSNLTSPCLPRKPWADFSFTTFVAMLAALFTLMVDSLMLSFYNRRKGGNTSGRRTSGAVADHESPAHEHHWHSHGHGHGHGHAGGIVVADKPEDDEASQVQLRRNRVVVQVLEMGIVVHSVVIGLGMGASQNVCTIRPLVTAMCFHQLFEGMGLGGCILQAEYGAKMKAGLVFFFSTTTPFGIALGLALTKVYRENSPTALIVVGLLNAASAGLLHYMALVELLAADFMGPKLQSSVRLQLLCFLAVLLGAGGMSIMAKWA

SEQ ID NO: 19590 - protein, 268 aa, Zea mays subsp. mays
  peptide (1)..(268): Ceres Seq. ID no. 12367971
MHVLPDSFSNLTSPCLPRKPWADFSFTTFVAMLAALFTLMVDSLMLSFYNRRKGGNTSGRRTSGAVADHESPAHEHHWHSHGHGHGHGHAGGIVVADKPEDDEASQVQLRRNRVVVQVLEMGIVVHSVVIGLGMGASQNVCTIRPLVTAMCFHQLFEGMGLGGCILQAEYGAKMKAGLVFFFSTTTPFGIALGLALTKVYRENSPTALIVVGLLNAASAGLLHYMALVELLAADFMGPKLQSSVRLQLLCFLAVLLGAGGMSIMAKWA

SEQ ID NO: 19591 - DNA, 1584 bp, Zea mays subsp. mays
  misc_feature (1)..(1584): Ceres Seq. ID no. 12375563
  misc_feature (1)..(1584): Ortholog of  Ceres SEQ ID NO 15227026 as cited in SEQ ID NO 52193
  misc_feature (1)..(1584): Ortholog of  Ceres SEQ ID NO 15177994 as cited in SEQ ID NO 55641
  misc_feature (1)..(1584): Ortholog of  Ceres SEQ ID NO 13595454 as cited in SEQ ID NO 56502
gcacgagaccattacctagaacatcctaatcgaaaaatcgcaccccgcaccccgctcctccctcctcctgctccggctcccttcctccacagctcgaataaagtcccctcctcttccagtcttcctcctccgcgctccaatcttcccagcggcacggtttcggttcttgcagagtagcacggaggttccttcgttgggggttcttggtctgccttgagcgatttggtgcgccgcggattgttgtgtggttgtgagttgtgactgcagagacaagggccgtgtggagagtcgagccatcgaggtcgaggaggagggaagggaaaaggggggcgcatgggcggccagtggctgggggaggggatgccgtcgtccaacctgcagtgcttcttggactgcaccacccccaccgtcgagacgcacattctccccaagacgaatggacgattgccgaccgacgcctggcaccacgctgagatggacagcgtcgagtacttcaatcttgccgacctctgggaacagtactatgaatggagcgcgtacggcgccggagctacggtgcagctcccaggaggggacagagtagttcagtactatgttccatacctgtcagggatgcagctatacaccaacaaggtcctgactgcatccagaagttttggtgaagataatggcatggatttatggagtgatgatgaggacaacgagaagatgtcgagatcctggagttccacctctgatgaatcattgttcaactgtgatgtgttatggtccaacaggaagcgtccagggcacctgtactttgagttctttgaagtaggttcaccttatggaagggttcctctcattgacaaggtttatgaactatcccagggctttcctggattgacatcactgaagagtgctgagctttcgcctgttagctggatgtcagttgcctggtaccctatataccacattccttaccagcgcagcgtgaaggacttatctgcatgcttcctaacttaccataccatttcctcctcgtttcaagatcacgggcttgagaccatgaccactgattgttgccatccagttgcaaacggcaaacaaaatggccacatggataagaagagcaacaccgtatcactgcctccatttggcctcgcagcacacaagatacaaggttccctctggaccaaccccatgacaggagaccgcagaaagatggacttcctcttcagtgcggcagactcctggctgaagcagcttggagtccagcatcatgacttcaacttcttcatcactcaccccatgtgaactgctgatccggagtggcttgcaaagaaccacatgggtacagtttgaagctagttatattacctacaccaccaccaacggggtagcaaaacgtttacagtacaatgcactggtgaaacgagtctaacaatcgcaggatagatttatacttgagtttactgctgcagcgaataccaaacatgtcggcactcaaaaaggttttctgtttcttgtttcttggcagaaaatgtaactgatctgtacagaagttttgcaactaatttggtatccaatgtgggggttggatcc

SEQ ID NO: 19592 - protein, 320 aa, Zea mays subsp. mays
  peptide (1)..(320): Ceres Seq. ID no. 12375564
MGGQWLGEGMPSSNLQCFLDCTTPTVETHILPKTNGRLPTDAWHHAEMDSVEYFNLADLWEQYYEWSAYGAGATVQLPGGDRVVQYYVPYLSGMQLYTNKVLTASRSFGEDNGMDLWSDDEDNEKMSRSWSSTSDESLFNCDVLWSNRKRPGHLYFEFFEVGSPYGRVPLIDKVYELSQGFPGLTSLKSAELSPVSWMSVAWYPIYHIPYQRSVKDLSACFLTYHTISSSFQDHGLETMTTDCCHPVANGKQNGHMDKKSNTVSLPPFGLAAHKIQGSLWTNPMTGDRRKMDFLFSAADSWLKQLGVQHHDFNFFITHPM

SEQ ID NO: 19593 - protein, 311 aa, Zea mays subsp. mays
  peptide (1)..(311): Ceres Seq. ID no. 12375565
MPSSNLQCFLDCTTPTVETHILPKTNGRLPTDAWHHAEMDSVEYFNLADLWEQYYEWSAYGAGATVQLPGGDRVVQYYVPYLSGMQLYTNKVLTASRSFGEDNGMDLWSDDEDNEKMSRSWSSTSDESLFNCDVLWSNRKRPGHLYFEFFEVGSPYGRVPLIDKVYELSQGFPGLTSLKSAELSPVSWMSVAWYPIYHIPYQRSVKDLSACFLTYHTISSSFQDHGLETMTTDCCHPVANGKQNGHMDKKSNTVSLPPFGLAAHKIQGSLWTNPMTGDRRKMDFLFSAADSWLKQLGVQHHDFNFFITHPM

SEQ ID NO: 19594 - protein, 273 aa, Zea mays subsp. mays
  peptide (1)..(273): Ceres Seq. ID no. 12375566
MDSVEYFNLADLWEQYYEWSAYGAGATVQLPGGDRVVQYYVPYLSGMQLYTNKVLTASRSFGEDNGMDLWSDDEDNEKMSRSWSSTSDESLFNCDVLWSNRKRPGHLYFEFFEVGSPYGRVPLIDKVYELSQGFPGLTSLKSAELSPVSWMSVAWYPIYHIPYQRSVKDLSACFLTYHTISSSFQDHGLETMTTDCCHPVANGKQNGHMDKKSNTVSLPPFGLAAHKIQGSLWTNPMTGDRRKMDFLFSAADSWLKQLGVQHHDFNFFITHPM

SEQ ID NO: 19595 - DNA, 433 bp, Zea mays subsp. mays
  misc_feature (1)..(433): Ceres Seq. ID no. 2789525
  misc_feature (1)..(433): Ortholog of  Ceres SEQ ID NO 15175849 as cited in SEQ ID NO 55644
catgttcgttggtctgcaaggttctggtaaaactactacttgtacaaaatatgcttattatcatcagaagaaaggattcaaaccagcactggtttgtgctgatacatttagggctggtgcttttgatcagttaaagcaaaatgcaacgaaggccaagattcccttttatggaagctacatggaatctgatccagtgaaaattgctgttgagggtgtggagaggttcaagaaagaaaactgtgatctcatcattgtggacacaagtggaaggcacaaacaagaagcggcactctttgaagaaatgcggcaagtttcggaagcaacaaaaccagacctggtgatttttgtgatggacagtagtattggtcaggctgcatttgatcaagcacaggcatttaaacaaagtgtttctgttggtgcctgtgawtattac

SEQ ID NO: 19596 - protein, 144 aa, Zea mays subsp. mays
  peptide (1)..(144): Ceres Seq. ID no. 2789526
  misc_feature (142)..(142): Xaa is any aa, unknown or other
MFVGLQGSGKTTTCTKYAYYHQKKGFKPALVCADTFRAGAFDQLKQNATKAKIPFYGSYMESDPVKIAVEGVERFKKENCDLIIVDTSGRHKQEAALFEEMRQVSEATKPDLVIFVMDSSIGQAAFDQAQAFKQSVSVGACXYY

SEQ ID NO: 19597 - protein, 85 aa, Zea mays subsp. mays
  peptide (1)..(85): Ceres Seq. ID no. 2789527
  misc_feature (83)..(83): Xaa is any aa, unknown or other
MESDPVKIAVEGVERFKKENCDLIIVDTSGRHKQEAALFEEMRQVSEATKPDLVIFVMDSSIGQAAFDQAQAFKQSVSVGACXYY

SEQ ID NO: 19598 - DNA, 675 bp, Zea mays subsp. mays
  misc_feature (1)..(675): Ceres Seq. ID no. 12375559
  misc_feature (1)..(675): Ortholog of  Ceres SEQ ID NO 13597865 as cited in SEQ ID NO 64954
gcacgagaccattacctagaacatcctaatcgaaaaatgttcgtacccaccgccatcactacgcatgccggtccgttaagcttcctccccagcttaccgcgtgctgaaaccctagccgccgaggagccgacgatgtcggacccttacaacccgtactaccgtggagccttcccaggcggcgacggtgcgccgccgccgctgccgccttactcggactttgatgtcgacctcgtcgcgacccgttacaccggcaccccacggtctcatccatcctctgccgacgtcggcgccttcgaatcgcatctcggcgcgagacgattcgcggaagttctctatcagtaccaccaatcttgtatgggaagtcatagtactgttggccagagtgagactttatattcatcaattactatggctaagcgccctaggcttgaaagcagccttcctatatatccacaacgaccggggcaaaaggactgtgccttctatatgagcactggaacctgtaagtatggagagacttgcaaatttgaccatccacaatgggttccagagggtggggttccaaactggaaagaggtcctgaatgatgaggattattatcctgagcgaccaggggaaccagattgtccttatttattgagtagtagatgtaagtttaaatctaaatgcaagttc

SEQ ID NO: 19599 - protein, 225 aa, Zea mays subsp. mays
  peptide (1)..(225): Ceres Seq. ID no. 12375560
ARDHYLEHPNRKMFVPTAITTHAGPLSFLPSLPRAETLAAEEPTMSDPYNPYYRGAFPGGDGAPPPLPPYSDFDVDLVATRYTGTPRSHPSSADVGAFESHLGARRFAEVLYQYHQSCMGSHSTVGQSETLYSSITMAKRPRLESSLPIYPQRPGQKDCAFYMSTGTCKYGETCKFDHPQWVPEGGVPNWKEVLNDEDYYPERPGEPDCPYLLSSRCKFKSKCKF

SEQ ID NO: 19600 - protein, 213 aa, Zea mays subsp. mays
  peptide (1)..(213): Ceres Seq. ID no. 12375561
MFVPTAITTHAGPLSFLPSLPRAETLAAEEPTMSDPYNPYYRGAFPGGDGAPPPLPPYSDFDVDLVATRYTGTPRSHPSSADVGAFESHLGARRFAEVLYQYHQSCMGSHSTVGQSETLYSSITMAKRPRLESSLPIYPQRPGQKDCAFYMSTGTCKYGETCKFDHPQWVPEGGVPNWKEVLNDEDYYPERPGEPDCPYLLSSRCKFKSKCKF

SEQ ID NO: 19601 - protein, 181 aa, Zea mays subsp. mays
  peptide (1)..(181): Ceres Seq. ID no. 12375562
MSDPYNPYYRGAFPGGDGAPPPLPPYSDFDVDLVATRYTGTPRSHPSSADVGAFESHLGARRFAEVLYQYHQSCMGSHSTVGQSETLYSSITMAKRPRLESSLPIYPQRPGQKDCAFYMSTGTCKYGETCKFDHPQWVPEGGVPNWKEVLNDEDYYPERPGEPDCPYLLSSRCKFKSKCKF

SEQ ID NO: 19602 - DNA, 1787 bp, Zea mays subsp. mays
  misc_feature (1)..(1787): Ceres Seq. ID no. 12418176
  misc_feature (1)..(1787): Ortholog of  Ceres SEQ ID NO 15180797 as cited in SEQ ID NO 1231
gcacgagaccattacctagaacatcctaatcgaaaaactttccctccttgccacttcggattctcctcctctgcctttcgcttcgtcactcgccacgccacgccaaagaccaagaaaaaaaaggacgattttttcctagctgcaacttccctcacgccatggaggaggagatgccgctgcagctgctctccgcttcctccgccgccgtcgctgtctgagctcccccttcgctcgatctctccatcgggccgggcctacctctcctagcagtgaatcaaaccatggcagctttcgccgcgctgttcgaccccctgtactgcccggaggagcacctcgatctgtaccgcgacgaacccggcgagggtgcggacgagcagtggccgggccagcacggacagcaggagccggctgtcctcgacgacgagctgccggcactgttcgaggcacaccgggccaaggagggggtggtgctggcggaggatggcgggtacggcggcgcagctgggcgtgaggccgcggtcggctgggtttcacgcgccgcggcgcggctaggcttctccgcgctcaccgccgcgctcgccgccgcctacctcgaccgctgcttcctccccgggggcgcgctccggctcggcgaccagccctggatggcgcgcctagccgccgtcacctgcttcgcgctcgccgccaaggtcgaggagacgcgcgtgccgccgctcctcgacctccagctctacgccgccgctgacgccgcggatccgtacgtattcgaggccaagacggtgcgccggatggagctgctcgtgctctccgcgcttgggtggcggatgcaccctgtcacgcccttctcctacctccagcccgtcctcgccgacgctgcgacgcgcctgcgtagctgcgagggcgtcctgctcgcggtcatggccgactggaggtggcctcggcaccggccttcggcgtgggccgccgccgcgttgctgatcacagccgccgccggcgacggcgacacggagctcctggcgctcatcaatgcccccgaggacaagaccgccgagtgtgccaagatcatctccgaggtgacgggcatgagcttcctcgcctgcgatgtcggcgtgagcgccggaaataagcgtaagcacgcggcggcgcagttgtactcgccgccgccgagcccgagcggcgtgatcggcgcgctgtcctgcttcagctgcgagagctcgacgtccgccaccgctatggctgcggcggtcggcccgtgggcgccgtcggcgtccgtgtccgtgtcgtcctctccagagccaccaggtcgggcccccaagcgcgcagcggcggcgtcggcgtcggcgtcggcgtcagccggggtcgcgccaccggtccaggtcccgcatcagctaccccccgacgaggagagccgcggcgcctggccgtccacctgcgccgcgtgacgcaccgtgccggaaacggtgcctatggcgagaccgccgttcggtggcggtggagaatggagaacaaggagcatcattggctcgcgtcggtgagcaggagaacgaactattttgcccattgccgtgacagatggggggcaagagagataagaaaagatgtccttgtttgcatgcttatggcgggagtaatgtttgcatgcttgtggcagcacattttgcaatgatggttctcagagaacttagctggaggtggaagatgattagcggataatttgccgtcgagatcgatggcgatttagtatttgttgcaactgtagtgatgctagttcttgccgtgttcttgtt

SEQ ID NO: 19603 - protein, 386 aa, Zea mays subsp. mays
  peptide (1)..(386): Ceres Seq. ID no. 12418177
MAAFAALFDPLYCPEEHLDLYRDEPGEGADEQWPGQHGQQEPAVLDDELPALFEAHRAKEGVVLAEDGGYGGAAGREAAVGWVSRAAARLGFSALTAALAAAYLDRCFLPGGALRLGDQPWMARLAAVTCFALAAKVEETRVPPLLDLQLYAAADAADPYVFEAKTVRRMELLVLSALGWRMHPVTPFSYLQPVLADAATRLRSCEGVLLAVMADWRWPRHRPSAWAAAALLITAAAGDGDTELLALINAPEDKTAECAKIISEVTGMSFLACDVGVSAGNKRKHAAAQLYSPPPSPSGVIGALSCFSCESSTSATAMAAAVGPWAPSASVSVSSSPEPPGRAPKRAAAASASASASAGVAPPVQVPHQLPPDEESRGAWPSTCAA

SEQ ID NO: 19604 - protein, 265 aa, Zea mays subsp. mays
  peptide (1)..(265): Ceres Seq. ID no. 12418178
MARLAAVTCFALAAKVEETRVPPLLDLQLYAAADAADPYVFEAKTVRRMELLVLSALGWRMHPVTPFSYLQPVLADAATRLRSCEGVLLAVMADWRWPRHRPSAWAAAALLITAAAGDGDTELLALINAPEDKTAECAKIISEVTGMSFLACDVGVSAGNKRKHAAAQLYSPPPSPSGVIGALSCFSCESSTSATAMAAAVGPWAPSASVSVSSSPEPPGRAPKRAAAASASASASAGVAPPVQVPHQLPPDEESRGAWPSTCAA

SEQ ID NO: 19605 - protein, 217 aa, Zea mays subsp. mays
  peptide (1)..(217): Ceres Seq. ID no. 12418179
MELLVLSALGWRMHPVTPFSYLQPVLADAATRLRSCEGVLLAVMADWRWPRHRPSAWAAAALLITAAAGDGDTELLALINAPEDKTAECAKIISEVTGMSFLACDVGVSAGNKRKHAAAQLYSPPPSPSGVIGALSCFSCESSTSATAMAAAVGPWAPSASVSVSSSPEPPGRAPKRAAAASASASASAGVAPPVQVPHQLPPDEESRGAWPSTCAA

SEQ ID NO: 19606 - DNA, 1973 bp, Zea mays subsp. mays
  misc_feature (1)..(1973): Ceres Seq. ID no. 15179312
  misc_feature (1)..(1973): Ortholog of  Ceres SEQ ID NO 13596865 as cited in SEQ ID NO 60644
agcatcgattaccatttccatgtcttgtgcatcttcggattctacccttcccatgctgtgtgtggcctccattcaaatcttttttcaaattggcaaaaaaaaaacactatttatgttgaaacgccttccaaattattaagggcaggcagaccttacttgttttatggctagaaataatgagggtcatctccagctgccagagatggatcatattcaacccaagaacaccccgcacaatgaaccactgcctctaggccagaagcttatgctgcatcatggaagtgatgcaccccttagaattggtcattcaagtcatgagaatatgagacttagatcaaatgatcttccacctttaagtcacactgtgcaaactcaaggttatagagttgggaacccaggagcctcgcatactccttttgttcattgtcatgctggaagttccagtagtcatttaccagaacctgctgtgaattatccacataggtcggaggaaggctttgctccagtgggttcccatatggacaacagaagggctgcaacgaagcgaaaagatcctattgtgcaccctgctgggatcagtgctactggttattatgttggaagttcttccaatactcagctatctaactctgtacagccaaatactgctccactttctgagcccttacttcgtcaaatacctttaagcattgaccgaagtggttgggatggcctacacttaattcatcaagaaggatttcagaggaatgtgagagcatgccagcgccacagtcataatatttcattacagcccagatcagcttcaacctacccactaaacagtgttcatgtgccgtcatttggttcaactacaagtgcttccttaagtatgtcagtggaaaggaaccaagcatctgtttctgtgcaaacaagaaatgtaccatcaggtgcaccaggtatcactagcaggtccctgacaaggagggcttactatcctgtggttggaagtagcaactcaagcgttgatgccgttccaactatccgtggatcatctggcgcagcaatatttgctaatggtggctatgctcttaatgctgatgctggaactgtttctatctaccctaatccagctcctgctacttcatctggctctataaccatgcccatgcccatgctccatcagatggtcattcagagccatccacctgctacctctgcagcaacctctacatccatgtggatcgctcaaccactacctgccagaactgctgcggcttctagacatgcaagacgcgtatcagcagggcttgccaacaatggaaggtacagaagggctaggagctcttactacagccttcatccactgatgatggtagaggcagaggcggttcatgatggaccagttggtcttttacgaatcaagagcagcagccgctgacccccacagggacatgagactggacatcgacaacatgagctacgaggacctgttggctttgggagaatctatgggcaatgtcaacacaggcttggccgatgagaaaatttcgaagtgcgtgaaagaagtggtctgctgcagttccgaccagacgcaaaccgatcaagatgaccaggatgacggaagctgcgtcatctgcctggagggttacagagacaaggatatgctggggatactgaaatgcaggcacgacttccacgccggctgcatcaagaagtggctgcagacgaagaactcgtgcccggtgtgcaaagccgccgccgcctaggacgacaccagaggagcgagcaactattttgtgctcctcctcgatctattcatttttttaggctcaggtcgaattatatatgtcgttccattcttttgattccagccagtcgtgtaaataaatgccgtgtgttggttattttagttatcacttgggttacattagcccaaattctcctgttgcattgtaaacaatccagtggtgaaggcaattgatcaagtgcgttgc

SEQ ID NO: 19607 - protein, 417 aa, Zea mays subsp. mays
  peptide (1)..(417): Ceres Seq. ID no. 15179313
MARNNEGHLQLPEMDHIQPKNTPHNEPLPLGQKLMLHHGSDAPLRIGHSSHENMRLRSNDLPPLSHTVQTQGYRVGNPGASHTPFVHCHAGSSSSHLPEPAVNYPHRSEEGFAPVGSHMDNRRAATKRKDPIVHPAGISATGYYVGSSSNTQLSNSVQPNTAPLSEPLLRQIPLSIDRSGWDGLHLIHQEGFQRNVRACQRHSHNISLQPRSASTYPLNSVHVPSFGSTTSASLSMSVERNQASVSVQTRNVPSGAPGITSRSLTRRAYYPVVGSSNSSVDAVPTIRGSSGAAIFANGGYALNADAGTVSIYPNPAPATSSGSITMPMPMLHQMVIQSHPPATSAATSTSMWIAQPLPARTAAASRHARRVSAGLANNGRYRRARSSYYSLHPLMMVEAEAVHDGPVGLLRIKSSSR

SEQ ID NO: 19608 - protein, 404 aa, Zea mays subsp. mays
  peptide (1)..(404): Ceres Seq. ID no. 15179314
MDHIQPKNTPHNEPLPLGQKLMLHHGSDAPLRIGHSSHENMRLRSNDLPPLSHTVQTQGYRVGNPGASHTPFVHCHAGSSSSHLPEPAVNYPHRSEEGFAPVGSHMDNRRAATKRKDPIVHPAGISATGYYVGSSSNTQLSNSVQPNTAPLSEPLLRQIPLSIDRSGWDGLHLIHQEGFQRNVRACQRHSHNISLQPRSASTYPLNSVHVPSFGSTTSASLSMSVERNQASVSVQTRNVPSGAPGITSRSLTRRAYYPVVGSSNSSVDAVPTIRGSSGAAIFANGGYALNADAGTVSIYPNPAPATSSGSITMPMPMLHQMVIQSHPPATSAATSTSMWIAQPLPARTAAASRHARRVSAGLANNGRYRRARSSYYSLHPLMMVEAEAVHDGPVGLLRIKSSSR

SEQ ID NO: 19609 - protein, 383 aa, Zea mays subsp. mays
  peptide (1)..(383): Ceres Seq. ID no. 15179315
MLHHGSDAPLRIGHSSHENMRLRSNDLPPLSHTVQTQGYRVGNPGASHTPFVHCHAGSSSSHLPEPAVNYPHRSEEGFAPVGSHMDNRRAATKRKDPIVHPAGISATGYYVGSSSNTQLSNSVQPNTAPLSEPLLRQIPLSIDRSGWDGLHLIHQEGFQRNVRACQRHSHNISLQPRSASTYPLNSVHVPSFGSTTSASLSMSVERNQASVSVQTRNVPSGAPGITSRSLTRRAYYPVVGSSNSSVDAVPTIRGSSGAAIFANGGYALNADAGTVSIYPNPAPATSSGSITMPMPMLHQMVIQSHPPATSAATSTSMWIAQPLPARTAAASRHARRVSAGLANNGRYRRARSSYYSLHPLMMVEAEAVHDGPVGLLRIKSSSR

SEQ ID NO: 19610 - DNA, 1485 bp, Zea mays subsp. mays
  misc_feature (1)..(1485): Ceres Seq. ID no. 13496204
  misc_feature (1)..(1485): Ortholog of  Ceres SEQ ID NO 12617472 as cited in SEQ ID NO 64543
tagaacatcctaatcaaaaaaaaagctatcgcttatcatgctaggctaggcagctttgttgagaaggagcacgggggaagcccggcaagatcactacacgtggcatgtatgtccaaaactccaaatgccgagtagacagtggcggcggtagagagcgctgttaccttgcggggtgacgggggcaccttcttcggcgcggctgcagctgcagcatccgccgccgcgccggacgcggaggccgtgctggcgtaccgctcgggcgccgcgccgcgccgcggaaagccgcgaaggagggcgttgcggagggtgcgtcgccacgcgagtgcggtggaagatgacatcgggaacgcgaggggagaccaggcgcgggaagggcgggaggactgtgaagagcgcgaggagggcagcggcggcggcggcggcgctgatgctgatgctggtgcaggggctgatgagccggattcccgttcggcgtggccgcgtggggagcaagcagaagtgcagaactgcacaaggagagggcccacataaccatttctatgatattgcgcgtgtctcagtgtctcggcccagtttttcatgggctgacccggttatgtggccttgttagttttcgcctaatttcaaataacagcaatttcttagtggcccgtacactctgcagcagtgcggtgcgggcgtgcggcctccctttttttctccagttcctccggcggcggcgtgcttggcggtgcgccaggtgcccagatctccaccatcttagtcgccggcgacgagcatcaccaggttcccgatgaccatggcgcagcgcacgatgtgcctgcttcggcggtccattgggtttacagcgccgcaggcacagagagccctgagtaccactgccgcaccagcggcggagggtgcggccgtggctgaagctacggcgaaggaggcgaagaggaggaggaagaatctgtttgacgtagtgcagttcctgccagagtggggcattggatacaaggttgccaagaccacctggcgtgacgtctcctatcagatcaccaagatcaacctgtacaaggatggtcggcatggaaaggcgtgggagcttcggtacaaggcaggtgtgcaagctgcagacaccccaactaggatcagcggtgttaacaaacgtgggtggaagtacataaaagaatcacagaagaaactacaagaagcccccaaagtagacgtagctgttgctgctgcctagttcgtagttacatgcatgtttgttgtaagatgattcggtaaatctttagatggctgttgccagggtgagaacagggaaccacttttttttggatcgactctatacttttttgtcgatgacgactgaacctctctgcaacatgtccagtttcttttcttttccttatggaacgaacctttaccgtaatgtactgatgcagaagaactgcgttgattgtggcgatctagttttcattcaaacgcaagccttgtttc

SEQ ID NO: 19611 - protein, 145 aa, Zea mays subsp. mays
  peptide (1)..(145): Ceres Seq. ID no. 13496205
MTMAQRTMCLLRRSIGFTAPQAQRALSTTAAPAAEGAAVAEATAKEAKRRRKNLFDVVQFLPEWGIGYKVAKTTWRDVSYQITKINLYKDGRHGKAWELRYKAGVQAADTPTRISGVNKRGWKYIKESQKKLQEAPKVDVAVAAA

SEQ ID NO: 19612 - protein, 143 aa, Zea mays subsp. mays
  peptide (1)..(143): Ceres Seq. ID no. 13496206
MAQRTMCLLRRSIGFTAPQAQRALSTTAAPAAEGAAVAEATAKEAKRRRKNLFDVVQFLPEWGIGYKVAKTTWRDVSYQITKINLYKDGRHGKAWELRYKAGVQAADTPTRISGVNKRGWKYIKESQKKLQEAPKVDVAVAAA

SEQ ID NO: 19613 - protein, 138 aa, Zea mays subsp. mays
  peptide (1)..(138): Ceres Seq. ID no. 13496207
MCLLRRSIGFTAPQAQRALSTTAAPAAEGAAVAEATAKEAKRRRKNLFDVVQFLPEWGIGYKVAKTTWRDVSYQITKINLYKDGRHGKAWELRYKAGVQAADTPTRISGVNKRGWKYIKESQKKLQEAPKVDVAVAAA

SEQ ID NO: 19614 - DNA, 1617 bp, Zea mays subsp. mays
  misc_feature (1)..(1617): Ceres Seq. ID no. 12375523
  misc_feature (1)..(1617): Ortholog of  Ceres SEQ ID NO 15175488 as cited in SEQ ID NO 54441
gcacgagaccattacctagaacatcctaatcgaaaaatggatggtggagcatgaataatttgctgaggcccccctttgagcagcagcaccacgcttctcttttcatgccgtccacaaccaccagcagcagcaccgccgccgccgcgccctcttcttcttcgtcgtcgtcgccgcctctccaatccttctcctctctgctgctctcgaaccactacccgctgcctaccaccaccagcacgtcgccgtggcagcacgacaccagcatcacaagtagccatggccagccggattcttggagccagctcatacacaaggaaagccagcagatggcgtttccaactacgatttgttcggaatccggaggcggcggcagcagctacgtcgtctacggtgccgcagcggctagccatgggagcagcacaagtgatgtcgagatccagttgccatggggaagcagcagcgtactccagcagcagcagaaagcgtcctctcctaggtcttcttccagaaccacagcgacgacgacctctcccggaagcaacatgctggagttctccaacaacagtagcagttcaccacgtgagtgcatcagtacagtatctggatcagctttcaagaaggctaggacccaagaaccctccccggctcaatctactgtgaaggtgaggaaggagaagctaggggatcgaataactgctctccaccagcttgtctccccgtttggaaagactgacacagcgtctgtactccttgaagccattgggtacatcagattcctccatagtcaaattgaggctctgagctccccgtacgtgggcggcagcaatggaggtgggggcggctccaagcagaatcagcagctccacgaggctagtgcgcagagagaaagcaggcacagcatatttccagaagaccctggccagctcctgcatgacagcagcgcaataaagaaacgggccggactgcagcctgatggtgagcaggatgaagaaagctgtgatgaagagaagaagaaggatctgagaagcaggggtctgtgcctcgtcccggtgagctgcacgctggacgtgggtgtggacgtggtcgctggccccgcagactactgggcggcagctgcgccggctttcggcatggggttcggtgcgtagatgatgctggccaggacgtacgatcgatgctgtgaggaacacttgtgtgtgtctgtgtgcgccatatgcatgtatgggctgcacctgcatgcatagcatcaggagcagccatcctggtggaagctggagaatgctcaagaaggctggctcctcttgatgctatatatgcgtatggtatatggtgcacacaccgacaatgcatgcatgggcatatattatatagctacagagacgctgagagtatatgacttgcgtttctgtgtttgtgtgtacgtgatgagatcttgtctagctagctagagcgagatcaaacaatttgggtgccatggagaggggcgctatagctgcagatatttaattgttaaggctaggagtactgcgcgcggatctgtaagcaatgcaactcttttaagtcttcgtcattgaggcgtcactgtgtgctatatatatatgcatggccgaaatgtgc

SEQ ID NO: 19615 - protein, 365 aa, Zea mays subsp. mays
  peptide (1)..(365): Ceres Seq. ID no. 12375524
MNNLLRPPFEQQHHASLFMPSTTTSSSTAAAAPSSSSSSSPPLQSFSSLLLSNHYPLPTTTSTSPWQHDTSITSSHGQPDSWSQLIHKESQQMAFPTTICSESGGGGSSYVVYGAAAASHGSSTSDVEIQLPWGSSSVLQQQQKASSPRSSSRTTATTTSPGSNMLEFSNNSSSSPRECISTVSGSAFKKARTQEPSPAQSTVKVRKEKLGDRITALHQLVSPFGKTDTASVLLEAIGYIRFLHSQIEALSSPYVGGSNGGGGGSKQNQQLHEASAQRESRHSIFPEDPGQLLHDSSAIKKRAGLQPDGEQDEESCDEEKKKDLRSRGLCLVPVSCTLDVGVDVVAGPADYWAAAAPAFGMGFGA

SEQ ID NO: 19616 - protein, 347 aa, Zea mays subsp. mays
  peptide (1)..(347): Ceres Seq. ID no. 12375525
MPSTTTSSSTAAAAPSSSSSSSPPLQSFSSLLLSNHYPLPTTTSTSPWQHDTSITSSHGQPDSWSQLIHKESQQMAFPTTICSESGGGGSSYVVYGAAAASHGSSTSDVEIQLPWGSSSVLQQQQKASSPRSSSRTTATTTSPGSNMLEFSNNSSSSPRECISTVSGSAFKKARTQEPSPAQSTVKVRKEKLGDRITALHQLVSPFGKTDTASVLLEAIGYIRFLHSQIEALSSPYVGGSNGGGGGSKQNQQLHEASAQRESRHSIFPEDPGQLLHDSSAIKKRAGLQPDGEQDEESCDEEKKKDLRSRGLCLVPVSCTLDVGVDVVAGPADYWAAAAPAFGMGFGA

SEQ ID NO: 19617 - protein, 273 aa, Zea mays subsp. mays
  peptide (1)..(273): Ceres Seq. ID no. 12375526
MAFPTTICSESGGGGSSYVVYGAAAASHGSSTSDVEIQLPWGSSSVLQQQQKASSPRSSSRTTATTTSPGSNMLEFSNNSSSSPRECISTVSGSAFKKARTQEPSPAQSTVKVRKEKLGDRITALHQLVSPFGKTDTASVLLEAIGYIRFLHSQIEALSSPYVGGSNGGGGGSKQNQQLHEASAQRESRHSIFPEDPGQLLHDSSAIKKRAGLQPDGEQDEESCDEEKKKDLRSRGLCLVPVSCTLDVGVDVVAGPADYWAAAAPAFGMGFGA

SEQ ID NO: 19618 - DNA, 1480 bp, Zea mays subsp. mays
  misc_feature (1)..(1480): Ceres Seq. ID no. 12364480
  misc_feature (1)..(1480): Ortholog of  Ceres SEQ ID NO 14312208 as cited in SEQ ID NO 54845
  misc_feature (1)..(1480): Ortholog of  Ceres SEQ ID NO 15171755 as cited in SEQ ID NO 57047
  misc_feature (1)..(1480): Ortholog of  Ceres SEQ ID NO 13597613 as cited in SEQ ID NO 65334
  misc_feature (1)..(1480): Ortholog of  Ceres SEQ ID NO 13655958 as cited in SEQ ID NO 65456
  misc_feature (1)..(1480): Ortholog of  Ceres SEQ ID NO 14303664 as cited in SEQ ID NO 65892
  misc_feature (1)..(1480): Ortholog of  Ceres SEQ ID NO 15178832 as cited in SEQ ID NO 0
gcacgagaccattacctagaacatcctaatcgaaaagccaaattgcattgacagagaacgagagaaaaaaaaatcctaatccaccctcgccgcgagatcgccggtcgctcccatgtcgactccagccgccgctgcgaagcaatacttttgctaccaatgcaaccgcaccgtcctcatcgcggcctccgccgtcgccgccggggagctctcgtgccccgagtgccacggcaacttcctcgaggaggtcaccatccctgccccaaccttcatccagctccctttcccttttgcttccaccacgatccctaccgccagtaccgccccgcgccccgccccagcagccggcaccggcaggcccccttccttctcgtcctcctccgctgcgacctctcggtccgagccccgctacatctcctccatcctcaactccttcgtcggacccggcgaacaacccaacaggatcagcggctccagcatacgtttcgcccctggcacggccacccacaggaacgagcccgagcccttcgacccggtaatgttcttccagaattacatccaaagcctcgtggagggaggcgccaacatccaggtcctcttcgacgatgccagcgcgagcctcggctccggacccggcctagggcgcctcggcggggcaagcttcggggattacttcgtcggcccaggcttggaacaactcatcgagcagctcgccgagaacgaccccaaccgctatggcacgccgccggctgccaagtcggccctctcctcgctccccgacgtcgtcgtgactcacaccatggtcgcagctgcggagggcgctgagtgcgccgtctgcaaggaggatttctctcctggagaggtggccaagcagatgccctgtaaccacatctaccacaccgactgcatcatgccgtggcttgagcttcacaactcgtgccccatctgtcgctttgagcttcccactgacgatcctgattatgaggtgcggaagggctctaattctcagcaggctgttggtattgctgctgctgcatcagggagctctactgctgctgagggacaaatggagaggcaggagaatccaagggtggttgagaggaggttcaatgtgtcgctgccatggccattcagtggattgggagggcaaacatcgcagcaggacgggaacagtggaggcagtggtagcaactcacaaggcagtggctcgcaggatggtggcccacccagcagcaagaattgataaaaaatcagctggaggttcaccttttggcgatctgttaagaagtctgcagtatatacgtgtcaccatgactatacacctacaggaatttacagtctctgtttgttacgaaacaatcgtttgtttttcatgtagacacggcgcaaaaactgccactgcagcagaatttgcgcgctgagagagttgggacttcatgtgtagatttgttgattgatcctggtccatgaaatggtaaacccc

SEQ ID NO: 19619 - protein, 375 aa, Zea mays subsp. mays
  peptide (1)..(375): Ceres Seq. ID no. 12364481
MSTPAAAAKQYFCYQCNRTVLIAASAVAAGELSCPECHGNFLEEVTIPAPTFIQLPFPFASTTIPTASTAPRPAPAAGTGRPPSFSSSSAATSRSEPRYISSILNSFVGPGEQPNRISGSSIRFAPGTATHRNEPEPFDPVMFFQNYIQSLVEGGANIQVLFDDASASLGSGPGLGRLGGASFGDYFVGPGLEQLIEQLAENDPNRYGTPPAAKSALSSLPDVVVTHTMVAAAEGAECAVCKEDFSPGEVAKQMPCNHIYHTDCIMPWLELHNSCPICRFELPTDDPDYEVRKGSNSQQAVGIAAAASGSSTAAEGQMERQENPRVVERRFNVSLPWPFSGLGGQTSQQDGNSGGSGSNSQGSGSQDGGPPSSKN

SEQ ID NO: 19620 - protein, 234 aa, Zea mays subsp. mays
  peptide (1)..(234): Ceres Seq. ID no. 12364482
MFFQNYIQSLVEGGANIQVLFDDASASLGSGPGLGRLGGASFGDYFVGPGLEQLIEQLAENDPNRYGTPPAAKSALSSLPDVVVTHTMVAAAEGAECAVCKEDFSPGEVAKQMPCNHIYHTDCIMPWLELHNSCPICRFELPTDDPDYEVRKGSNSQQAVGIAAAASGSSTAAEGQMERQENPRVVERRFNVSLPWPFSGLGGQTSQQDGNSGGSGSNSQGSGSQDGGPPSSKN

SEQ ID NO: 19621 - protein, 221 aa, Zea mays subsp. mays
  peptide (1)..(221): Ceres Seq. ID no. 12364483
MQPHRPHRGLRRRRRGALVPRVPRQLPRGGHHPCPNLHPAPFPFCFHHDPYRQYRPAPRPSSRHRQAPFLLVLLRCDLSVRAPLHLLHPQLLRRTRRTTQQDQRLQHTFRPWHGHPQERARALRPGNVLPELHPKPRGGRRQHPGPLRRCQREPRLRTRPRAPRRGKLRGLLRRPRLGTTHRAARRERPQPLWHAAGCQVGPLLAPRRRRDSHHGRSCGGR

SEQ ID NO: 19622 - DNA, 1617 bp, Zea mays subsp. mays; identical to SEQ ID NO: 12275
  misc_feature (1)..(1617): Ceres Seq. ID no. 13494824
  misc_feature (1)..(1617): Ortholog of  Ceres SEQ ID NO 14315455 as cited in SEQ ID NO 56988
  misc_feature (1)..(1617): Ortholog of  Ceres SEQ ID NO 13596921 as cited in SEQ ID NO 62368

SEQ ID NO: 19623 - protein, 477 aa, Zea mays subsp. mays; identical to SEQ ID NO: 12276
  peptide (1)..(477): Ceres Seq. ID no. 13494825

SEQ ID NO: 19624 - protein, 417 aa, Zea mays subsp. mays; identical to SEQ ID NO: 12277
  peptide (1)..(417): Ceres Seq. ID no. 13494826

SEQ ID NO: 19625 - protein, 360 aa, Zea mays subsp. mays; identical to SEQ ID NO: 12278
  peptide (1)..(360): Ceres Seq. ID no. 13494827

SEQ ID NO: 19626 - DNA, 1617 bp, Zea mays subsp. mays
  misc_feature (1)..(1617): Ceres Seq. ID no. 12383525
  misc_feature (1)..(1617): Ortholog of  Ceres SEQ ID NO 14308107 as cited in SEQ ID NO 59030
  misc_feature (1)..(1617): Ortholog of  Ceres SEQ ID NO 15226612 as cited in SEQ ID NO 62700
gcacgagaccattacctagaacatcctaatcgaaaaatcgaaaagccgcacccgcacgccagaaacagctctcgcgttgcttccgcacgccgcccatggcgagcctgtcgtcgccgagtctcctctcttccttcctcggcgaccgcctcgcactctccactaggcctctccttctccgctccgctgtcccaggcagcaggcggctggcgtatcaagcaacgagaacgctatgcaacttggtggatatcctatttaacaggagaaatcaggatgatgcaccagaaaacaaccctagacgcctgcgtcctgggaaagtatctccacgccttagtgttcccaatcatatacaacggcctccatatgtcaattctcgtcaacaacgacctggtatgaataatggacctgaaatacatgatgagaacgggatcgagtgcatgagagcttctggaaagcttgctgcacaggttttgaaatttgctgggactcttgtaaaggcataacgactgatgaaattgataaagcagtgcaccaaatgataattgataatggagcatatccttcacctcttggttattgtggatacccaaagagtgtctgcacttcagtgaatgaatgcatctgtcatgggattccggattctcgtccccttgaggatggagatatcatcaatattgatgttactgtctacctcaatggctaccatggtgatacatctgctacatttctttgcggtgatgttgatgacgaagctaagaaattagttaaggtgacaagagaatgtctcgacaaggctatatcgatttgttcacctggggtggagatcaaacaaattggtagaactatacagtatgtaatttctgagtaaccaagcttttaaacagatgcacatatttttttattatctttatcttaaaaaacaacattcagtttatcgataagctgtattgtcttaatttgtatgcgtaacagatctggtaatcaaaacgaactcttgttccaactactatacttacgacatttaatctttgaagggatcatgcagacaagtttaagtttggtgtagttagacagtttgttggccatggggttggcaaagtttttcatgctgagcctgttgtgcttcatttcagtgagttccccactttaacgaaaacatctttttattaattgctgtcttgcctcccggctatctcaaggttctggttgcactctgcaccatattaggatgtgatatctgtgccaatgacttcgaaatttgcaggaaacaatgaatggggacgtatgatgttgaatcaaacatttactatagagcccatgctaaccatagggagcatcaaccctgtcatgtggtccgatgactggaccgcagtgacagaagacggcagcttgtcagcacagtttgagcacacgatactcattaccgaagatggccctgaaatactgacacagtgttaatggaaggccaaataacaaagaacaatcgttagtcagctggcaagatcctgcatttctttttggggactaattggtccaacctaaactctgatgcaaaatggcaaactcacattgtaatctcggttcatcggtacaacgatatatgtatagaaattgtantag

SEQ ID NO: 19627 - protein, 134 aa, Zea mays subsp. mays
  peptide (1)..(134): Ceres Seq. ID no. 12383526
MASLSSPSLLSSFLGDRLALSTRPLLLRSAVPGSRRLAYQATRTLCNLVDILFNRRNQDDAPENNPRRLRPGKVSPRLSVPNHIQRPPYVNSRQQRPGMNNGPEIHDENGIECMRASGKLAAQVLKFAGTLVKA

SEQ ID NO: 19628 - protein, 130 aa, Zea mays subsp. mays
  peptide (1)..(130): Ceres Seq. ID no. 12383527
ARDHYLEHPNRKIEKPHPHARNSSRVASARRPWRACRRRVSSLPSSATASHSPLGLSFSAPLSQAAGGWRIKQRERYATWWISYLTGEIRMMHQKTTLDACVLGKYLHALVFPIIYNGLHMSILVNNDLV

SEQ ID NO: 19629 - protein, 110 aa, Zea mays subsp. mays
  peptide (1)..(110): Ceres Seq. ID no. 12383528
MIIDNGAYPSPLGYCGYPKSVCTSVNECICHGIPDSRPLEDGDIINIDVTVYLNGYHGDTSATFLCGDVDDEAKKLVKVTRECLDKAISICSPGVEIKQIGRTIQYVISE

SEQ ID NO: 19630 - DNA, 2117 bp, Zea mays subsp. mays
  misc_feature (1)..(2117): Ceres Seq. ID no. 12382616
  misc_feature (1)..(2117): Ortholog of  Ceres SEQ ID NO 13596921 as cited in SEQ ID NO 62368
gcacgagaccattacctagaacatcctaatcgaaaacccgatttcaccgaccatttttccccatttcacagcgggcgaatatctctcatctcccccatcctctttcctgcaacaactcctacccacccgacagaaatatcctaagcgctgacccgaatacccgattcgctcctcgtccggtcgattcctgctcctaatcgctcgaatcgagtccttgccccgtgttccgtgccacaatctgggcgcttggctcccgcgagccggggttcttgggcctgggcggaggccatggacaagccggtggcgccgggcattatcaaggaggagctcctggagcagcagccgccgacgcaggacggtgtgggtggcggcggggatgcgccgcgcccgatggaggggctgcacgaggtgggtcccccgcctttcctcaccaagacgttcgaccttgtggaggacccggccaccgacgccgtcctctcctggagccgcgccggcaacagcttcatcgtctgggacccgcacgtcttcgccgacgggctgctcccgcgcctcttcaagcacagtaacttctccagcttcgtgcgccagctcaacacctatggcttcagaaggttgatcctgacaggtgggagtttgcaaatgaaggtttcctcagaggtcaaaggcacctgctgaagatgataaagagaaggaagccaccatcagctgtggcaccattgcgacagcaacgtgcccctgcttcttgcctggaggttggtgagtttggatttgaggaggagattgataggctgaagcgtgacaagaacattttaatcacagaagtagtaaaactaaggcaggagcagcaaagtactaaagatcatgtgagagccatggaggaaaggctacgagtggctgaacagaagcaggtacagatgatggggttcttggcaagagcaatgcggaacccagagttcttcctcagttggcccagcagcaagacaagaggaaggagctcgaggataccatctcaaagaaaagaaggcggcccattgacaacacaccattctacagtgatggggaaagcgaacagcttgattcacagttgaaaatgttcgagtcaggtgttctcaatgggctcaatgaacctgagctggagaatttagcagtgaacattcaggagcttgggaagggaagcatagatgatgggaacttgactcaagttagtgaccagtcagagctgaacgacgacttctgggcagagcttttggtcgaagattttggagacaaggcaggacagccagagttggagggaagaactgaagacgtgaatgaccttgctcaacaactggggtatctgagttcttctagcccaaaatagagccagttcctaatggttgcccccacaatcactggtgctttccctaccctactgttgcagaccatcctgatcaaaccggtacttttcaaattcaattcaatgacacaaacctgttaaaatctggtaacattttcattccatttcttttatattgctggattagccaggaatgatgatggatctggcagacaaggtttgacgacccatccttctaaccatatccattatgtttgcgcagttgcatcttcagatttgccctcatcttttcttcttcttcttctgaaacattctaaattgctccttatccagttgactggtggtggagaggtgttcatactgaaggcgtgctgtggagaggtcactgccttgacgttgaaggcttagcgctgtactctgctgtgggagttacgtgtggggtgttggctaaatgtctcttccggcgtcttctggcaaaatgatctcgtggacggtgactggcaaagatgcctaggggccaacgtatacgtacacagctgttatcagatcttgttcaaagtcattgcgcggttttgacggtgctatgtatcgatcagggttctggccttctggggttgggttgtagaattgactggctgatctagtgttctccatgtatgactggtgtaaccttaaaacaccctcagcttgttgttgaactgtgacaagcatctcgtttttttgttgtactccattttcatcatcattgtacatcaaattgctgaattatgaacagatccct

SEQ ID NO: 19631 - protein, 136 aa, Zea mays subsp. mays
  peptide (1)..(136): Ceres Seq. ID no. 12382617
MIKRRKPPSAVAPLRQQRAPASCLEVGEFGFEEEIDRLKRDKNILITEVVKLRQEQQSTKDHVRAMEERLRVAEQKQVQMMGFLARAMRNPEFFLSWPSSKTRGRSSRIPSQRKEGGPLTTHHSTVMGKANSLIHS

SEQ ID NO: 19632 - protein, 128 aa, Zea mays subsp. mays
  peptide (1)..(128): Ceres Seq. ID no. 12382618
MDKPVAPGIIKEELLEQQPPTQDGVGGGGDAPRPMEGLHEVGPPPFLTKTFDLVEDPATDAVLSWSRAGNSFIVWDPHVFADGLLPRLFKHSNFSSFVRQLNTYGFRRLILTGGSLQMKVSSEVKGTC

SEQ ID NO: 19633 - protein, 94 aa, Zea mays subsp. mays
  peptide (1)..(94): Ceres Seq. ID no. 12382619
MEGLHEVGPPPFLTKTFDLVEDPATDAVLSWSRAGNSFIVWDPHVFADGLLPRLFKHSNFSSFVRQLNTYGFRRLILTGGSLQMKVSSEVKGTC

SEQ ID NO: 19634 - DNA, 466 bp, Zea mays subsp. mays
  misc_feature (1)..(466): Ceres Seq. ID no. 11415029
  misc_feature (1)..(466): Ortholog of  Ceres SEQ ID NO 13645078 as cited in SEQ ID NO 51158
attttggctcctcactgccgcgccgccaccccctacaggtaaggaagaggagggcaggatgtcgcaccgtaagttcgagcacccgaggcacggctccctcggcttccttcccaggaagcgctcctcccgtcaccgcggcaaggtgaagtcattccctagggatgaccccaagaagccttgccatctcactgccttccttggctacaaggctggcatgactcacattgtccgtgaggttgagaagccaggatccaaactccataagaaggaaacttgtgaggctgttaccatcattgaaacycycttgtcaaaaadcggctcgtggcatatgtgaagactcctcgtggcctccgcacactcaactctgtttgggsccaacatcttagtgaagaagtgaggagaargttctacaagaactggtgcaagagcaagaagaargctttcacaaagtatgctctcaaatatg

SEQ ID NO: 19635 - protein, 110 aa, Zea mays subsp. mays
  peptide (1)..(110): Ceres Seq. ID no. 11415030
  misc_feature (100)..(100): Xaa is any aa, unknown or other
  misc_feature (101)..(101): Xaa is any aa, unknown or other
  misc_feature (105)..(105): Xaa is any aa, unknown or other
FWLLTAAPPPPTGKEEEGRMSHRKFEHPRHGSLGFLPRKRSSRHRGKVKSFPRDDPKKPCHLTAFLGYKAGMTHIVREVEKPGSKLHKKETCEAVTIIEXXLSKXGSWHM

SEQ ID NO: 19636 - protein, 91 aa, Zea mays subsp. mays
  peptide (1)..(91): Ceres Seq. ID no. 11415031
  misc_feature (81)..(81): Xaa is any aa, unknown or other
  misc_feature (82)..(82): Xaa is any aa, unknown or other
  misc_feature (86)..(86): Xaa is any aa, unknown or other
MSHRKFEHPRHGSLGFLPRKRSSRHRGKVKSFPRDDPKKPCHLTAFLGYKAGMTHIVREVEKPGSKLHKKETCEAVTIIEXXLSKXGSWHM

SEQ ID NO: 19637 - DNA, 1252 bp, Zea mays subsp. mays
  misc_feature (1)..(1252): Ceres Seq. ID no. 12350354
  misc_feature (1)..(1252): Ortholog of  Ceres SEQ ID NO 12582036 as cited in SEQ ID NO 50981
  misc_feature (1)..(1252): Ortholog of  Ceres SEQ ID NO 14306066 as cited in SEQ ID NO 57378
  misc_feature (1)..(1252): Ortholog of  Ceres SEQ ID NO 14311969 as cited in SEQ ID NO 58929
  misc_feature (1)..(1252): Ortholog of  Ceres SEQ ID NO 15173523 as cited in SEQ ID NO 61797
  misc_feature (1)..(1252): Ortholog of  Ceres SEQ ID NO 14309357 as cited in SEQ ID NO 0
gatatctcattggagtgcaggactcggaggcagcccatttctaggcagcgcgtctcttcgcgcaccccccaattcgaacgacggagcacgacgcacgcagagccgcagagatccgtcacactgcaagttttgaaaactgaactgtaagatggcatcagcagagctttcccgtgaggaaaatgtgtacatggcgaagctcgccgagcaggcagagaggtacgaggaaatggttgagttcatggagaaggtagcgaaaactgttgactcggaggagctcactgtggaggagcgcaacctcctgtctgttgcatacaagaacgtcattggagcccgccgtgcctcatggcgcatcatctcctccatcgagcagaaggaggagggtcgaggcaatgaggaccgtgtaacactcatcaaggactaccgtggcaagattgaaactgagctcaccaagatctgtgatggcatcctcaagcttctcgaatctcaccttgtgccgtcttccaccgctcccgagtccaaggtcttctatctcaagatgaagggtgactactacagataccttgctgagttcaagactggagctgagagaaaggacgctgctgagaacaccatggtggcatacaaggctgcccaggacattgctttggctgagcttgctccaactcaccctattaggcttggactggcactcaacttctcagtgttctactatgagattctcaactcacccgatcgcgcctgcagtcttgcaaagcaggcttttgacgaggccatctcggaactggacaccctgagcgaggagtcctacaaggacagcactttgatcatgcagctccttcatgataacttgaccctatggacttctgacatctcggaggaccctgcggaagagatcagggaggcgcccaagcacgacttgagcgaggggcagtaaagccggctttacatgcctagaagctagtacctagtgtttgctgctgtctaatgacattatgcaatgtgatctggaccctggtttcttgggtgcgacgcttgtagcagccgtcttatgattatttgtcgggaaaatttgggggctccccatatgagatgctgccgggcaagacctcgccatcccccacctcgtttcaggcgggggacgctggagcctggtccggttgggttgggaagccccttaaactgttgtcgcttgcattttaaccttttcatcgccgttcagtggtcctaaatctatggctcgtctcagtggtct

SEQ ID NO: 19638 - protein, 261 aa, Zea mays subsp. mays
  peptide (1)..(261): Ceres Seq. ID no. 12350355
MASAELSREENVYMAKLAEQAERYEEMVEFMEKVAKTVDSEELTVEERNLLSVAYKNVIGARRASWRIISSIEQKEEGRGNEDRVTLIKDYRGKIETELTKICDGILKLLESHLVPSSTAPESKVFYLKMKGDYYRYLAEFKTGAERKDAAENTMVAYKAAQDIALAELAPTHPIRLGLALNFSVFYYEILNSPDRACSLAKQAFDEAISELDTLSEESYKDSTLIMQLLHDNLTLWTSDISEDPAEEIREAPKHDLSEGQ

SEQ ID NO: 19639 - protein, 248 aa, Zea mays subsp. mays
  peptide (1)..(248): Ceres Seq. ID no. 12350356
MAKLAEQAERYEEMVEFMEKVAKTVDSEELTVEERNLLSVAYKNVIGARRASWRIISSIEQKEEGRGNEDRVTLIKDYRGKIETELTKICDGILKLLESHLVPSSTAPESKVFYLKMKGDYYRYLAEFKTGAERKDAAENTMVAYKAAQDIALAELAPTHPIRLGLALNFSVFYYEILNSPDRACSLAKQAFDEAISELDTLSEESYKDSTLIMQLLHDNLTLWTSDISEDPAEEIREAPKHDLSEGQ

SEQ ID NO: 19640 - protein, 235 aa, Zea mays subsp. mays
  peptide (1)..(235): Ceres Seq. ID no. 12350357
MVEFMEKVAKTVDSEELTVEERNLLSVAYKNVIGARRASWRIISSIEQKEEGRGNEDRVTLIKDYRGKIETELTKICDGILKLLESHLVPSSTAPESKVFYLKMKGDYYRYLAEFKTGAERKDAAENTMVAYKAAQDIALAELAPTHPIRLGLALNFSVFYYEILNSPDRACSLAKQAFDEAISELDTLSEESYKDSTLIMQLLHDNLTLWTSDISEDPAEEIREAPKHDLSEGQ

SEQ ID NO: 19641 - DNA, 2763 bp, Zea mays subsp. mays
  misc_feature (1)..(2763): Ceres Seq. ID no. 13635181
  misc_feature (1)..(2763): Ortholog of  Ceres SEQ ID NO 13598926 as cited in SEQ ID NO 0
ggacttgccgtcggtgctcttcaggaggaaggacgctttctctcgcaccgttctgagctgcgctggtgctcctggaaaggtactggtgcctggaggtggcagtgatgacttgctttcctccgcagagccggtcgtggacactcaacctgaagaactacagatacctgaagcagaactgactgtggagaagacatcctcctcaccaactcaaacaacatcagcagtggctgaagcaagctcaggagttgaggctgaggagaggcctgagctctcagaagtgattggagttggaggtactggtggaaccaaaattgatggtgcaggcatcaaagccaaagcaccactcgtggaggagaaaccacgagttatcccaccaccaggagatggccaacgaatatatgagattgacccaatgttggaagggtttcggggtcaccttgactaccgatacagtgaatataagagattacgtgcggctattgatcaacatgaaggtggtttggatgcattttcacgcggttacgaaaagcttggatttactcgcagcgctgaaggtatcacttacagagaatgggctcctggagcatactctgcagcattagtaggtgacttcaacaactggaacccaaatgctgatgctatggccagaaatgagtacggcgtttgggagattttcctgcctaacaatgctgatggttcccctgctattcctcatggctcacgtgtaaagatacggatggacacaccatctggtgttaaggattccattcctgcctggatcaagttttctgtgcaggctccaggtgaaataccatacaacggtatatattatgacccacctgaagaggagaaatatgtattcaaacaccctcaacctaagcggcccaagtcactgcggatatatgaatcacatgttggaatgagtagcccggaaccaaagataaatacatatgctaacttcagagatgaggtgcttccaagaattaaaaagcttggatacaatgcagtacagataatggcaatccaggaacactcttattatgcaagctttgggtaccatgttacgaatttttttgccccaagtagccgttttgggactccagaggacctaaaatctcttattgataaagcgcatgagcttggcttgctagtgcttatggatattgttcatagtcattcatcaaataataccttggatggtttgaatggtttcgatggcaccgatacacattacttccatggtggtccacgaggccatcattggatgtgggattctcgcctattcaattatgggagttgggaagttttgagatttctattgtcaaatgcgagatggtggcttgaagaatataaatttgatgggtttcgatttgatggggtgacctccatgatgtatactcaccatggattacaagtgacattcactgggaactatggcgagtattttggatttgccactgatgttgatgcagtagtttacctaatgctggtaaacgatcttattcgtgggctttatccagaagctgtatccattggcgaagatgtcagcggaatgcctacattttgtatccctgtccaagatggtggtgttggttttgattatcgtcttcatatggctgtcccagacaaatggattgaacttctgaagcaaagtgacgaatattgggaaatgggtgacatcgtgcacaccttaacaaatagaaggtggcttgaaaagtgtgtcacttattgtgaaagtcatgatcaagctcttgttggtgacaagacaattgcattctggttgatggataaggatatgtatgatttcatggctctggacaggccttcaacgcctcgcatcgatcgtgggatagcattacataaaatgattaggcttgtcacaatgggtttaggaggtgaaggctatctaaatttcatgggaaatgagtttgggcatcctgaatggatagattttccaagaggtcctcaaagtcttccaaatggctccgtcattcctgggaataacaatagctttgataaatgccgccgtagatttgaccttggagatgcagattatcttagatatcgtggtatgcaagagtttgaccaggcaatgcagcaccttgagggaaaatatgaattcatgacatctgatcactcatatgtatcacggaagcatgaggaggataaggtgatcatctttgagagaggagatttggtcttcgtgttcaacttccactggagcaatagctattttgactatcgcgttggttgtttcaagcctgggaagtacaagatcgttttagattctgacgatggccttttcggtggatttagtcggcttgatcatgatgccgagtacttcactgctgactggccgcatgacaacaggccgtgttctttctcggtctatgcacccagcagaacagccgtcgtatatgcacctgcaggtgcagaggacgaatagggccacaacagcggttgttggggaagaacttcagagggatgtgctgctggtggactgacaccactgccacgcgcgatgctgccagatgttgccctcgagaccacgtggcaggacgatcagctattcaggtggataggttagcttaccgatgagctctcgctttcgagtgactggtgaaggaaatggacctcgcacaccgcattttcgctatgcattctgaaaatgtaccgtgtggttttgtacatatggcatcagtaggcattatatcattcatctcgctgaaccaaccatttacgctatactccgtactgctgtgc

SEQ ID NO: 19642 - protein, 814 aa, Zea mays subsp. mays
  peptide (1)..(814): Ceres Seq. ID no. 13635182
DLPSVLFRRKDAFSRTVLSCAGAPGKVLVPGGGSDDLLSSAEPVVDTQPEELQIPEAELTVEKTSSSPTQTTSAVAEASSGVEAEERPELSEVIGVGGTGGTKIDGAGIKAKAPLVEEKPRVIPPPGDGQRIYEIDPMLEGFRGHLDYRYSEYKRLRAAIDQHEGGLDAFSRGYEKLGFTRSAEGITYREWAPGAYSAALVGDFNNWNPNADAMARNEYGVWEIFLPNNADGSPAIPHGSRVKIRMDTPSGVKDSIPAWIKFSVQAPGEIPYNGIYYDPPEEEKYVFKHPQPKRPKSLRIYESHVGMSSPEPKINTYANFRDEVLPRIKKLGYNAVQIMAIQEHSYYASFGYHVTNFFAPSSRFGTPEDLKSLIDKAHELGLLVLMDIVHSHSSNNTLDGLNGFDGTDTHYFHGGPRGHHWMWDSRLFNYGSWEVLRFLLSNARWWLEEYKFDGFRFDGVTSMMYTHHGLQVTFTGNYGEYFGFATDVDAVVYLMLVNDLIRGLYPEAVSIGEDVSGMPTFCIPVQDGGVGFDYRLHMAVPDKWIELLKQSDEYWEMGDIVHTLTNRRWLEKCVTYCESHDQALVGDKTIAFWLMDKDMYDFMALDRPSTPRIDRGIALHKMIRLVTMGLGGEGYLNFMGNEFGHPEWIDFPRGPQSLPNGSVIPGNNNSFDKCRRRFDLGDADYLRYRGMQEFDQAMQHLEGKYEFMTSDHSYVSRKHEEDKVIIFERGDLVFVFNFHWSNSYFDYRVGCFKPGKYKIVLDSDDGLFGGFSRLDHDAEYFTADWPHDNRPCSFSVYAPSRTAVVYAPAGAEDE

SEQ ID NO: 19643 - protein, 677 aa, Zea mays subsp. mays
  peptide (1)..(677): Ceres Seq. ID no. 13635183
MLEGFRGHLDYRYSEYKRLRAAIDQHEGGLDAFSRGYEKLGFTRSAEGITYREWAPGAYSAALVGDFNNWNPNADAMARNEYGVWEIFLPNNADGSPAIPHGSRVKIRMDTPSGVKDSIPAWIKFSVQAPGEIPYNGIYYDPPEEEKYVFKHPQPKRPKSLRIYESHVGMSSPEPKINTYANFRDEVLPRIKKLGYNAVQIMAIQEHSYYASFGYHVTNFFAPSSRFGTPEDLKSLIDKAHELGLLVLMDIVHSHSSNNTLDGLNGFDGTDTHYFHGGPRGHHWMWDSRLFNYGSWEVLRFLLSNARWWLEEYKFDGFRFDGVTSMMYTHHGLQVTFTGNYGEYFGFATDVDAVVYLMLVNDLIRGLYPEAVSIGEDVSGMPTFCIPVQDGGVGFDYRLHMAVPDKWIELLKQSDEYWEMGDIVHTLTNRRWLEKCVTYCESHDQALVGDKTIAFWLMDKDMYDFMALDRPSTPRIDRGIALHKMIRLVTMGLGGEGYLNFMGNEFGHPEWIDFPRGPQSLPNGSVIPGNNNSFDKCRRRFDLGDADYLRYRGMQEFDQAMQHLEGKYEFMTSDHSYVSRKHEEDKVIIFERGDLVFVFNFHWSNSYFDYRVGCFKPGKYKIVLDSDDGLFGGFSRLDHDAEYFTADWPHDNRPCSFSVYAPSRTAVVYAPAGAEDE

SEQ ID NO: 19644 - protein, 601 aa, Zea mays subsp. mays
  peptide (1)..(601): Ceres Seq. ID no. 13635184
MARNEYGVWEIFLPNNADGSPAIPHGSRVKIRMDTPSGVKDSIPAWIKFSVQAPGEIPYNGIYYDPPEEEKYVFKHPQPKRPKSLRIYESHVGMSSPEPKINTYANFRDEVLPRIKKLGYNAVQIMAIQEHSYYASFGYHVTNFFAPSSRFGTPEDLKSLIDKAHELGLLVLMDIVHSHSSNNTLDGLNGFDGTDTHYFHGGPRGHHWMWDSRLFNYGSWEVLRFLLSNARWWLEEYKFDGFRFDGVTSMMYTHHGLQVTFTGNYGEYFGFATDVDAVVYLMLVNDLIRGLYPEAVSIGEDVSGMPTFCIPVQDGGVGFDYRLHMAVPDKWIELLKQSDEYWEMGDIVHTLTNRRWLEKCVTYCESHDQALVGDKTIAFWLMDKDMYDFMALDRPSTPRIDRGIALHKMIRLVTMGLGGEGYLNFMGNEFGHPEWIDFPRGPQSLPNGSVIPGNNNSFDKCRRRFDLGDADYLRYRGMQEFDQAMQHLEGKYEFMTSDHSYVSRKHEEDKVIIFERGDLVFVFNFHWSNSYFDYRVGCFKPGKYKIVLDSDDGLFGGFSRLDHDAEYFTADWPHDNRPCSFSVYAPSRTAVVYAPAGAEDE

SEQ ID NO: 19645 - DNA, 847 bp, Zea mays subsp. mays
  misc_feature (1)..(847): Ceres Seq. ID no. 12379704
  misc_feature (1)..(847): Ortholog of  Ceres SEQ ID NO 15171293 as cited in SEQ ID NO 51744
gagacccctctgctccaactccaatccgccgctccactccaagtcacacggaggcagccatcgcagcctcgcccgactccgcttcccctgttctttgggcatggagctgatcacaaatgtcaccgagtacgagaagctcgcgaaggagaggctgccgaagatggtgtacgactactacgcctccggcgcagaagatcagtggacgctcaaggagaaccgggaggccttctccagaattctgtttaggccacgggtactgatcgacgtctcccgtatcgacatggccacaaacgttctgggcttcagcatttccatgcctatcatgatcgctccttcagccatgcagaaaatggctcatcctgatggagagcttgccacggcaagagctgcagcctctgcaggaacaataatgacattgtcctcatggtctacttccagcgttgaagaggtcaactcagttgggccgggcatacgtttcttccagctctatgtctacaaggacaggaacatcgtacggcaactcgtgaaaagggctgagatggctggcttcaaggccattgcactcacggtagacactccaatacttggccgcagggaagctgacattaagaacaggttcgccttacctccacatctggtgttgaaaaacttccaagcgctggatcttggcacgatggacaagacaaatgattccggccttgcttcctacgttgctggtcaagttgaccgcaccctttcctggaaggacgtcaagtggctgcagacaattaccacgttgccgatcctagtgaaagggatagtgactgcagaagacactaggcttgcgatcgaatatggcgctgctggg

SEQ ID NO: 19646 - protein, 282 aa, Zea mays subsp. mays
  peptide (1)..(282): Ceres Seq. ID no. 12379705
RPLCSNSNPPLHSKSHGGSHRSLARLRFPCSLGMELITNVTEYEKLAKERLPKMVYDYYASGAEDQWTLKENREAFSRILFRPRVLIDVSRIDMATNVLGFSISMPIMIAPSAMQKMAHPDGELATARAAASAGTIMTLSSWSTSSVEEVNSVGPGIRFFQLYVYKDRNIVRQLVKRAEMAGFKAIALTVDTPILGRREADIKNRFALPPHLVLKNFQALDLGTMDKTNDSGLASYVAGQVDRTLSWKDVKWLQTITTLPILVKGIVTAEDTRLAIEYGAAG

SEQ ID NO: 19647 - protein, 249 aa, Zea mays subsp. mays
  peptide (1)..(249): Ceres Seq. ID no. 12379706
MELITNVTEYEKLAKERLPKMVYDYYASGAEDQWTLKENREAFSRILFRPRVLIDVSRIDMATNVLGFSISMPIMIAPSAMQKMAHPDGELATARAAASAGTIMTLSSWSTSSVEEVNSVGPGIRFFQLYVYKDRNIVRQLVKRAEMAGFKAIALTVDTPILGRREADIKNRFALPPHLVLKNFQALDLGTMDKTNDSGLASYVAGQVDRTLSWKDVKWLQTITTLPILVKGIVTAEDTRLAIEYGAAG

SEQ ID NO: 19648 - protein, 229 aa, Zea mays subsp. mays
  peptide (1)..(229): Ceres Seq. ID no. 12379707
MVYDYYASGAEDQWTLKENREAFSRILFRPRVLIDVSRIDMATNVLGFSISMPIMIAPSAMQKMAHPDGELATARAAASAGTIMTLSSWSTSSVEEVNSVGPGIRFFQLYVYKDRNIVRQLVKRAEMAGFKAIALTVDTPILGRREADIKNRFALPPHLVLKNFQALDLGTMDKTNDSGLASYVAGQVDRTLSWKDVKWLQTITTLPILVKGIVTAEDTRLAIEYGAAG

SEQ ID NO: 19649 - DNA, 475 bp, Zea mays subsp. mays
  misc_feature (1)..(475): Ceres Seq. ID no. 11404073
  misc_feature (1)..(475): Ortholog of  Ceres SEQ ID NO 13645078 as cited in SEQ ID NO 51158
aawaacagcccatatttcacacagggcatttcggttcggggcatttcggtccggcgggatcgaaactytcgcacccgagagccctttatatccgctaggtttacgcgcatttttgctcctcactgccgcgccgccaccctctacagataaggaagaggaggagggcaggatgtcgcaccgtaagttcgagcacccgaggmackgctccctcggcttccttcccaggaagcgctcctcccgtcaccgcggcaaggtgaagtcattccctagggatgacgccaagaagccttgccatctcactgccttccttggctacaaggcctggcatgactcacattgtccgtgagttgagaagccaggatccaaactccataagaaggaaacttgtgaggctgttaccatcattgaaaccccttctcttgtcattgttgggctcgtggcatatgtgaagactcctcgtggcctccgcacactc

SEQ ID NO: 19650 - protein, 114 aa, Zea mays subsp. mays
  peptide (1)..(114): Ceres Seq. ID no. 11404074
  misc_feature (1)..(1): Xaa is any aa, unknown or other
  misc_feature (23)..(23): Xaa is any aa, unknown or other
  misc_feature (67)..(67): Xaa is any aa, unknown or other
  misc_feature (68)..(68): Xaa is any aa, unknown or other
XTAHISHRAFRFGAFRSGGIETXAPESPLYPLGLRAFLLLTAAPPPSTDKEEEEGRMSHRKFEHPRXXSLGFLPRKRSSRHRGKVKSFPRDDAKKPCHLTAFLGYKAWHDSHCP

SEQ ID NO: 19651 - protein, 58 aa, Zea mays subsp. mays
  peptide (1)..(58): Ceres Seq. ID no. 11404075
MTPRSLAISLPSLATRPGMTHIVRELRSQDPNSIRRKLVRLLPSLKPLLLSLLGSWHM

SEQ ID NO: 19652 - protein, 58 aa, Zea mays subsp. mays
  peptide (1)..(58): Ceres Seq. ID no. 11404076
  misc_feature (11)..(11): Xaa is any aa, unknown or other
  misc_feature (12)..(12): Xaa is any aa, unknown or other
MSHRKFEHPRXXSLGFLPRKRSSRHRGKVKSFPRDDAKKPCHLTAFLGYKAWHDSHCP

SEQ ID NO: 19653 - DNA, 666 bp, Zea mays subsp. mays
  misc_feature (1)..(666): Ceres Seq. ID no. 13666056
  misc_feature (1)..(666): Ortholog of  Ceres SEQ ID NO 13655287 as cited in SEQ ID NO 63004
  misc_feature (1)..(666): Ortholog of  Ceres SEQ ID NO 15173178 as cited in SEQ ID NO 64574
aatcaaaagcaaaaaccctaatcgcatctgcttccagagccccccgccgccgctgcgccctcctctcggtcctgccgtccgtcgaggtaaaaggacagcatggtgagggtcagcgtgctcaatgatgctctcaagtccatgtacaatgctgaaaagatagggaaacgtcaggtcatgatcaggccgtcatccaaggtgatcatcaagttcctgacggtcatgcagcgccatggctacattggcgagttcgagtacgtggatgaccacagagctgggaagatcgtggtggagctgaatggaagactgaataaatgtggtgttattagcccacgttttgatgtaggtgttaaggagatcgagggatggacggcgaggcttcttccatctcgccagtttggctacatcgtcctaacaacttctgctggaattatggaccatgaggaggcccgccgtaagaatgttggtggcaaggttctaggtttcttttattgaaaatgtgtttttttgagccacagatgcgtccaagaactcgtctgatgttttgaggtttgttaagactgggtgtctgagcctttgcggtttgttaagacagcgatgtgtcatgtatttcagaaattgggatttttatgagatgtacctgctagagccctgtctgtttcgattttc

SEQ ID NO: 19654 - protein, 130 aa, Zea mays subsp. mays; identical to SEQ ID NO: 14997
  peptide (1)..(130): Ceres Seq. ID no. 13666057

SEQ ID NO: 19655 - protein, 117 aa, Zea mays subsp. mays; identical to SEQ ID NO: 14998
  peptide (1)..(117): Ceres Seq. ID no. 13666058

SEQ ID NO: 19656 - protein, 105 aa, Zea mays subsp. mays; identical to SEQ ID NO: 14999
  peptide (1)..(105): Ceres Seq. ID no. 13666059

SEQ ID NO: 19657 - DNA, 1698 bp, Zea mays subsp. mays; identical to SEQ ID NO: 13749
  misc_feature (1)..(1698): Ceres Seq. ID no. 13494587
  misc_feature (1)..(1698): Ortholog of  Ceres SEQ ID NO 14316344 as cited in SEQ ID NO 60120

SEQ ID NO: 19658 - protein, 355 aa, Zea mays subsp. mays; identical to SEQ ID NO: 13750
  peptide (1)..(355): Ceres Seq. ID no. 13494588

SEQ ID NO: 19659 - protein, 263 aa, Zea mays subsp. mays; identical to SEQ ID NO: 13751
  peptide (1)..(263): Ceres Seq. ID no. 13494589

SEQ ID NO: 19660 - protein, 244 aa, Zea mays subsp. mays; identical to SEQ ID NO: 13752
  peptide (1)..(244): Ceres Seq. ID no. 13494590

SEQ ID NO: 19661 - DNA, 1101 bp, Zea mays subsp. mays
  misc_feature (1)..(1101): Ceres Seq. ID no. 13586344
  misc_feature (1)..(1101): Ortholog of  Ceres SEQ ID NO 14315626 as cited in SEQ ID NO 52943
  misc_feature (1)..(1101): Ortholog of  Ceres SEQ ID NO 14302742 as cited in SEQ ID NO 66899
  misc_feature (1)..(1101): Ortholog of  Ceres SEQ ID NO 14313536 as cited in SEQ ID NO 67925
caacctttcaaattgaattgggctaccagtggggctggtgagaaacgtggagacgatggttcagattatactatatttgttggggacttggcctcggatgttacagatttcattctacaagatacgttcaagagtcgttatccatcagttaagggtgcaaaagttgtctttgacagaactactggccgttcgaaaggctatggttttgtaaagtttgcagattcggatgaacagacacgggcaatgactgaaatgaatggacaatactgttctagcagggccatgcgccttggaccagcatccaacaagaagaatactggtggaccacaaccatcgagtgctatttaccagaacacccaaggaactgattctgatagcgatccgaacaatactactgtatttgttggtggccttgacccgagtgtgactgatgagcttctgaagcaaaccttcagtccatatggagagcttctctatgtcaaaatacctgtaggaaagcgctgcgggtttgtccaatattctaacagggcatcagctgaggaggccataagggtgctaaatggaagccagctgggaggtcagagcataaggctctcatggggccgtagccctgcaaacaagcagcctcagcaagagcagagccaatggagtggtggcggctattatgggtatccccaaggatacgatccatatggctatgctcggccccctcaagatcctgccatgtacgcctacgcagcatatccagggtatggaaattaccagcaacagccaccacagcagcccccgccacaacagtaatgatgtcccgagagtgatcatttgcaagctggtcgcaaagtagctgggggttggggcgcagcaactttggtgcgttggcatgagaaattttgcggcggttgcttgtgttgtgttgtattgttccgacgcccttgtacacgtagcctgtgttgtaactgaatttttgccgaggccttatgagtgactagtgtttcaactgtaactggattgcacatttttgtctcaaggaatgtactattattgtgtggctcgtgccgctttgaacgctgagtccaggtattaatttttcttcatgctctt

SEQ ID NO: 19662 - protein, 266 aa, Zea mays subsp. mays
  peptide (1)..(266): Ceres Seq. ID no. 13586345
QPFKLNWATSGAGEKRGDDGSDYTIFVGDLASDVTDFILQDTFKSRYPSVKGAKVVFDRTTGRSKGYGFVKFADSDEQTRAMTEMNGQYCSSRAMRLGPASNKKNTGGPQPSSAIYQNTQGTDSDSDPNNTTVFVGGLDPSVTDELLKQTFSPYGELLYVKIPVGKRCGFVQYSNRASAEEAIRVLNGSQLGGQSIRLSWGRSPANKQPQQEQSQWSGGGYYGYPQGYDPYGYARPPQDPAMYAYAAYPGYGNYQQQPPQQPPPQQ

SEQ ID NO: 19663 - protein, 185 aa, Zea mays subsp. mays
  peptide (1)..(185): Ceres Seq. ID no. 13586346
MTEMNGQYCSSRAMRLGPASNKKNTGGPQPSSAIYQNTQGTDSDSDPNNTTVFVGGLDPSVTDELLKQTFSPYGELLYVKIPVGKRCGFVQYSNRASAEEAIRVLNGSQLGGQSIRLSWGRSPANKQPQQEQSQWSGGGYYGYPQGYDPYGYARPPQDPAMYAYAAYPGYGNYQQQPPQQPPPQQ

SEQ ID NO: 19664 - protein, 182 aa, Zea mays subsp. mays
  peptide (1)..(182): Ceres Seq. ID no. 13586347
MNGQYCSSRAMRLGPASNKKNTGGPQPSSAIYQNTQGTDSDSDPNNTTVFVGGLDPSVTDELLKQTFSPYGELLYVKIPVGKRCGFVQYSNRASAEEAIRVLNGSQLGGQSIRLSWGRSPANKQPQQEQSQWSGGGYYGYPQGYDPYGYARPPQDPAMYAYAAYPGYGNYQQQPPQQPPPQQ

SEQ ID NO: 19665 - DNA, 692 bp, Zea mays subsp. mays
  misc_feature (1)..(692): Ceres Seq. ID no. 12364056
  misc_feature (1)..(692): Ortholog of  Ceres SEQ ID NO 15172426 as cited in SEQ ID NO 59156
gctaaagaaagaggtcctgtcacagatatcgatccgattgggaattctcctgtgatcattaagaagacaattcttgagaagattgcccccacatggatgaatgtgtcaattcaaatgaaagaggatgaagagacagataaagtttttggatgggtgttggaaatgtatgcatacgctgttgctagcgcattgcatggagttcatcatatccttcgtaaagatttcatgatccagccaccttttgatacaaagctccagaatacatttataatccacttcacttatggatgtgactactcactaaagggtgaactgacctatggtaaagttggtgaatggcgatttgacaaaagatcattcccagataggccaccaccaagaaatcttacattgccccctcctggagtaccagaaagtgtggttactctagtgaaaatggtcaatgaagctagtgcaaaccttcctcggtgggatgatggaatataaactttggatgatgtcaattatatcttaggttcctttgatctgcccttgtatatggggaatatcaaagtatcaggtgcagtcggttgtttggtttacatccaaaatagctgcttgcacttgcacaccatacctgatagaagaagatacataattttctcattgtactttttaggaaaagaaaagaaatgaaagtaaagttagcatcg

SEQ ID NO: 19666 - protein, 161 aa, Zea mays subsp. mays
  peptide (1)..(161): Ceres Seq. ID no. 12364057
AKERGPVTDIDPIGNSPVIIKKTILEKIAPTWMNVSIQMKEDEETDKVFGWVLEMYAYAVASALHGVHHILRKDFMIQPPFDTKLQNTFIIHFTYGCDYSLKGELTYGKVGEWRFDKRSFPDRPPPRNLTLPPPGVPESVVTLVKMVNEASANLPRWDDGI

SEQ ID NO: 19667 - protein, 129 aa, Zea mays subsp. mays
  peptide (1)..(129): Ceres Seq. ID no. 12364058
MNVSIQMKEDEETDKVFGWVLEMYAYAVASALHGVHHILRKDFMIQPPFDTKLQNTFIIHFTYGCDYSLKGELTYGKVGEWRFDKRSFPDRPPPRNLTLPPPGVPESVVTLVKMVNEASANLPRWDDGI

SEQ ID NO: 19668 - protein, 123 aa, Zea mays subsp. mays
  peptide (1)..(123): Ceres Seq. ID no. 12364059
MKEDEETDKVFGWVLEMYAYAVASALHGVHHILRKDFMIQPPFDTKLQNTFIIHFTYGCDYSLKGELTYGKVGEWRFDKRSFPDRPPPRNLTLPPPGVPESVVTLVKMVNEASANLPRWDDGI

SEQ ID NO: 19669 - DNA, 1458 bp, Zea mays subsp. mays; identical to SEQ ID NO: 14377
  misc_feature (1)..(1458): Ceres Seq. ID no. 13586374
  misc_feature (1)..(1458): Ortholog of  Ceres SEQ ID NO 13502952 as cited in SEQ ID NO 62271
  misc_feature (1)..(1458): Ortholog of  Ceres SEQ ID NO 13502973 as cited in SEQ ID NO 68052
  misc_feature (1)..(1458): Ortholog of  Ceres SEQ ID NO 13596000 as cited in SEQ ID NO 68188

SEQ ID NO: 19670 - protein, 371 aa, Zea mays subsp. mays; identical to SEQ ID NO: 14378
  peptide (1)..(371): Ceres Seq. ID no. 13586375

SEQ ID NO: 19671 - DNA, 392 bp, Zea mays subsp. mays
  misc_feature (1)..(392): Ceres Seq. ID no. 12595039
  misc_feature (1)..(392): Ortholog of  Ceres SEQ ID NO 13645078 as cited in SEQ ID NO 51158
aattgtggctcctcacttctgcgccgccacccactacaggaagaggaggagggcaggatgtcgcaccgtaagttcgagcacccgaggcacggctccctcggcttccttcccaggaagcgctcctcccgccaccgcgcaaggtgaagtcatttcccagggatgaccccaagaagccttgccatctcactgccttccttggctacaagctggcatgactcacattgtccgtgaggttgagaagccaggatccaaactccataagaaggaaacttgtgaggctgttaccatcattgaaacccctcctcttgtcattgttgggctcgtggcatatgtgaagactcctcgtggcctccgcacactcaactctgtttgggcccaacatcttagcgaag

SEQ ID NO: 19672 - protein, 60 aa, Zea mays subsp. mays
  peptide (1)..(60): Ceres Seq. ID no. 12595040
MTHIVREVEKPGSKLHKKETCEAVTIIETPPLVIVGLVAYVKTPRGLRTLNSVWAQHLSE

SEQ ID NO: 19673 - protein, 53 aa, Zea mays subsp. mays
  peptide (1)..(53): Ceres Seq. ID no. 12595041
IVAPHFCAATHYRKRRRAGCRTVSSSTRGTAPSASFPGSAPPATAQGEVISQG

SEQ ID NO: 19674 - protein, 47 aa, Zea mays subsp. mays
  peptide (1)..(47): Ceres Seq. ID no. 12595042
NCGSSLLRRHPLQEEEEGRMSHRKFEHPRHGSLGFLPRKRSSRHRAR

SEQ ID NO: 19675 - DNA, 818 bp, Zea mays subsp. mays
  misc_feature (1)..(818): Ceres Seq. ID no. 12347624
  misc_feature (1)..(818): Ortholog of  Ceres SEQ ID NO 14311870 as cited in SEQ ID NO 51574
  misc_feature (1)..(818): Ortholog of  Ceres SEQ ID NO 15174583 as cited in SEQ ID NO 53693
  misc_feature (1)..(818): Ortholog of  Ceres SEQ ID NO 13581563 as cited in SEQ ID NO 58942
  misc_feature (1)..(818): Ortholog of  Ceres SEQ ID NO 13658707 as cited in SEQ ID NO 66286
  misc_feature (1)..(818): Ortholog of  Ceres SEQ ID NO 13654528 as cited in SEQ ID NO 68080
taagcgacatcacaggggagacaagaggtggttcagggattgcctttggaagtgagatgtcaggtggcatatcggaagtacgggctgtgggcctccgcnttgtcaactcccttcacgggatcagaatcaagacggccccggggcgcggagggtacgtggagaatgtgtacatagcagatgtgagcatggacaatgtttcgatggccatcaggatcactggaaactacggtgaacatcctgatgacaaatatgacagcactgctctccctgtgataagcaatattacaatcaaggatgttgttggcgttaacattggggttgctggtatattggaaggcattcagggggacaatttcagcaacatttgtctgtccaatgtttccctcagtgtgcaatctgcacatccatggaattgttcacttattgaagggtattcgaactcggtgatcccagaatcatgcgaacagctcagaagcaattgtagacagacatccatttgctacgatggaagcagttcttcagtaatgcgtgtgcagcaaccaagacatacatcgcccaccagccggttgctagatcttttttctggagttggcttcattttagtgtaggtagagctgtgcttgttcttgctgcaaagggggcttgcttcatgtagtgagagccctattagtcatgtatatctgattcttgcaattatttgtgattagagtgccacttgcttcatgtatatagctgttgagatgactgtcggtgtatctttgcctgttttgttccaatttttggtatgtgaatgcaatctgcataactttatggttttg

SEQ ID NO: 19676 - protein, 201 aa, Zea mays subsp. mays
  peptide (1)..(201): Ceres Seq. ID no. 12347625
  misc_feature (33)..(33): Xaa is any aa, unknown or other
SDITGETRGGSGIAFGSEMSGGISEVRAVGLRXVNSLHGIRIKTAPGRGGYVENVYIADVSMDNVSMAIRITGNYGEHPDDKYDSTALPVISNITIKDVVGVNIGVAGILEGIQGDNFSNICLSNVSLSVQSAHPWNCSLIEGYSNSVIPESCEQLRSNCRQTSICYDGSSSSVMRVQQPRHTSPTSRLLDLFSGVGFILV

SEQ ID NO: 19677 - protein, 183 aa, Zea mays subsp. mays
  peptide (1)..(183): Ceres Seq. ID no. 12347626
  misc_feature (15)..(15): Xaa is any aa, unknown or other
MSGGISEVRAVGLRXVNSLHGIRIKTAPGRGGYVENVYIADVSMDNVSMAIRITGNYGEHPDDKYDSTALPVISNITIKDVVGVNIGVAGILEGIQGDNFSNICLSNVSLSVQSAHPWNCSLIEGYSNSVIPESCEQLRSNCRQTSICYDGSSSSVMRVQQPRHTSPTSRLLDLFSGVGFILV

SEQ ID NO: 19678 - protein, 140 aa, Zea mays subsp. mays
  peptide (1)..(140): Ceres Seq. ID no. 12347627
MDNVSMAIRITGNYGEHPDDKYDSTALPVISNITIKDVVGVNIGVAGILEGIQGDNFSNICLSNVSLSVQSAHPWNCSLIEGYSNSVIPESCEQLRSNCRQTSICYDGSSSSVMRVQQPRHTSPTSRLLDLFSGVGFILV

SEQ ID NO: 19679 - DNA, 543 bp, Zea mays subsp. mays
  misc_feature (1)..(543): Ceres Seq. ID no. 13622597
  misc_feature (1)..(543): Ortholog of  Ceres SEQ ID NO 14307940 as cited in SEQ ID NO 0
  misc_feature (1)..(543): Ortholog of  Ceres SEQ ID NO 14308560 as cited in SEQ ID NO 0
aattcttccagctttttgttggaagatgtctacagaaacccaggcccgctccagtttgaaggaccaggtgccgattcaaagcctatttcattgtgcgttgaggatcaagactatatgggcagaataaaaaagttgcaggaatacttggagaaggtgaagaggattgtgaagcctgggtgctcgcaggatgttcttaaagcggcgctgagtgccatgtcttctgtgacggaaacactgaacatcatgacttcatcttctaccggccagactccactgagtcattaggtaccatttcatggtatggatcataatccccacttttttcagtggtggcgattaacgagtttaggaacagcaaccctggtatcatacgggttattcttttgtagccttttggagagttctatcggttttggattcggtagtttatgaaggcttgttgatgagtttgagctcgaatagcttttgaaacagccggatgatgccatctttaataaaccaaattctgtgactgcattcacatttctgtcagttacctgagtc

SEQ ID NO: 19680 - protein, 94 aa, Zea mays subsp. mays
  peptide (1)..(94): Ceres Seq. ID no. 13622598
NSSSFLLEDVYRNPGPLQFEGPGADSKPISLCVEDQDYMGRIKKLQEYLEKVKRIVKPGCSQDVLKAALSAMSSVTETLNIMTSSSTGQTPLSH

SEQ ID NO: 19681 - protein, 56 aa, Zea mays subsp. mays
  peptide (1)..(56): Ceres Seq. ID no. 13622599
MGRIKKLQEYLEKVKRIVKPGCSQDVLKAALSAMSSVTETLNIMTSSSTGQTPLSH

SEQ ID NO: 19682 - DNA, 1573 bp, Zea mays subsp. mays; identical to SEQ ID NO: 2420
  misc_feature (1)..(1573): Ceres Seq. ID no. 13493056
  misc_feature (1)..(1573): Ortholog of  Ceres SEQ ID NO 13645078 as cited in SEQ ID NO 51158

SEQ ID NO: 19683 - protein, 389 aa, Zea mays subsp. mays; identical to SEQ ID NO: 2421
  peptide (1)..(389): Ceres Seq. ID no. 13493057

SEQ ID NO: 19684 - protein, 337 aa, Zea mays subsp. mays; identical to SEQ ID NO: 2422
  peptide (1)..(337): Ceres Seq. ID no. 13493058

SEQ ID NO: 19685 - protein, 237 aa, Zea mays subsp. mays; identical to SEQ ID NO: 2423
  peptide (1)..(237): Ceres Seq. ID no. 13493059

SEQ ID NO: 19686 - DNA, 1738 bp, Zea mays subsp. mays; identical to SEQ ID NO: 7802
  misc_feature (1)..(1738): Ceres Seq. ID no. 12413950
  misc_feature (1)..(1738): Ortholog of  Ceres SEQ ID NO 13582783 as cited in SEQ ID NO 67821

SEQ ID NO: 19687 - protein, 418 aa, Zea mays subsp. mays; identical to SEQ ID NO: 7803
  peptide (1)..(418): Ceres Seq. ID no. 12413951

SEQ ID NO: 19688 - protein, 380 aa, Zea mays subsp. mays; identical to SEQ ID NO: 7804
  peptide (1)..(380): Ceres Seq. ID no. 12413952

SEQ ID NO: 19689 - protein, 326 aa, Zea mays subsp. mays; identical to SEQ ID NO: 7805
  peptide (1)..(326): Ceres Seq. ID no. 12413953

SEQ ID NO: 19690 - DNA, 958 bp, Zea mays subsp. mays; identical to SEQ ID NO: 4183
  misc_feature (1)..(958): Ceres Seq. ID no. 13571162
  misc_feature (1)..(958): Ortholog of  Ceres SEQ ID NO 15179952 as cited in SEQ ID NO 1063

SEQ ID NO: 19691 - protein, 231 aa, Zea mays subsp. mays; identical to SEQ ID NO: 4184
  peptide (1)..(231): Ceres Seq. ID no. 13571163

SEQ ID NO: 19692 - protein, 211 aa, Zea mays subsp. mays; identical to SEQ ID NO: 4185
  peptide (1)..(211): Ceres Seq. ID no. 13571164

SEQ ID NO: 19693 - protein, 195 aa, Zea mays subsp. mays; identical to SEQ ID NO: 4186
  peptide (1)..(195): Ceres Seq. ID no. 13571165

SEQ ID NO: 19694 - DNA, 1088 bp, Zea mays subsp. mays
  misc_feature (1)..(1088): Ceres Seq. ID no. 12377821
  misc_feature (1)..(1088): Ortholog of  Ceres SEQ ID NO 12587358 as cited in SEQ ID NO 62228
  misc_feature (1)..(1088): Ortholog of  Ceres SEQ ID NO 12635930 as cited in SEQ ID NO 0
tacgccaagcccgcaattaaccctcactaaagggaacaaaagctggagctccaccgcggtggcggccgctctagaactagtggatcccccgggctgcaggaattcgcacgagaccattacctagaacatcctaatcgaaaattatccgaggttccgtgcagcagtggaaaagagcagattttagcagagcagcgagggtcggagaagcctccccaagcttcgaatcgctatgcagcccgtcaaggtgtacgccgaccggcggtcgcaaccctcccgagctgtcatcatcttctgcagggtgaaccagatcgatttcgaggaggtcacggtggatctgttcaagtctcagcacctcacacccgaattcaaaaaaataaacccaatgggacaggtacctgcaattgttgatggaagattcaaactatttgaaagtcatgcgattttgaggtatcttgcatcggttttccctggagtagctgaccactggtatccttctgacttgttcaccagagccaaaattgagtcaatcttggattggcatcactcaaatttgcggcgtggtgcagcaacccttgtaatgcacactgcattggctcccttccttggtcttacgacaagtcatgaggctgtgaaacaagcagagaagcttgtgatgcagtcactgggggtgatcgaatccgtatggctgaaaggcgatgccaagttcttgctaggtatcccccagccatcgattgcagatctgagccttgtctgtgagataatgcagttggagatccttggcgatgaggtccgtgaccgattcctgggagctcatgagaggatccttgtctggatggacaaggtgaagaaagccacgagccctcattttgaggaagcccacgagctccttttccaagtgaagaaggcacgcatggtgcaaggcagcagcagcaaggcttttgagtcgagcacaaagctcaaaacagcatcaaagctctgacgaccaaaggcagaataagcgacagacagatccatcttgtgatataatataataaacgggaactattattaattactgttggtattaattacacttattccagaaggcc

SEQ ID NO: 19695 - protein, 249 aa, Zea mays subsp. mays
  peptide (1)..(249): Ceres Seq. ID no. 12377822
MQPVKVYADRRSQPSRAVIIFCRVNQIDFEEVTVDLFKSQHLTPEFKKINPMGQVPAIVDGRFKLFESHAILRYLASVFPGVADHWYPSDLFTRAKIESILDWHHSNLRRGAATLVMHTALAPFLGLTTSHEAVKQAEKLVMQSLGVIESVWLKGDAKFLLGIPQPSIADLSLVCEIMQLEILGDEVRDRFLGAHERILVWMDKVKKATSPHFEEAHELLFQVKKARMVQGSSSKAFESSTKLKTASKL

SEQ ID NO: 19696 - protein, 198 aa, Zea mays subsp. mays
  peptide (1)..(198): Ceres Seq. ID no. 12377823
MGQVPAIVDGRFKLFESHAILRYLASVFPGVADHWYPSDLFTRAKIESILDWHHSNLRRGAATLVMHTALAPFLGLTTSHEAVKQAEKLVMQSLGVIESVWLKGDAKFLLGIPQPSIADLSLVCEIMQLEILGDEVRDRFLGAHERILVWMDKVKKATSPHFEEAHELLFQVKKARMVQGSSSKAFESSTKLKTASKL

SEQ ID NO: 19697 - protein, 133 aa, Zea mays subsp. mays
  peptide (1)..(133): Ceres Seq. ID no. 12377824
MHTALAPFLGLTTSHEAVKQAEKLVMQSLGVIESVWLKGDAKFLLGIPQPSIADLSLVCEIMQLEILGDEVRDRFLGAHERILVWMDKVKKATSPHFEEAHELLFQVKKARMVQGSSSKAFESSTKLKTASKL

SEQ ID NO: 19698 - DNA, 1968 bp, Zea mays subsp. mays; identical to SEQ ID NO: 5815
  misc_feature (1)..(1968): Ceres Seq. ID no. 12362596
  misc_feature (1)..(1968): Ortholog of  Ceres SEQ ID NO 15179094 as cited in SEQ ID NO 0

SEQ ID NO: 19699 - protein, 488 aa, Zea mays subsp. mays; identical to SEQ ID NO: 5816
  peptide (1)..(488): Ceres Seq. ID no. 12362597

SEQ ID NO: 19700 - protein, 454 aa, Zea mays subsp. mays; identical to SEQ ID NO: 5817
  peptide (1)..(454): Ceres Seq. ID no. 12362598

SEQ ID NO: 19701 - protein, 443 aa, Zea mays subsp. mays; identical to SEQ ID NO: 5818
  peptide (1)..(443): Ceres Seq. ID no. 12362599

SEQ ID NO: 19702 - DNA, 468 bp, Zea mays subsp. mays
  misc_feature (1)..(468): Ceres Seq. ID no. 13622586
  misc_feature (1)..(468): Ortholog of  Ceres SEQ ID NO 13647016 as cited in SEQ ID NO 20325
acctacagtcactcgaattctacttgcagtgcaaagaagccaatctcttccaacctgcttgcgagtttctccctatgattaatgaggtgtgttttatcttacagctactgcactaacaaactgcatttcttagtcgcagtacctcaacttgatatatctggaactctgttactgttcctagcgggtttccaagtgcctcgtggaggtcacgagttcaattgaaggtgcaagagttgagaacaacaagttctgtgtatctgtacattaccgcaacgtagcagagaaggactggaaagtggtcgcaggactcgtgaaacaagtcttggaggccttccctcgtctcaaagtaaccaacgggcgaatggttttagaggttcgcccggtgatcgactgggacaagggaaaggctgtcgagttcctgcttcggtcgctcggcctaagcgactccgaagawgtgggttcctatct

SEQ ID NO: 19703 - protein, 46 aa, Zea mays subsp. mays
  peptide (1)..(46): Ceres Seq. ID no. 13622587
MRCVLSYSYCTNKLHFLVAVPQLDISGTLLLFLAGFQVPRGGHEFN

SEQ ID NO: 19704 - protein, 37 aa, Zea mays subsp. mays
  peptide (1)..(37): Ceres Seq. ID no. 13622588
LQSLEFYLQCKEANLFQPACEFLPMINEVCFILQLLH

SEQ ID NO: 19705 - protein, 35 aa, Zea mays subsp. mays
  peptide (1)..(35): Ceres Seq. ID no. 13622589
  misc_feature (31)..(31): Xaa is any aa, unknown or other
MVLEVRPVIDWDKGKAVEFLLRSLGLSDSEXVGSY

SEQ ID NO: 19706 - DNA, 487 bp, Zea mays subsp. mays
  misc_feature (1)..(487): Ceres Seq. ID no. 4254698
  misc_feature (1)..(487): Ortholog of  Ceres SEQ ID NO 14314390 as cited in SEQ ID NO 57717
tattcgcgaagacatcagcataaatcttggtcctctggaggagctatcgaacttgtacaaagctgatttgctactctgtgaatctggaggagataacttggcagctaacttcagcagagaattagcagactacataatctacattatcgatgtctctggtggggacaagataccaagaaaaggtggccctgggataacccaggccgatctgttggtaataaacaagacagacctagcacctgctgttggagctgatctgtctgtaatggagcgagacgcacttcgcatgcgcgaaggagggccctttgtgtttgcacaggtgaaacatggagtgggcgtggaggggatcgtgaaccatattctgcaggcgtgggagatcgcgactggtaataagcggcgataagatctcacgacttggggccatatgttggatgcagatttgattcagtcggcacttccacatgcatgtgtcatctgttcgtttctc

SEQ ID NO: 19707 - protein, 133 aa, Zea mays subsp. mays
  peptide (1)..(133): Ceres Seq. ID no. 4254699
IREDISINLGPLEELSNLYKADLLLCESGGDNLAANFSRELADYIIYIIDVSGGDKIPRKGGPGITQADLLVINKTDLAPAVGADLSVMERDALRMREGGPFVFAQVKHGVGVEGIVNHILQAWEIATGNKRR

SEQ ID NO: 19708 - protein, 45 aa, Zea mays subsp. mays; identical to SEQ ID NO: 8480
  peptide (1)..(45): Ceres Seq. ID no. 4254700

SEQ ID NO: 19709 - DNA, 431 bp, Zea mays subsp. mays
  misc_feature (1)..(431): Ceres Seq. ID no. 11403618
  misc_feature (1)..(431): Ortholog of  Ceres SEQ ID NO 15180548 as cited in SEQ ID NO 0
tgattacgagaaccgataaagtccgtgctcttcgtgaggctttctaccgccagaaccttccaaatgtgaccaatttgcttgccacagtcttggtcttcctcatagttatctatttccgaggcttccgtgttgtgcttccagtgagatcaaagtaatgctcgtggccagcaaggctcatatccaattaagctwattctacacttcaaacatgcccatcattctgcactctgcactgattaccaacctctatttcatatcccagcttctctacaggaagtacagtggaaacttccttgttaaccttcttgggatgtggaaggagtctgaatactctggccattcttcttcctgttggtggtcttgcttactatgtaactgccccatcaagtttggctgatgtccttgcaaatccattccatgcactgttttat

SEQ ID NO: 19710 - protein, 80 aa, Zea mays subsp. mays
  peptide (1)..(80): Ceres Seq. ID no. 11403619
  misc_feature (13)..(13): Xaa is any aa, unknown or other
MLVASKAHIQLSXFYTSNMPIILHSALITNLYFISQLLYRKYSGNFLVNLLGMWKESEYSGHSSSCWWSCLLCNCPIKFG

SEQ ID NO: 19711 - protein, 62 aa, Zea mays subsp. mays
  peptide (1)..(62): Ceres Seq. ID no. 11403620
MPIILHSALITNLYFISQLLYRKYSGNFLVNLLGMWKESEYSGHSSSCWWSCLLCNCPIKFG

SEQ ID NO: 19712 - protein, 50 aa, Zea mays subsp. mays
  peptide (1)..(50): Ceres Seq. ID no. 11403621
ITRTDKVRALREAFYRQNLPNVTNLLATVLVFLIVIYFRGFRVVLPVRSK

SEQ ID NO: 19713 - DNA, 550 bp, Zea mays subsp. mays
  misc_feature (1)..(550): Ceres Seq. ID no. 13492331
  misc_feature (1)..(550): Ortholog of  Ceres SEQ ID NO 13638331 as cited in SEQ ID NO 58047
gtctttgatgacattggtgacattgacaaagctgttgaatggaccatgtttgggatcttcgcgaatgctggtcaagtctgcagtgctacttctcgtttactgctgcatgagaaaattgcaaagaaattcttggatagattggttgcatgggcaaagaatataaaagtctcagatccactggaggaaggctgcagactgggttcagttatcagtgaaggacagtatgagaagataaagaaattcatctcgactgcaagaagtgaaggtgccacaattctgtatggaggtggccgaccacagcatctcagaagagggttctttcttgaacctacaattataacagatgttagtacgtcaatgcaaatttggcaagaggaagtctttggaccagtcatctgtgttaaggagtttaggacagagagtgaagctgtggaacttgcaaatgatactcactatggtttagctggtgccgtgatctccaatgatcaagagaggtgtgagcgcatttcaaaggctcttcactctggtattatttggataaattgctcgc

SEQ ID NO: 19714 - protein, 183 aa, Zea mays subsp. mays
  peptide (1)..(183): Ceres Seq. ID no. 13492332
VFDDIGDIDKAVEWTMFGIFANAGQVCSATSRLLLHEKIAKKFLDRLVAWAKNIKVSDPLEEGCRLGSVISEGQYEKIKKFISTARSEGATILYGGGRPQHLRRGFFLEPTIITDVSTSMQIWQEEVFGPVICVKEFRTESEAVELANDTHYGLAGAVISNDQERCERISKALHSGIIWINCS

SEQ ID NO: 19715 - protein, 168 aa, Zea mays subsp. mays
  peptide (1)..(168): Ceres Seq. ID no. 13492333
MFGIFANAGQVCSATSRLLLHEKIAKKFLDRLVAWAKNIKVSDPLEEGCRLGSVISEGQYEKIKKFISTARSEGATILYGGGRPQHLRRGFFLEPTIITDVSTSMQIWQEEVFGPVICVKEFRTESEAVELANDTHYGLAGAVISNDQERCERISKALHSGIIWINCS

SEQ ID NO: 19716 - DNA, 947 bp, Zea mays subsp. mays; identical to SEQ ID NO: 18797
  misc_feature (1)..(947): Ceres Seq. ID no. 12633396
  misc_feature (1)..(947): Ortholog of  Ceres SEQ ID NO 13599983 as cited in SEQ ID NO 573

SEQ ID NO: 19717 - protein, 86 aa, Zea mays subsp. mays; identical to SEQ ID NO: 18798
  peptide (1)..(86): Ceres Seq. ID no. 12633397

SEQ ID NO: 19718 - protein, 82 aa, Zea mays subsp. mays; identical to SEQ ID NO: 18799
  peptide (1)..(82): Ceres Seq. ID no. 12633398

SEQ ID NO: 19719 - protein, 50 aa, Zea mays subsp. mays; identical to SEQ ID NO: 18800
  peptide (1)..(50): Ceres Seq. ID no. 12633399

SEQ ID NO: 19720 - DNA, 1283 bp, Zea mays subsp. mays; identical to SEQ ID NO: 9558
  misc_feature (1)..(1283): Ceres Seq. ID no. 13494816
  misc_feature (1)..(1283): Ortholog of  Ceres SEQ ID NO 14312266 as cited in SEQ ID NO 59225
  misc_feature (1)..(1283): Ortholog of  Ceres SEQ ID NO 13597620 as cited in SEQ ID NO 65383

SEQ ID NO: 19721 - protein, 234 aa, Zea mays subsp. mays; identical to SEQ ID NO: 9559
  peptide (1)..(234): Ceres Seq. ID no. 13494817

SEQ ID NO: 19722 - protein, 220 aa, Zea mays subsp. mays; identical to SEQ ID NO: 9560
  peptide (1)..(220): Ceres Seq. ID no. 13494818

SEQ ID NO: 19723 - protein, 201 aa, Zea mays subsp. mays; identical to SEQ ID NO: 9561
  peptide (1)..(201): Ceres Seq. ID no. 13494819

SEQ ID NO: 19724 - DNA, 477 bp, Zea mays subsp. mays
  misc_feature (1)..(477): Ceres Seq. ID no. 2084255
  misc_feature (1)..(477): Ortholog of  Ceres SEQ ID NO 13598140 as cited in SEQ ID NO 61443
aaaaaaattcggtcccttcgtcctctactcctctagtcctctcggctcctcgcagtcgctcactgcgtgcgccaaaagcagcagcagctccagccgtcgccgtctccactctccagtctccaccactgctccgcccgcgccggatcgagggagggcaggcggacgaggaggagggatgagtctcttcgggcttggacgaaaccagaagacattccgccccaagaagagcgctccatcaggtagcaagggagcacagctccgaaagcacatagatgccactctcggcagtggaaaccttagggaagctgtgaggttgcctcctggagaggatatcaatgaatggcttgcggtgaatactgtggatttctttaaccaagttaatatgctgtatggcacactcacagaattttgcacacctgagagctgtccgacaatgacagctggcccaaagtacgagtacagatgggctgatgggtg

SEQ ID NO: 19725 - protein, 158 aa, Zea mays subsp. mays
  peptide (1)..(158): Ceres Seq. ID no. 2084256
KKFGPFVLYSSSPLGSSQSLTACAKSSSSSSRRRLHSPVSTTAPPAPDRGRAGGRGGGMSLFGLGRNQKTFRPKKSAPSGSKGAQLRKHIDATLGSGNLREAVRLPPGEDINEWLAVNTVDFFNQVNMLYGTLTEFCTPESCPTMTAGPKYEYRWADG

SEQ ID NO: 19726 - protein, 100 aa, Zea mays subsp. mays
  peptide (1)..(100): Ceres Seq. ID no. 2084257
MSLFGLGRNQKTFRPKKSAPSGSKGAQLRKHIDATLGSGNLREAVRLPPGEDINEWLAVNTVDFFNQVNMLYGTLTEFCTPESCPTMTAGPKYEYRWADG

SEQ ID NO: 19727 - DNA, 730 bp, Zea mays subsp. mays
  misc_feature (1)..(730): Ceres Seq. ID no. 13492334
  misc_feature (1)..(730): Ortholog of  Ceres SEQ ID NO 14303282 as cited in SEQ ID NO 0
cgaatgatcttaaaaccacagatgttctggatcgttgcttcatggagctgctgaaagccataaacagcagtctgaatgatttgaagaaactgcaacagaaaatagaacagcaaaagaagaaacagcaacagcagaagaagcagcaacagaagcaacagcaattgcaaaaacagccagaacattatattcaagctctgattgcactggaaatagaacttaaaaataaactgtctatacttggtctgatgccatcttcatctttggcagaggtactgaagcaattgaaggacaaagcactaaagagagcggggctgactgaagaaaaattgcaagagcagattgagcagagaaacgttgcaaggaagaataaacagtttgagatatctgatggaatcaggaaaaaccttgctaccaagggcatcgccctgatggatgaaccttctggtacagtgtggagaccatgcgaaccagaggggccgcacccactcaacaaatgatggtaaaatgagatttttgcctgagggcagctacacattttgaactaacaaaatcaccatctctggatgcagtattcttcactcaggggtagggggtccaggttgactcgccagtcgccagttgaaacttgcatttctggttgtgtaagaagcaatggaccccatatatatactttactccttgcgaggtttgagttttggttttggatataagacttggcaattccatttca

SEQ ID NO: 19728 - protein, 164 aa, Zea mays subsp. mays
  peptide (1)..(164): Ceres Seq. ID no. 13492335
NDLKTTDVLDRCFMELLKAINSSLNDLKKLQQKIEQQKKKQQQQKKQQQKQQQLQKQPEHYIQALIALEIELKNKLSILGLMPSSSLAEVLKQLKDKALKRAGLTEEKLQEQIEQRNVARKNKQFEISDGIRKNLATKGIALMDEPSGTVWRPCEPEGPHPLNK

SEQ ID NO: 19729 - protein, 151 aa, Zea mays subsp. mays
  peptide (1)..(151): Ceres Seq. ID no. 13492336
MELLKAINSSLNDLKKLQQKIEQQKKKQQQQKKQQQKQQQLQKQPEHYIQALIALEIELKNKLSILGLMPSSSLAEVLKQLKDKALKRAGLTEEKLQEQIEQRNVARKNKQFEISDGIRKNLATKGIALMDEPSGTVWRPCEPEGPHPLNK

SEQ ID NO: 19730 - protein, 83 aa, Zea mays subsp. mays
  peptide (1)..(83): Ceres Seq. ID no. 13492337
MPSSSLAEVLKQLKDKALKRAGLTEEKLQEQIEQRNVARKNKQFEISDGIRKNLATKGIALMDEPSGTVWRPCEPEGPHPLNK

SEQ ID NO: 19731 - DNA, 935 bp, Zea mays subsp. mays
  misc_feature (1)..(935): Ceres Seq. ID no. 12636872
  misc_feature (1)..(935): Ortholog of  Ceres SEQ ID NO 13595183 as cited in SEQ ID NO 56062
aaaacttcgcagtcagcatctggactctggagtctgttgtctgcgtgtgtgcggctggttctctctgccaccgcacgagtcgcagcagagagggaaaaaccctagcagcctcccttcgtcccaactcccaaccccgcgaccccatggccgcatctaacggcggcggcggccccggcccgatctccgcagaggcggcgcttggagaggctatcaagctggtgttcgggcggtggacggcgctgcagatggcggtggagaaccagtggggcggccgcgactcccgcgccaaggccgaccagttgggcgagtccatcctattctggttctgccgcactaagggtccatattatttcgaagacttggttgatatgatgtatgacaaaatttctgaatcttttaatgcctactttgaggataatagtattgaggaggttgctgaacagtttttgatcatacatgaagaatgcctgcaaaacaacttttcgtctatagagaagctaaggaattctcgtgttccggggaatgctgtttctcaaagtagacagatagtgggcgatgacgacgatgacagtgatagctcagatgacggtgatgacacatcgatggtggctgatgaagaggctgggccagaagagatggcagtggacagaccaaggccccccaagcctactccagacgccgatgggtggactgttgtgcctcctaggcgtggtggtcgcagcaagaaatagagtacaatggtagctgctggctttctcgcggaatgtttgttgagtgctgcggttccatattcacttgtatcgctcgatatttgacacgacatggatgttgagtgtgtagtatgatgcttggtttgccaccgcccaccaatttggtgtaaacaaggtaattattatagatgcatcctgtgatcaggttttgagtgttgcagagtc

SEQ ID NO: 19732 - protein, 242 aa, Zea mays subsp. mays
  peptide (1)..(242): Ceres Seq. ID no. 12636873
NFAVSIWTLESVVCVCAAGSLCHRTSRSREGKTLAASLRPNSQPRDPMAASNGGGGPGPISAEAALGEAIKLVFGRWTALQMAVENQWGGRDSRAKADQLGESILFWFCRTKGPYYFEDLVDMMYDKISESFNAYFEDNSIEEVAEQFLIIHEECLQNNFSSIEKLRNSRVPGNAVSQSRQIVGDDDDDSDSSDDGDDTSMVADEEAGPEEMAVDRPRPPKPTPDADGWTVVPPRRGGRSKK

SEQ ID NO: 19733 - protein, 195 aa, Zea mays subsp. mays
  peptide (1)..(195): Ceres Seq. ID no. 12636874
MAASNGGGGPGPISAEAALGEAIKLVFGRWTALQMAVENQWGGRDSRAKADQLGESILFWFCRTKGPYYFEDLVDMMYDKISESFNAYFEDNSIEEVAEQFLIIHEECLQNNFSSIEKLRNSRVPGNAVSQSRQIVGDDDDDSDSSDDGDDTSMVADEEAGPEEMAVDRPRPPKPTPDADGWTVVPPRRGGRSKK

SEQ ID NO: 19734 - protein, 161 aa, Zea mays subsp. mays
  peptide (1)..(161): Ceres Seq. ID no. 12636875
MAVENQWGGRDSRAKADQLGESILFWFCRTKGPYYFEDLVDMMYDKISESFNAYFEDNSIEEVAEQFLIIHEECLQNNFSSIEKLRNSRVPGNAVSQSRQIVGDDDDDSDSSDDGDDTSMVADEEAGPEEMAVDRPRPPKPTPDADGWTVVPPRRGGRSKK

SEQ ID NO: 19735 - DNA, 457 bp, Zea mays subsp. mays
  misc_feature (1)..(457): Ceres Seq. ID no. 2085619
  misc_feature (1)..(457): Ortholog of  Ceres SEQ ID NO 13655298 as cited in SEQ ID NO 68914
taagttgtatgcatatcagatgtgccgtgcgcttgcttacatccatcgagttgtcggtgtgtgtcatcgtgatattaaacctcaaaatctactggtcaatcctcatacacatcaacttaagatttgtgattttgggagcgctaaaaaattggtccctggtgagcctaacatatcgtacatttgctcgcggtattatagggctcctgaactaatatttggagctacggagtataccactgcgatcgatatctggtctgttggctgtgtagtggctgagcttctgattggtcagcctttgtttcctggtgaaagtggtgttgaccaactggtggaaataataaagattttgggtactccaacaagagaggagatcaggtgcatgaatccaaattattccgaattcaagttccctcagataaaagcccatccatggcacaagctttttggtaagcgcatg

SEQ ID NO: 19736 - protein, 152 aa, Zea mays subsp. mays
  peptide (1)..(152): Ceres Seq. ID no. 2085620
KLYAYQMCRALAYIHRVVGVCHRDIKPQNLLVNPHTHQLKICDFGSAKKLVPGEPNISYICSRYYRAPELIFGATEYTTAIDIWSVGCVVAELLIGQPLFPGESGVDQLVEIIKILGTPTREEIRCMNPNYSEFKFPQIKAHPWHKLFGKRM

SEQ ID NO: 19737 - protein, 146 aa, Zea mays subsp. mays
  peptide (1)..(146): Ceres Seq. ID no. 2085621
MCRALAYIHRVVGVCHRDIKPQNLLVNPHTHQLKICDFGSAKKLVPGEPNISYICSRYYRAPELIFGATEYTTAIDIWSVGCVVAELLIGQPLFPGESGVDQLVEIIKILGTPTREEIRCMNPNYSEFKFPQIKAHPWHKLFGKRM

SEQ ID NO: 19738 - DNA, 1341 bp, Zea mays subsp. mays
  misc_feature (1)..(1341): Ceres Seq. ID no. 12368476
  misc_feature (1)..(1341): Ortholog of  Ceres SEQ ID NO 15176227 as cited in SEQ ID NO 51448
  misc_feature (1)..(1341): Ortholog of  Ceres SEQ ID NO 13597609 as cited in SEQ ID NO 65216
gcacgagaccattacctagaacatcctaatcgaaaaaaagcggtgggccgcgcttccttcctcagtcctcactactcactcgtccccttccagttccgcttccgatctgcgcttcgatctccctcttcgcagagttgtagagcaatgcttatgaattttgacgagtccatatgtaagttgacaaaatttgctagggagagggactgcaggtgcttgtgagcatgtatctgctaggcaacaaaagtggaaagaagaaagtgtatgtcgattatatgaatgtccctctaccgtatgccatcgaagagaattacggtgggcgcttctttgacgacgacgacgatcttgcccaagttcttcaagatcaggaaatattgtatcatttaattcaaggaagtaatggtggtggttcatctagaactcattcgattccaagttctagctatggccatgatcggacatcaaatgcacaaaaattgtcaggagatgtaaactgtgagtgtgagttgcaactagcagttgatgaagctttagctagagagttgcatgaaatggagagcaaactagccaacacttcacttaatgacaataatcgaagaaagacaacatcatcttcagcatttgatagaggcaataattctgcaagtagacctcctcaggtattggaggaggatgtgattgatccagataatatgacgtatgaggaactgcaacagctaggggaagccattggtacccaaagcaaagggctgcctgaaagtgtcatagcactcttgccaacttcaacttacaaaactgggatattctccagaaaggaaaaacatgatgaatgtgtgatctgttgtatggcatacaagaaccgagataggctgactaaattgccatgtggacatcactaccatcaagcttgtgttgctaaatggttacagatcaataaggtatgccctgtttgcaataaggaggttttcagctagcagtatcaaacagtgcagattcgtctgatggccaactccagcaaccgtctgtagtactgcatagatgtgcattatttgtataagcatgctgccctgttgctggcaggtaatgcgccgcattgctcaaggaccatatcacggccaaattagtgatatctccagcgaaagcaataagatctctgcttttgaactttttgacattcagagtttcagacttggtgccacactacagtcctttttatcatcgcctgtatactattcatttcagtatcttgtctccagtccattcagcatactttctggaatgttgcaacttggattgaaacagcgagaaatgttgaaatttaggcactggtatttttttaaagtg

SEQ ID NO: 19739 - protein, 249 aa, Zea mays subsp. mays
  peptide (1)..(249): Ceres Seq. ID no. 12368477
MYLLGNKSGKKKVYVDYMNVPLPYAIEENYGGRFFDDDDDLAQVLQDQEILYHLIQGSNGGGSSRTHSIPSSSYGHDRTSNAQKLSGDVNCECELQLAVDEALARELHEMESKLANTSLNDNNRRKTTSSSAFDRGNNSASRPPQVLEEDVIDPDNMTYEELQQLGEAIGTQSKGLPESVIALLPTSTYKTGIFSRKEKHDECVICCMAYKNRDRLTKLPCGHHYHQACVAKWLQINKVCPVCNKEVFS

SEQ ID NO: 19740 - protein, 232 aa, Zea mays subsp. mays
  peptide (1)..(232): Ceres Seq. ID no. 12368478
MNVPLPYAIEENYGGRFFDDDDDLAQVLQDQEILYHLIQGSNGGGSSRTHSIPSSSYGHDRTSNAQKLSGDVNCECELQLAVDEALARELHEMESKLANTSLNDNNRRKTTSSSAFDRGNNSASRPPQVLEEDVIDPDNMTYEELQQLGEAIGTQSKGLPESVIALLPTSTYKTGIFSRKEKHDECVICCMAYKNRDRLTKLPCGHHYHQACVAKWLQINKVCPVCNKEVFS

SEQ ID NO: 19741 - protein, 140 aa, Zea mays subsp. mays
  peptide (1)..(140): Ceres Seq. ID no. 12368479
MESKLANTSLNDNNRRKTTSSSAFDRGNNSASRPPQVLEEDVIDPDNMTYEELQQLGEAIGTQSKGLPESVIALLPTSTYKTGIFSRKEKHDECVICCMAYKNRDRLTKLPCGHHYHQACVAKWLQINKVCPVCNKEVFS

SEQ ID NO: 19742 - DNA, 1473 bp, Zea mays subsp. mays; identical to SEQ ID NO: 9657
  misc_feature (1)..(1473): Ceres Seq. ID no. 12347344
  misc_feature (1)..(1473): Ortholog of  Ceres SEQ ID NO 14308095 as cited in SEQ ID NO 55286

SEQ ID NO: 19743 - protein, 389 aa, Zea mays subsp. mays; identical to SEQ ID NO: 9658
  peptide (1)..(389): Ceres Seq. ID no. 12347345

SEQ ID NO: 19744 - protein, 348 aa, Zea mays subsp. mays; identical to SEQ ID NO: 9659
  peptide (1)..(348): Ceres Seq. ID no. 12347346

SEQ ID NO: 19745 - protein, 345 aa, Zea mays subsp. mays; identical to SEQ ID NO: 9660
  peptide (1)..(345): Ceres Seq. ID no. 12347347

SEQ ID NO: 19746 - DNA, 447 bp, Zea mays subsp. mays
  misc_feature (1)..(447): Ceres Seq. ID no. 2121480
  misc_feature (1)..(447): Ortholog of  Ceres SEQ ID NO 12611963 as cited in SEQ ID NO 53414
ttgataaggaaaatctcatcaaatatgggaaccattcgttgacctatagaatagttgatagaattttcgcacagatcccaaggaaattcacaagcatgacagaaggaaagatgggttatgaagactttgtttactttatattatcagaggaagacaaatcatctgagcctagtcttgaatactggtttaagtgcatcgatcttgatggtaatggtattttaactttcaatgaaatgcaatttttctacgaggagcaattgcaccgaatggagtgcatggcacaagagcctgtgctttttctggacatattatgccagatgattgatatgattggaccagagaatgagagctatttaactctacgggacttaaaacggtgtaaactctcaggaaacatattcaatattcttttcaatctcaacaagttcatggcgtttgaaactcgtg

SEQ ID NO: 19747 - protein, 148 aa, Zea mays subsp. mays
  peptide (1)..(148): Ceres Seq. ID no. 2121481
DKENLIKYGNHSLTYRIVDRIFAQIPRKFTSMTEGKMGYEDFVYFILSEEDKSSEPSLEYWFKCIDLDGNGILTFNEMQFFYEEQLHRMECMAQEPVLFLDILCQMIDMIGPENESYLTLRDLKRCKLSGNIFNILFNLNKFMAFETR

SEQ ID NO: 19748 - protein, 117 aa, Zea mays subsp. mays
  peptide (1)..(117): Ceres Seq. ID no. 2121482
MTEGKMGYEDFVYFILSEEDKSSEPSLEYWFKCIDLDGNGILTFNEMQFFYEEQLHRMECMAQEPVLFLDILCQMIDMIGPENESYLTLRDLKRCKLSGNIFNILFNLNKFMAFETR

SEQ ID NO: 19749 - protein, 112 aa, Zea mays subsp. mays
  peptide (1)..(112): Ceres Seq. ID no. 2121483
MGYEDFVYFILSEEDKSSEPSLEYWFKCIDLDGNGILTFNEMQFFYEEQLHRMECMAQEPVLFLDILCQMIDMIGPENESYLTLRDLKRCKLSGNIFNILFNLNKFMAFETR

SEQ ID NO: 19750 - DNA, 1483 bp, Zea mays subsp. mays; identical to SEQ ID NO: 11161
  misc_feature (1)..(1483): Ceres Seq. ID no. 13492502
  misc_feature (1)..(1483): Ortholog of  Ceres SEQ ID NO 14307682 as cited in SEQ ID NO 54529

SEQ ID NO: 19751 - protein, 432 aa, Zea mays subsp. mays; identical to SEQ ID NO: 11162
  peptide (1)..(432): Ceres Seq. ID no. 13492503

SEQ ID NO: 19752 - protein, 374 aa, Zea mays subsp. mays; identical to SEQ ID NO: 11163
  peptide (1)..(374): Ceres Seq. ID no. 13492504

SEQ ID NO: 19753 - protein, 348 aa, Zea mays subsp. mays; identical to SEQ ID NO: 11164
  peptide (1)..(348): Ceres Seq. ID no. 13492505

SEQ ID NO: 19754 - DNA, 487 bp, Zea mays subsp. mays
  misc_feature (1)..(487): Ceres Seq. ID no. 4613497
  misc_feature (1)..(487): Ortholog of  Ceres SEQ ID NO 12567001 as cited in SEQ ID NO 0
aagttaggaggggaacccatcagccaagagctacgcaaacgcacagcgatgcacaagcacgagataccagccaccatgcgcctgtccctcctcctcgtcgtcgtggccgccctctcggcgcgcaccgcggcgcagctgccgctggcgggcggcggcggcggcgccctgaagccggacttctatagccagtcgtgcccgcgcgcggagcggatcattgcggaggtgatgcagacgaagcagatggcgaacccgacgacggccgcgggcctgctccgcgtcttcttccacgactgcttcgtcagcgggtgcgacgcgtcggtgctgatcgcgtccacccagttccagaagttcggagcacgacgcggagatcaaccactccctccccggggacgccttcgacgccgtggtgcgcgccaagctggccctggagctggagtgcccggggtggtgtcctgcgccgacatcctcgcactggcgtcgggcgtgc

SEQ ID NO: 19755 - protein, 162 aa, Zea mays subsp. mays
  peptide (1)..(162): Ceres Seq. ID no. 4613498
KLGGEPISQELRKRTAMHKHEIPATMRLSLLLVVVAALSARTAAQLPLAGGGGGALKPDFYSQSCPRAERIIAEVMQTKQMANPTTAAGLLRVFFHDCFVSGCDASVLIASTQFQKFGARRGDQPLPPRGRLRRRGARQAGPGAGVPGVVSCADILALASGV

SEQ ID NO: 19756 - protein, 146 aa, Zea mays subsp. mays
  peptide (1)..(146): Ceres Seq. ID no. 4613499
MHKHEIPATMRLSLLLVVVAALSARTAAQLPLAGGGGGALKPDFYSQSCPRAERIIAEVMQTKQMANPTTAAGLLRVFFHDCFVSGCDASVLIASTQFQKFGARRGDQPLPPRGRLRRRGARQAGPGAGVPGVVSCADILALASGV

SEQ ID NO: 19757 - protein, 137 aa, Zea mays subsp. mays
  peptide (1)..(137): Ceres Seq. ID no. 4613500
MRLSLLLVVVAALSARTAAQLPLAGGGGGALKPDFYSQSCPRAERIIAEVMQTKQMANPTTAAGLLRVFFHDCFVSGCDASVLIASTQFQKFGARRGDQPLPPRGRLRRRGARQAGPGAGVPGVVSCADILALASGV

SEQ ID NO: 19758 - DNA, 1585 bp, Zea mays subsp. mays
  misc_feature (1)..(1585): Ceres Seq. ID no. 12418694
  misc_feature (1)..(1585): Ortholog of  Ceres SEQ ID NO 14313449 as cited in SEQ ID NO 62735
gcacgagaccattacctagaacatcctaatcgaaaaacgtgaccccgaggcccgagcccgaagcggcggcgcgccgggcgtcttgacgtccccaatgacgccgcgcgtcgtggacggacctccgcagcttccctctcgtccgttccgcagtccgcacggggaggggagctacagcgacctaccgccgaggcgggccccaaccgcaccacgcctacttcaaaccctctcccacccccacctcctgccgttctcggaggggatcaagttcgcttctgcctgcgtgctctgctggagagctagatggcgatgccgtccgggtggaggggtatcctgggcttccactacggcatcgtgcaggcgccgttgggccccgacatctccggccccgagctcgtcgccgccgtggcgaacgccggcgccatcggcctcctccgcctccccgactggccggcgccggatcacgtcagagaactgatccggaagaccaggagcctcacgtccaagccgttcggggcggccatcgtgctggccttcccgcacgaggagaatctcagggtcgtcctggaggagaagctcgacgtgctgcaggtctactggggggacttccccaaccaccgggtccaagaggcgcatcgcgccggggttaaggtcttgcatcaggtcggcagccttgaggaggcagctaaagctaaagaagccggtgtagatgggatcattgttcagggacgtgaggcagggggtcatgtaattggtcaggaaggactgtttccactgttgccacgagtagtagatcttgtttcagactcgagcattccagttattgccgctggcggaattgtagatggacgtggctatgttgccgcattggcactcggtgcccaaggtgtttgtttaggaactaggtttgttgctaccgaggaaagctttgcacatcctattttataagcaaaagctaatcgagatgagtcacacagactacacaaatatattcggacgtgctagatggcctgatgctccacagcgggtcctggaaacacccttctatgatgagtggaagaataatttcccagaccaggaaacagaggaagatcaacccatcataggccactctatcatccatggtgtgcacaaggatattcgtcggtttgccggtactgttccaaacgcgacggcaacaggagatatcgacatcatggccatgtattcgggtcagggtgttgggctaatcacggaaatcataccagctgctcaagttgtcaaaagtctggtcgctgaagcgaaggaagtcatcagagaaaagctttctggttaccaatagaatccttcctgaactgcaaactagaagtatctgtgtgtgagtagtcaccaatcagaataatcggaagcaccaaggtttaggtttgattcttgtgctatttttaagtacaataaagtaaaaaatgatgaaaataaacgagactaacaaaggtattctgtcagacatttgtgtgcgtgtgtgcgcgctctgcatatctgtaatagttttggagtgtcttcacatagccctgaaggtcttcaaaagggtatttttggaggataggttgct

SEQ ID NO: 19759 - protein, 214 aa, Zea mays subsp. mays
  peptide (1)..(214): Ceres Seq. ID no. 12418695
MAMPSGWRGILGFHYGIVQAPLGPDISGPELVAAVANAGAIGLLRLPDWPAPDHVRELIRKTRSLTSKPFGAAIVLAFPHEENLRVVLEEKLDVLQVYWGDFPNHRVQEAHRAGVKVLHQVGSLEEAAKAKEAGVDGIIVQGREAGGHVIGQEGLFPLLPRVVDLVSDSSIPVIAAGGIVDGRGYVAALALGAQGVCLGTRFVATEESFAHPIL

SEQ ID NO: 19760 - protein, 212 aa, Zea mays subsp. mays
  peptide (1)..(212): Ceres Seq. ID no. 12418696
MPSGWRGILGFHYGIVQAPLGPDISGPELVAAVANAGAIGLLRLPDWPAPDHVRELIRKTRSLTSKPFGAAIVLAFPHEENLRVVLEEKLDVLQVYWGDFPNHRVQEAHRAGVKVLHQVGSLEEAAKAKEAGVDGIIVQGREAGGHVIGQEGLFPLLPRVVDLVSDSSIPVIAAGGIVDGRGYVAALALGAQGVCLGTRFVATEESFAHPIL

SEQ ID NO: 19761 - protein, 126 aa, Zea mays subsp. mays
  peptide (1)..(126): Ceres Seq. ID no. 12418697
MTPRVVDGPPQLPSRPFRSPHGEGSYSDLPPRRAPTAPRLLQTLSHPHLLPFSEGIKFASACVLCWRARWRCRPGGGVSWASTTASCRRRWAPTSPAPSSSPPWRTPAPSASSASPTGRRRITSEN

SEQ ID NO: 19762 - DNA, 1252 bp, Zea mays subsp. mays
  misc_feature (1)..(1252): Ceres Seq. ID no. 12364488
  misc_feature (1)..(1252): Ortholog of  Ceres SEQ ID NO 13582052 as cited in SEQ ID NO 59823
  misc_feature (1)..(1252): Ortholog of  Ceres SEQ ID NO 13659378 as cited in SEQ ID NO 67014
  misc_feature (1)..(1252): Ortholog of  Ceres SEQ ID NO 13599365 as cited in SEQ ID NO 0
gcacgagaccattacctagaacatcctaatcgaaaaagcacagcagagcgccactcgactcgactcatcctttcggttcccctcccccctccgcgttccacaaccctcgagaagcttccaccctcccctcctgcgacgccgccagagccgcggaaaccctacccaccccggccgctcacgcaccgggcgcccgccgccgccggtcgcgtacctgccgccgacaccgcccaaagcgattggatctagagatcgtcagtagccacgatggaggactgggattctgaagaattccagccagttgtgcctgttgtgaaagccgagccacttaaaaatcagtgggctgatgaagatgttgaagaagatgatgtaaaagaatcatgggaagaagaggaggaggaggagaaacctaagccagcgccagtggaaaaggtcgctgcaaaacctagcactaaggctcctgctaaaaagggaaaacagcaagcattgacaagtgctgaagaaccagatgagcctcctcttagtcccacttcacagaaaattcgccaacaaagacttgtggaagaagctgacttcaagtctaccaccgagctttttgcaaagaagggcagtgagcaaaagtcactagatacttttattccaaagtccgagagtgactttgcggaatacgcggagcttattgcaaacaaactacgcccctatgagaaaagctttcactacatggctctgcttaagaatgtcatgagactttccatgacatcgttgaaaggtgcggacgccaaagatatatcttcttccgtgacggcaattgctaacgagaagatcaaggctgagaaggaggctgcagcaggcaaaaagaaacaaggagcgaaaaagaagcaactccacatcgagaaaggagacgacgacttcatccccggccggggtggtggctacgatgaccccgatgagtacgacttcatgtgatctggctgggagggatagtaggtttctgttatgtatacctttggcgggcagagaatatatcactagagtttgcggcatactattgcatggaacatgcgttatctattcgagaatgatttttgactctgcaggataagaagagcacttgtgatctggatgcatgggtgttttcttatttatccttgaatctttgggttatttttttttcaacattgcattttttgccaaatgtactatagtaccttgtactatctggttactccgtgagtcatgaaagcaattaaatccc

SEQ ID NO: 19763 - protein, 232 aa, Zea mays subsp. mays
  peptide (1)..(232): Ceres Seq. ID no. 12364489
MEDWDSEEFQPVVPVVKAEPLKNQWADEDVEEDDVKESWEEEEEEEKPKPAPVEKVAAKPSTKAPAKKGKQQALTSAEEPDEPPLSPTSQKIRQQRLVEEADFKSTTELFAKKGSEQKSLDTFIPKSESDFAEYAELIANKLRPYEKSFHYMALLKNVMRLSMTSLKGADAKDISSSVTAIANEKIKAEKEAAAGKKKQGAKKKQLHIEKGDDDFIPGRGGGYDDPDEYDFM

SEQ ID NO: 19764 - DNA, 767 bp, Zea mays subsp. mays; identical to SEQ ID NO: 15469
  misc_feature (1)..(767): Ceres Seq. ID no. 13635648
  misc_feature (1)..(767): Ortholog of  Ceres SEQ ID NO 13590691 as cited in SEQ ID NO 66290

SEQ ID NO: 19765 - protein, 255 aa, Zea mays subsp. mays; identical to SEQ ID NO: 15470
  peptide (1)..(255): Ceres Seq. ID no. 13635649

SEQ ID NO: 19766 - protein, 182 aa, Zea mays subsp. mays; identical to SEQ ID NO: 15471
  peptide (1)..(182): Ceres Seq. ID no. 13635650

SEQ ID NO: 19767 - protein, 131 aa, Zea mays subsp. mays; identical to SEQ ID NO: 15472
  peptide (1)..(131): Ceres Seq. ID no. 13635651

SEQ ID NO: 19768 - DNA, 1063 bp, Zea mays subsp. mays
  misc_feature (1)..(1063): Ceres Seq. ID no. 12418691
  misc_feature (1)..(1063): Ortholog of  Ceres SEQ ID NO 12608028 as cited in SEQ ID NO 57065
gcacgagaccattacctagaacatcctaatcaaaaatcccgcatccggcacaaaccaactgcatcaagctccaccagagaagacaggcccgccgacggccgcagccgcgggcggactcgtgagtcgcgactacgccgctgcagttcccaactcagggtgcctgcccgtaacctacccaagagcggccccgccatgcgcgcggaggtcacccagatcagcgccctaaccgccgtggccgcgcacgtgctctgctctgcgggccttgctgccgcccacgccctcgctggccgcggcgcgctcgtctccgaccccgcgctcgcccttcgccttctcgtggtctgtgaagcgcccatagtcatcgcagtgttcagctacctccggcgtgatgctaaaagttgctcgtttttcagggctgttgcaagaggattgatcggcttgcccgtgggagcgttccttaatgcatttggagcaatcattcttggggcacctgttggagtcaagtactggatagctactatttactggtcgcttgtcatgtccctgtttacgtttgttcccgcagcatgtgtctttggagcatccaggatcgattggcaggatgtgctttctcactccatttatttcacgccaactgatgttgagaactacatgatctctgcaccttgccatggagctgtgctaggagcgtggctcggtgcttggcctatgccacttgactgggagagaccatggcaggaatggccaatctgtgtcacttatggtgcagttgctgggtatttgttcggaatggcagtgtcattggtcctaacagcactttacaaaagaagggttcgtgcaaaagctgactagccgttcttcccacaaagcaatgtatttgctgataacatttcttgttcctgcgagtactcatcactttcagtagccttttcacccaggttcacattgttgtattcttttgaagcccccctcattttttttgcagttgtacattgttttcttgaatgtaatgtgaaggactcagtttattactgtaaaacacacgtttgttgagagagtgcgtgtt

SEQ ID NO: 19769 - protein, 282 aa, Zea mays subsp. mays
  peptide (1)..(282): Ceres Seq. ID no. 12418692
ARDHYLEHPNQKSRIRHKPTASSSTREDRPADGRSRGRTRESRLRRCSSQLRVPARNLPKSGPAMRAEVTQISALTAVAAHVLCSAGLAAAHALAGRGALVSDPALALRLLVVCEAPIVIAVFSYLRRDAKSCSFFRAVARGLIGLPVGAFLNAFGAIILGAPVGVKYWIATIYWSLVMSLFTFVPAACVFGASRIDWQDVLSHSIYFTPTDVENYMISAPCHGAVLGAWLGAWPMPLDWERPWQEWPICVTYGAVAGYLFGMAVSLVLTALYKRRVRAKAD

SEQ ID NO: 19770 - protein, 218 aa, Zea mays subsp. mays
  peptide (1)..(218): Ceres Seq. ID no. 12418693
MRAEVTQISALTAVAAHVLCSAGLAAAHALAGRGALVSDPALALRLLVVCEAPIVIAVFSYLRRDAKSCSFFRAVARGLIGLPVGAFLNAFGAIILGAPVGVKYWIATIYWSLVMSLFTFVPAACVFGASRIDWQDVLSHSIYFTPTDVENYMISAPCHGAVLGAWLGAWPMPLDWERPWQEWPICVTYGAVAGYLFGMAVSLVLTALYKRRVRAKAD

SEQ ID NO: 19771 - DNA, 1980 bp, Zea mays subsp. mays
  misc_feature (1)..(1980): Ceres Seq. ID no. 12418235
  misc_feature (1)..(1980): Ortholog of  Ceres SEQ ID NO 14307896 as cited in SEQ ID NO 66915
  misc_feature (1)..(1980): Ortholog of  Ceres SEQ ID NO 13657008 as cited in SEQ ID NO 69164
gtcggtccaagagcacgacgagcagacgacgctgccggcccggccgtgctgctcctctgagtccgagatctgaaggcgcggcaggaaggaaacgggcgggcgagaggatccagcagccctcccccacgcgcgcgcgacggttagcgcgtcccagatctcggtgcggcgcctcccgcccggccctgccggcgagagcgcggcccgatgaggcggcggccgttcctggagcagcggcggccttcgttcaagcgccggtggcagcagcgcccgtggtgggtgcgcctcgcgctttccctccttctcgccctcgcatgcgtcctcctcctcgccgtcctcctcggctcccccgaccccggcgcctcgccgtccacctccgccgcgtcctccggatctgagaccacctcctcacctctcctccgtcagagaacttacctggagggaatcacggatgcgctcaacatgactgacgaaatgctgagcgcccgctcgttctcgaggcagctcatggaccagatttatctagccaaaacatatgtcgtcgttgccaaggaggccaacaacctcagtttgtggcggagcttagtgcccaggtacggcgggcgcagagcatccttgcgcatgctgcagcctatgggggcacggtgatggagcaggaagcagagaaggcgatcagggatatgtcggtgctgctcttccaggcgcagcagcttcggtacgtagcagtatcacaatcatgaagttgaaaggccagattcagtccctagaggagaagtcaaaagttgaggtggagaaaagcacaaaatatggccagattgctgctgaggagctcccaaagggactttattgccttggtatccggttaaccatggaatggttcaagagtcccgagcttcagaggaagttttcggataggagcccagcagtgcagagcaatctgagtgataacagcctctaccatttttgtgtcttctcagacaacatccttgctgtttcagttgttgttaattctacggctataaactcgaggcaccctgacaaggttgtttttcacttagtgactgatgagttgaactatgctccgatgaaggcatggtttggcatgaatgactacagaggggtcaccgtggagatacaaaaggtggaggactttacctggctcaatgcatcgtatgttcccgttcttaaacagctacagaatgctgctacacagaagttctacttctctggcagtggtagtcgtggaacaccaattaaattcaggaacccaaagtacttatcaatgcttaaccacttgaggttttatattccagaaatatatcctgaattgcagaaggtggtatttcttgatgatgatatcgttgttcagaaggacctatcagaattgtttactatcaacctcaatggcaatgtgatgggtgctgtagagacttgcatggagacattccacagatttcataagtatcttaaccattcccatccgctaatccgtgctcattttgaccctgatgcttgcggctgggcatttggtatgaacgtgcttgatctggttgaatggaggaacaagaatgtgacaggcatatatcattattggcaggagcgcaatgctgatcatactctatggaagcttgggtctttaccacctggacttcttgctttctatggcttggttgaagcattggatcccaaatggcatgtcttgggacttggctacacaaatgtggatcttgctactatcaaggaaggtgcagtactgcactacaatggaaatatgaagccatggctcaaaatcggaatggagaagtacaagagcttttgggataactatgtggactattcacaccctttgattcagcagtgcttcatgcgttgattgatgtgtatcaacattagaatttttgtaagcttcatggtagatatgttccgagcacatgctccaactgccacacggaaacattgtagttaaatcagttggcttttctc

SEQ ID NO: 19772 - protein, 378 aa, Zea mays subsp. mays
  peptide (1)..(378): Ceres Seq. ID no. 12418236
MKLKGQIQSLEEKSKVEVEKSTKYGQIAAEELPKGLYCLGIRLTMEWFKSPELQRKFSDRSPAVQSNLSDNSLYHFCVFSDNILAVSVVVNSTAINSRHPDKVVFHLVTDELNYAPMKAWFGMNDYRGVTVEIQKVEDFTWLNASYVPVLKQLQNAATQKFYFSGSGSRGTPIKFRNPKYLSMLNHLRFYIPEIYPELQKVVFLDDDIVVQKDLSELFTINLNGNVMGAVETCMETFHRFHKYLNHSHPLIRAHFDPDACGWAFGMNVLDLVEWRNKNVTGIYHYWQERNADHTLWKLGSLPPGLLAFYGLVEALDPKWHVLGLGYTNVDLATIKEGAVLHYNGNMKPWLKIGMEKYKSFWDNYVDYSHPLIQQCFMR

SEQ ID NO: 19773 - protein, 334 aa, Zea mays subsp. mays
  peptide (1)..(334): Ceres Seq. ID no. 12418237
MEWFKSPELQRKFSDRSPAVQSNLSDNSLYHFCVFSDNILAVSVVVNSTAINSRHPDKVVFHLVTDELNYAPMKAWFGMNDYRGVTVEIQKVEDFTWLNASYVPVLKQLQNAATQKFYFSGSGSRGTPIKFRNPKYLSMLNHLRFYIPEIYPELQKVVFLDDDIVVQKDLSELFTINLNGNVMGAVETCMETFHRFHKYLNHSHPLIRAHFDPDACGWAFGMNVLDLVEWRNKNVTGIYHYWQERNADHTLWKLGSLPPGLLAFYGLVEALDPKWHVLGLGYTNVDLATIKEGAVLHYNGNMKPWLKIGMEKYKSFWDNYVDYSHPLIQQCFMR

SEQ ID NO: 19774 - protein, 262 aa, Zea mays subsp. mays
  peptide (1)..(262): Ceres Seq. ID no. 12418238
MKAWFGMNDYRGVTVEIQKVEDFTWLNASYVPVLKQLQNAATQKFYFSGSGSRGTPIKFRNPKYLSMLNHLRFYIPEIYPELQKVVFLDDDIVVQKDLSELFTINLNGNVMGAVETCMETFHRFHKYLNHSHPLIRAHFDPDACGWAFGMNVLDLVEWRNKNVTGIYHYWQERNADHTLWKLGSLPPGLLAFYGLVEALDPKWHVLGLGYTNVDLATIKEGAVLHYNGNMKPWLKIGMEKYKSFWDNYVDYSHPLIQQCFMR

SEQ ID NO: 19775 - DNA, 1767 bp, Zea mays subsp. mays
  misc_feature (1)..(1767): Ceres Seq. ID no. 12454825
  misc_feature (1)..(1767): Ortholog of  Ceres SEQ ID NO 15180288 as cited in SEQ ID NO 0
cccccgtcgactcgcccgctccatcgcccccacgcacccgctgccggccaaaagccaattcgaatctccccgctgcgcggcggggcctctgcttccgcaatgcgggcctccgtcgaggaggcgggcgcgctcctggcgcggagcgactcagccggccgccgccgccgctccccgccgccggtgcagaccgcgtccccgaggcccggtagcctcaggcgccagtcgtcgtcgttccgcgaggacgtcgggcacgccgcctccgagacttacctcgtctcgcgcctcaccttcaccctcctccagtacctcgggttaggttaccgatggatgtcacaacttctttcactcacaatctatgcaattgtacttatgccaggatttatacaagttggatattactatttcttttcgagccaagtgcgtagaagtgtagtctatggagaccaacccagaaacaggttggatctatacataccagaagataatagtaggccctgtccagtggtggcctttgtgactggtggagcatggattattggttacaaggcatggggtgctcttctaggacgacgattggcagagcgaggaataatagttgcttgcattgattacagaaatttcccacaaggtacaataggggacatggttcatgatgcttctcaggggatttcttttgtgtgcaacaacatcgccagccatggaggagatcctaatcagatctacttgataggtcagtcagcaggtgcacatattgcagcgtgtgccctcatggagcaagcagtaaaagaatctggtgggaatcctgtttcttggagtcttacccaaatcaaagcatacttcggtttatctggagggtattaaattggatatctaatgaagtggtatctagtaacgattagatataacagtaaggattaatgatggatttgaagtacaatttcagcataatggaaggagaggaatcattgtcacgttattctcctgaaattgttgcaaagacgtcaagtgctgaaaccatagctcttctgcctcttgttgttcttatgcatggaactgaagattattcaataccatcatcttccagtcaaacttttgttgacgtcctccaacaagctggtgctcaagcaaggttactattgtacgaagggaaaacacatacagatatctttgtacaggaccctctaaggggtggaagagatccattggttgaagacgtgttgtctattattcatgctgatgatgcaaatgcatgtcaaaagattgctttagcaccaactcctaggagattagttttcgagtggcaattaaagttggcacgcaaaattagtccattctagcagtatgaaccatggagaagcttggagctatggattttgcaccttcatgaggaaagggtgctcgtctgctcggggagccgttgagctggattggatcaggcaagtaaaaggttctcgcgtcttctttacttgcacaacgttggtcaatgtgaaacttgtagctggtacgcaatacgagaggaagaagctaaatacacgactgggaatggaaaccacgtcatcttttttttgcaaggctgtatataatgttgcatattatattgtacaaaggcttgtactacgtttcttgtgcctctattctaaaatgtaagttttttttttaattttagccgaaatcaaactgactaaaggcttgtttcaaactgactaaaggcttgtttggaagcactcagtttttaagaaattagtttataaaaattgagttggttcc

SEQ ID NO: 19776 - protein, 286 aa, Zea mays subsp. mays
  peptide (1)..(286): Ceres Seq. ID no. 12454826
PPSTRPLHRPHAPAAGQKPIRISPLRGGASASAMRASVEEAGALLARSDSAGRRRRSPPPVQTASPRPGSLRRQSSSFREDVGHAASETYLVSRLTFTLLQYLGLGYRWMSQLLSLTIYAIVLMPGFIQVGYYYFFSSQVRRSVVYGDQPRNRLDLYIPEDNSRPCPVVAFVTGGAWIIGYKAWGALLGRRLAERGIIVACIDYRNFPQGTIGDMVHDASQGISFVCNNIASHGGDPNQIYLIGQSAGAHIAACALMEQAVKESGGNPVSWSLTQIKAYFGLSGGY

SEQ ID NO: 19777 - protein, 253 aa, Zea mays subsp. mays
  peptide (1)..(253): Ceres Seq. ID no. 12454827
MRASVEEAGALLARSDSAGRRRRSPPPVQTASPRPGSLRRQSSSFREDVGHAASETYLVSRLTFTLLQYLGLGYRWMSQLLSLTIYAIVLMPGFIQVGYYYFFSSQVRRSVVYGDQPRNRLDLYIPEDNSRPCPVVAFVTGGAWIIGYKAWGALLGRRLAERGIIVACIDYRNFPQGTIGDMVHDASQGISFVCNNIASHGGDPNQIYLIGQSAGAHIAACALMEQAVKESGGNPVSWSLTQIKAYFGLSGGY

SEQ ID NO: 19778 - protein, 177 aa, Zea mays subsp. mays
  peptide (1)..(177): Ceres Seq. ID no. 12454828
MSQLLSLTIYAIVLMPGFIQVGYYYFFSSQVRRSVVYGDQPRNRLDLYIPEDNSRPCPVVAFVTGGAWIIGYKAWGALLGRRLAERGIIVACIDYRNFPQGTIGDMVHDASQGISFVCNNIASHGGDPNQIYLIGQSAGAHIAACALMEQAVKESGGNPVSWSLTQIKAYFGLSGGY

SEQ ID NO: 19779 - DNA, 1858 bp, Zea mays subsp. mays
  misc_feature (1)..(1858): Ceres Seq. ID no. 12376724
  misc_feature (1)..(1858): Ortholog of  Ceres SEQ ID NO 15170666 as cited in SEQ ID NO 63386
attggaatctctgggcgactcgacctgaacaaccccgcccgccgtcctgcccttgtgctctagtcctcccgcgaccgttccaaattcttcctcgcgttcgtattccacgcggcgacgtcgccatcgccatcgcggccgccgctccgcccctcttccttcgcatatacgtaggtaggcgcctccccaaaccctaagcctttatctcccacgcgcgcggctcgctctgctgcgccgcggctcgctcgaccccgcagatcgccggcgatgggatccaaggaccaggacggaggggctgcatcctcgggaggcggcttcttctcgtcgttcgccgccggcatgcgcagctggggcaccgccgtgcataaatccgtcaacgggctgcttggttatgaaggccttgaagttattaaccccgatggaggcacagatgatgctgaagaagaagctttgaaggggagatggaagcaggaggaccgtgatagctactggaagatgatgcacaaatacataggatcagatgttacatcacttgtgacacttccagtcataatttttgagccaatgacaatgcttcagaaaatggccgagttgatggaatactgtgaattgttagacaaagcagatgaatgtgaggatccatacatgtgtatggtttatgcttctacatgggctgtttctgtgtactttgcatatcaacgcacatggaagccttttaatccgatccttggagagacttatgagatggttaaccaccagggcattacatttcttgctgagcaggtaagccatcatcccccaatgggtgttgctcactgcgagaatgaacattttacttacgatatcacgtctaagttgaagaccaagtttttgggaaattcagtggaaatttacccagttggaaggactcgagtgacactaaaaaaatctggtgtcgtgttggatttggtgccaccactaacaaaggttaacaacctgatatttgggcgcacttgggttgattctcctggagagatggtcatgacgaacctgacaactggagacaaagttgtgctatatttccagccatgcggctggtttggggctggccgttacgaggtggatgggtatgtgtacagtgcagcggaagaacccaaaatcatgattacagggaagtggaacaagtccctgagttgccaaccatgtgaccaagaaggcgatcctcttccaggcacggagctgaaggagatctggagagttgctcctgccccacagggcgacaagtatcagtacacacacttcgcacacaaaataaacagcttcgacacggcacctaagaagctgttggcatctgattcacggctgaggcctgatagatatgccctcgagaagggtgacatgtctaagtccggggcagagaagagcaggctcgaggaacaacagagagctgagaaacgaactcgagaggccaagggcgagcaatttactcctagatggttcaacctgacagatgtggtctcccctacaccgtggggtgacctggaaatttatgaatacaacggcaaatacacagagcaccgggctgccatagaccgctccgatgtcaccgacgagacagatgtcacttcagtcaagttcagcccatggcaatatggtagctcatcttcccaatgattctccgtggccagaagccgccatgcctacgcgcattgtgtaaaacacttccaggcctggctttgctggtttgttgtgccatcagcggtttccttgcccttgtagtattgtggccttcccccttttttcccttaaatgctacagttattcaggaagtggtgtagtccgtgtactgtcgcaagtctagcagagattgcagagttttgtt

SEQ ID NO: 19780 - protein, 461 aa, Zea mays subsp. mays
  peptide (1)..(461): Ceres Seq. ID no. 12376725
MGSKDQDGGAASSGGGFFSSFAAGMRSWGTAVHKSVNGLLGYEGLEVINPDGGTDDAEEEALKGRWKQEDRDSYWKMMHKYIGSDVTSLVTLPVIIFEPMTMLQKMAELMEYCELLDKADECEDPYMCMVYASTWAVSVYFAYQRTWKPFNPILGETYEMVNHQGITFLAEQVSHHPPMGVAHCENEHFTYDITSKLKTKFLGNSVEIYPVGRTRVTLKKSGVVLDLVPPLTKVNNLIFGRTWVDSPGEMVMTNLTTGDKVVLYFQPCGWFGAGRYEVDGYVYSAAEEPKIMITGKWNKSLSCQPCDQEGDPLPGTELKEIWRVAPAPQGDKYQYTHFAHKINSFDTAPKKLLASDSRLRPDRYALEKGDMSKSGAEKSRLEEQQRAEKRTREAKGEQFTPRWFNLTDVVSPTPWGDLEIYEYNGKYTEHRAAIDRSDVTDETDVTSVKFSPWQYGSSSSQ

SEQ ID NO: 19781 - protein, 437 aa, Zea mays subsp. mays
  peptide (1)..(437): Ceres Seq. ID no. 12376726
MRSWGTAVHKSVNGLLGYEGLEVINPDGGTDDAEEEALKGRWKQEDRDSYWKMMHKYIGSDVTSLVTLPVIIFEPMTMLQKMAELMEYCELLDKADECEDPYMCMVYASTWAVSVYFAYQRTWKPFNPILGETYEMVNHQGITFLAEQVSHHPPMGVAHCENEHFTYDITSKLKTKFLGNSVEIYPVGRTRVTLKKSGVVLDLVPPLTKVNNLIFGRTWVDSPGEMVMTNLTTGDKVVLYFQPCGWFGAGRYEVDGYVYSAAEEPKIMITGKWNKSLSCQPCDQEGDPLPGTELKEIWRVAPAPQGDKYQYTHFAHKINSFDTAPKKLLASDSRLRPDRYALEKGDMSKSGAEKSRLEEQQRAEKRTREAKGEQFTPRWFNLTDVVSPTPWGDLEIYEYNGKYTEHRAAIDRSDVTDETDVTSVKFSPWQYGSSSSQ

SEQ ID NO: 19782 - protein, 385 aa, Zea mays subsp. mays
  peptide (1)..(385): Ceres Seq. ID no. 12376727
MMHKYIGSDVTSLVTLPVIIFEPMTMLQKMAELMEYCELLDKADECEDPYMCMVYASTWAVSVYFAYQRTWKPFNPILGETYEMVNHQGITFLAEQVSHHPPMGVAHCENEHFTYDITSKLKTKFLGNSVEIYPVGRTRVTLKKSGVVLDLVPPLTKVNNLIFGRTWVDSPGEMVMTNLTTGDKVVLYFQPCGWFGAGRYEVDGYVYSAAEEPKIMITGKWNKSLSCQPCDQEGDPLPGTELKEIWRVAPAPQGDKYQYTHFAHKINSFDTAPKKLLASDSRLRPDRYALEKGDMSKSGAEKSRLEEQQRAEKRTREAKGEQFTPRWFNLTDVVSPTPWGDLEIYEYNGKYTEHRAAIDRSDVTDETDVTSVKFSPWQYGSSSSQ

SEQ ID NO: 19783 - DNA, 1296 bp, Zea mays subsp. mays
  misc_feature (1)..(1296): Ceres Seq. ID no. 12364476
  misc_feature (1)..(1296): Ortholog of  Ceres SEQ ID NO 12636774 as cited in SEQ ID NO 372
  misc_feature (1)..(1296): Ortholog of  Ceres SEQ ID NO 12562215 as cited in SEQ ID NO 20489
  misc_feature (1)..(1296): Ortholog of  Ceres SEQ ID NO 15174842 as cited in SEQ ID NO 53054
  misc_feature (1)..(1296): Ortholog of  Ceres SEQ ID NO 13582350 as cited in SEQ ID NO 56734
  misc_feature (1)..(1296): Ortholog of  Ceres SEQ ID NO 12476493 as cited in SEQ ID NO 58163
  misc_feature (1)..(1296): Ortholog of  Ceres SEQ ID NO 12582113 as cited in SEQ ID NO 58349
  misc_feature (1)..(1296): Ortholog of  Ceres SEQ ID NO 14310807 as cited in SEQ ID NO 58696
  misc_feature (1)..(1296): Ortholog of  Ceres SEQ ID NO 15175861 as cited in SEQ ID NO 59381
  misc_feature (1)..(1296): Ortholog of  Ceres SEQ ID NO 14313459 as cited in SEQ ID NO 62395
  misc_feature (1)..(1296): Ortholog of  Ceres SEQ ID NO 12615466 as cited in SEQ ID NO 62761
  misc_feature (1)..(1296): Ortholog of  Ceres SEQ ID NO 12615907 as cited in SEQ ID NO 62860
  misc_feature (1)..(1296): Ortholog of  Ceres SEQ ID NO 14314080 as cited in SEQ ID NO 63105
  misc_feature (1)..(1296): Ortholog of  Ceres SEQ ID NO 13597295 as cited in SEQ ID NO 63743
  misc_feature (1)..(1296): Ortholog of  Ceres SEQ ID NO 12617090 as cited in SEQ ID NO 64005
  misc_feature (1)..(1296): Ortholog of  Ceres SEQ ID NO 13597439 as cited in SEQ ID NO 64081
  misc_feature (1)..(1296): Ortholog of  Ceres SEQ ID NO 13597233 as cited in SEQ ID NO 64370
  misc_feature (1)..(1296): Ortholog of  Ceres SEQ ID NO 13598327 as cited in SEQ ID NO 68040
  misc_feature (1)..(1296): Ortholog of  Ceres SEQ ID NO 13599438 as cited in SEQ ID NO 0
  misc_feature (1)..(1296): Ortholog of  Ceres SEQ ID NO 13600370 as cited in SEQ ID NO 0
gcacgagaccattacctagaacatcctaatcgaaaaatccaattgaggaagagaagaggcgataagcacactaatggctgacgagtcatggagggtgccaaccccagtgcaagaactggccgcaggcgtggtggagccaccgacccagttcgtgctgcaggagcaggatcgtcctggatctgggaccctgctcttcgccactgacatgccggagcccattcccgtcgttgacctcagcaggctggcggctgccgacgaggcttccaagctccggtcagcactggagacctgggggctcttcctggttactaagcatgggatagaagcatctctcatggacgatgtgatggccgcgtcacgcgattttttctaccagccgctcgaagcgaagcaggaatacagtaacctgataggcggcaagcggttccagatggagggttatggtaatgacatggtgaaatccaaagatcagatactggactggcaagatcggctgcagctcagggtggaaccccaagatgagaggaacctcgcttattggcccaaacaccctgattctttcagggatcttctggagaagtatgcatcaaaaaccaagatagttaggaacaaagtcttacgggcgatgggcaaaacattggagcttggcgaagactatttcatcagccagattggtgacagggcctcagcaattgctaggttcaactactaccctccctgtccaaggcctgatcttgtctttggcattaagcctcactctgacggtggcgcggtgacgatacttctcgtcgacaaggatgttgggggcctgcaagttcagaaagatggcgtttggtacactgttccgtccatgcctcacacgctgcttgtcaacttgggtgactccatggagataatgaacaatgggatcttcaaaagtccggtgcacagggttgtgacgaatgcagagaaagagagactctcactcgccatgttctacggcgtggaaggccagagagtgcttgagccagcgcttggtttgctgggtgaggagcgaccagcacggtacaggaaaattatggcctcagactacattattgggctccgtcaaggaattgcggaaggacagagatttatcgagactttgaagatatagtcaatcgtgaatgctcaagaataataaagagttgcttcgcccattgctaaatcagatcagagtccaatgtccattctgtaatgcattaccacattgttatacatgctcggaagacttcagagaagatgtaatcctgctcgttttactaaatttggggcatt

SEQ ID NO: 19784 - protein, 353 aa, Zea mays subsp. mays
  peptide (1)..(353): Ceres Seq. ID no. 12364477
MADESWRVPTPVQELAAGVVEPPTQFVLQEQDRPGSGTLLFATDMPEPIPVVDLSRLAAADEASKLRSALETWGLFLVTKHGIEASLMDDVMAASRDFFYQPLEAKQEYSNLIGGKRFQMEGYGNDMVKSKDQILDWQDRLQLRVEPQDERNLAYWPKHPDSFRDLLEKYASKTKIVRNKVLRAMGKTLELGEDYFISQIGDRASAIARFNYYPPCPRPDLVFGIKPHSDGGAVTILLVDKDVGGLQVQKDGVWYTVPSMPHTLLVNLGDSMEIMNNGIFKSPVHRVVTNAEKERLSLAMFYGVEGQRVLEPALGLLGEERPARYRKIMASDYIIGLRQGIAEGQRFIETLKI

SEQ ID NO: 19785 - protein, 309 aa, Zea mays subsp. mays
  peptide (1)..(309): Ceres Seq. ID no. 12364478
MPEPIPVVDLSRLAAADEASKLRSALETWGLFLVTKHGIEASLMDDVMAASRDFFYQPLEAKQEYSNLIGGKRFQMEGYGNDMVKSKDQILDWQDRLQLRVEPQDERNLAYWPKHPDSFRDLLEKYASKTKIVRNKVLRAMGKTLELGEDYFISQIGDRASAIARFNYYPPCPRPDLVFGIKPHSDGGAVTILLVDKDVGGLQVQKDGVWYTVPSMPHTLLVNLGDSMEIMNNGIFKSPVHRVVTNAEKERLSLAMFYGVEGQRVLEPALGLLGEERPARYRKIMASDYIIGLRQGIAEGQRFIETLKI

SEQ ID NO: 19786 - protein, 266 aa, Zea mays subsp. mays
  peptide (1)..(266): Ceres Seq. ID no. 12364479
MDDVMAASRDFFYQPLEAKQEYSNLIGGKRFQMEGYGNDMVKSKDQILDWQDRLQLRVEPQDERNLAYWPKHPDSFRDLLEKYASKTKIVRNKVLRAMGKTLELGEDYFISQIGDRASAIARFNYYPPCPRPDLVFGIKPHSDGGAVTILLVDKDVGGLQVQKDGVWYTVPSMPHTLLVNLGDSMEIMNNGIFKSPVHRVVTNAEKERLSLAMFYGVEGQRVLEPALGLLGEERPARYRKIMASDYIIGLRQGIAEGQRFIETLKI

SEQ ID NO: 19787 - DNA, 1287 bp, Zea mays subsp. mays
  misc_feature (1)..(1287): Ceres Seq. ID no. 12454845
  misc_feature (1)..(1287): Ortholog of  Ceres SEQ ID NO 14315193 as cited in SEQ ID NO 57743
  misc_feature (1)..(1287): Ortholog of  Ceres SEQ ID NO 13622600 as cited in SEQ ID NO 0
actttctcttcagttcaacttccgactttccgagtcgtcacctcacctaccggctaccgaggaagcagaagcgcacgagcgagacgcagccaccgcccgggaggaggaggaagccaagagcaatcggactttgaatggctcgcgacggcggcagcagagggtcaccgggggcggagcggcggcgggtggcgctgcgtgccctcctcgcgtcgggtggcgcggaggcggaggccgcgaggacgtcgagcaagggcctgctacgcggccttcggtgcacgtccgcggccgcatcgcaggctatcgcgccggagatcccgcggcctccggcggactggcgcggactcggttgcgccgcggcggcccaggcgcacgcgccggctgccgcggtggaagcggcccggcccacggcggactggcgcaggcttgggtgcgcggctggagcggcaccggcggtccaggctcaagcgccccggcgttccgaggagtggcgcgtgaggcggcggaggaacgagagggagaggcggaaggcgagggctggcggcgtcagtggtggtggtggggccagtgccgggatgggcgtcggcggggacgtctggtgcacgccgggcataccgttcgccgccgaggcctcttcggtggactgcgtggtggcgccgcaccatacggtggccgcgcgccgccgcgccgaggccgacaggccgcggagagagatgatgttccagacaaggatgttattgggaagaatgggtatttatgatcagtatcaggattggcgcctcgatgtcgacaacatgacatatgaggagttgctcgatcttgaggaccggattggatatgtaagtacagggcttcgtgaggacgagatcattcaaagccttaggatggtaaagtactccgcgttcaaccccagacatttttctacggaaatggacaggagatgtagcatctgtcaagaagagttcgaagtacacgaggaaactgggaagctgagctgtggccacagctatcacgtgcactgcataaagcagtggctttctcggaagaacgcttgtccggtttgcaagaccactgtctcgaagacctgaagtccctattctttctagtgtctgaaccacactttcattaagtataatccaattgaaatgcaaaagattagttctattgttgctgtacagtccagcagccgtctgcacgcacgcttgttgagtacagtatctagtacacgcacgcttgctgtacacacatgatcctagtatttatttgcatatggaacttacaatttttttc

SEQ ID NO: 19788 - protein, 316 aa, Zea mays subsp. mays
  peptide (1)..(316): Ceres Seq. ID no. 12454846
MARDGGSRGSPGAERRRVALRALLASGGAEAEAARTSSKGLLRGLRCTSAAASQAIAPEIPRPPADWRGLGCAAAAQAHAPAAAVEAARPTADWRRLGCAAGAAPAVQAQAPRRSEEWRVRRRRNERERRKARAGGVSGGGGASAGMGVGGDVWCTPGIPFAAEASSVDCVVAPHHTVAARRRAEADRPRREMMFQTRMLLGRMGIYDQYQDWRLDVDNMTYEELLDLEDRIGYVSTGLREDEIIQSLRMVKYSAFNPRHFSTEMDRRCSICQEEFEVHEETGKLSCGHSYHVHCIKQWLSRKNACPVCKTTVSKT

SEQ ID NO: 19789 - protein, 251 aa, Zea mays subsp. mays
  peptide (1)..(251): Ceres Seq. ID no. 12454847
LSLQFNFRLSESSPHLPATEEAEAHERDAATAREEEEAKSNRTLNGSRRRQQRVTGGGAAAGGAACPPRVGWRGGGGREDVEQGPATRPSVHVRGRIAGYRAGDPAASGGLARTRLRRGGPGARAGCRGGSGPAHGGLAQAWVRGWSGTGGPGSSAPAFRGVAREAAEEREGEAEGEGWRRQWWWWGQCRDGRRRGRLVHAGHTVRRRGLFGGLRGGAAPYGGRAPPRRGRQAAERDDVPDKDVIGKNGYL

SEQ ID NO: 19790 - protein, 170 aa, Zea mays subsp. mays
  peptide (1)..(170): Ceres Seq. ID no. 12454848
MGVGGDVWCTPGIPFAAEASSVDCVVAPHHTVAARRRAEADRPRREMMFQTRMLLGRMGIYDQYQDWRLDVDNMTYEELLDLEDRIGYVSTGLREDEIIQSLRMVKYSAFNPRHFSTEMDRRCSICQEEFEVHEETGKLSCGHSYHVHCIKQWLSRKNACPVCKTTVSKT

SEQ ID NO: 19791 - DNA, 1600 bp, Zea mays subsp. mays
  misc_feature (1)..(1600): Ceres Seq. ID no. 12364490
  misc_feature (1)..(1600): Ortholog of  Ceres SEQ ID NO 15177285 as cited in SEQ ID NO 52481
  misc_feature (1)..(1600): Ortholog of  Ceres SEQ ID NO 13594068 as cited in SEQ ID NO 58624
gcacgagaccattacctagaacatcctaatcgaaaacccagacccagagcttctcttctcaaaagatgcaggagcaggacgtggacgatggcggcggcaggacgacccagcagcaggagaagtcgatcgacgactggctccctatcaactcctccaggaaggccaagtggtggtactccgccttccacaatgtcaccgccatggtcggcgccggcgtgctcggcctcccctacgccatgtccgagcttggctggggccctggcatcgcggtgatgatcctgtcgtggataatcaccctatacacgctatggcagatggtggagatgcacgagatggtgcctgggaagcggttcgaccggtaccacgagctcgggcagcacgtcttcggcgacaggctgggcctctggatcgtggtgccgcagcagctggcagtagaggtgagcctgaacatcatctacatggtcaccggcggccagtccctcaagaagttccacgacgtcatctgcgacggcggcaggtgcggcggcgacttgaagctctcctacttcatcatgatcttcgcctccgtccacctggtcctctcccagctccccaacttcaactccatctccgccgtgtcgctcgccgccgccgtcatgtcgctcagttactccaccattgcgtggggcgcgtcgctgcacagagggaggagagaggacgtggactaccacctgcgcgccacgaccaccccagggaaggtgttcggcttcctgggaggcctaggggacgtggcgttcgcctactcggggcacaacgtggtgctggagatccaggccaccatcccgtccacgccggacaagccgtccaagaaggccatgtggaagggcgcctttgtcgcctacgtcgtcgtcgccatctgctacttccccgtcacgttcgtcgggtactgggccttcggcagcggcgtcgacgagaacatcctcatcacgctctccaagcccaagtggctcattgccctcgccaacatgatggtcgtcgtccatgtcattggcagttaccaggtttatgccatgccggtgtttgacatgatagagacggtgctggtcaagaaaatgaggttcgctccgagcctcacgctccgtcttattgcccggagcgtctatgttgcgttcacaatgtttctaggcatcactttccccttcttcggtggattgctcagtttcttcggcggattagccttcgcaccgacaacttattttcttccctgcatcatgtggctcaaggtttacaagcccaaacggttcggcctttcatggttcatcaactggatctgcatcgttattggagtgctgctgttgattctgggtccgataggagggctccggcagatcattttgtcagccaccacatacaaattctaccagtaaaatcgatcaactggagtcgtatggcgtggctgttttgttagcattacatttcttagggtggattggcttttaatgtacacgagcgagtgagattgatgctagtagctcctaggagtatatatatttctatcatccacagagcttaatgtatcttgtagttgggacattaaaagagcaagtaggctttactcgct

SEQ ID NO: 19792 - protein, 446 aa, Zea mays subsp. mays
  peptide (1)..(446): Ceres Seq. ID no. 12364491
MQEQDVDDGGGRTTQQQEKSIDDWLPINSSRKAKWWYSAFHNVTAMVGAGVLGLPYAMSELGWGPGIAVMILSWIITLYTLWQMVEMHEMVPGKRFDRYHELGQHVFGDRLGLWIVVPQQLAVEVSLNIIYMVTGGQSLKKFHDVICDGGRCGGDLKLSYFIMIFASVHLVLSQLPNFNSISAVSLAAAVMSLSYSTIAWGASLHRGRREDVDYHLRATTTPGKVFGFLGGLGDVAFAYSGHNVVLEIQATIPSTPDKPSKKAMWKGAFVAYVVVAICYFPVTFVGYWAFGSGVDENILITLSKPKWLIALANMMVVVHVIGSYQVYAMPVFDMIETVLVKKMRFAPSLTLRLIARSVYVAFTMFLGITFPFFGGLLSFFGGLAFAPTTYFLPCIMWLKVYKPKRFGLSWFINWICIVIGVLLLILGPIGGLRQIILSATTYKFYQ

SEQ ID NO: 19793 - protein, 401 aa, Zea mays subsp. mays
  peptide (1)..(401): Ceres Seq. ID no. 12364492
MVGAGVLGLPYAMSELGWGPGIAVMILSWIITLYTLWQMVEMHEMVPGKRFDRYHELGQHVFGDRLGLWIVVPQQLAVEVSLNIIYMVTGGQSLKKFHDVICDGGRCGGDLKLSYFIMIFASVHLVLSQLPNFNSISAVSLAAAVMSLSYSTIAWGASLHRGRREDVDYHLRATTTPGKVFGFLGGLGDVAFAYSGHNVVLEIQATIPSTPDKPSKKAMWKGAFVAYVVVAICYFPVTFVGYWAFGSGVDENILITLSKPKWLIALANMMVVVHVIGSYQVYAMPVFDMIETVLVKKMRFAPSLTLRLIARSVYVAFTMFLGITFPFFGGLLSFFGGLAFAPTTYFLPCIMWLKVYKPKRFGLSWFINWICIVIGVLLLILGPIGGLRQIILSATTYKFYQ

SEQ ID NO: 19794 - protein, 389 aa, Zea mays subsp. mays
  peptide (1)..(389): Ceres Seq. ID no. 12364493
MSELGWGPGIAVMILSWIITLYTLWQMVEMHEMVPGKRFDRYHELGQHVFGDRLGLWIVVPQQLAVEVSLNIIYMVTGGQSLKKFHDVICDGGRCGGDLKLSYFIMIFASVHLVLSQLPNFNSISAVSLAAAVMSLSYSTIAWGASLHRGRREDVDYHLRATTTPGKVFGFLGGLGDVAFAYSGHNVVLEIQATIPSTPDKPSKKAMWKGAFVAYVVVAICYFPVTFVGYWAFGSGVDENILITLSKPKWLIALANMMVVVHVIGSYQVYAMPVFDMIETVLVKKMRFAPSLTLRLIARSVYVAFTMFLGITFPFFGGLLSFFGGLAFAPTTYFLPCIMWLKVYKPKRFGLSWFINWICIVIGVLLLILGPIGGLRQIILSATTYKFYQ

SEQ ID NO: 19795 - DNA, 1046 bp, Zea mays subsp. mays; identical to SEQ ID NO: 8061
  misc_feature (1)..(1046): Ceres Seq. ID no. 12345398
  misc_feature (1)..(1046): Ortholog of  Ceres SEQ ID NO 15172948 as cited in SEQ ID NO 51777
  misc_feature (1)..(1046): Ortholog of  Ceres SEQ ID NO 12784416 as cited in SEQ ID NO 61324

SEQ ID NO: 19796 - protein, 248 aa, Zea mays subsp. mays; identical to SEQ ID NO: 8062
  peptide (1)..(248): Ceres Seq. ID no. 12345399

SEQ ID NO: 19797 - protein, 201 aa, Zea mays subsp. mays; identical to SEQ ID NO: 8063
  peptide (1)..(201): Ceres Seq. ID no. 12345400

SEQ ID NO: 19798 - DNA, 1729 bp, Zea mays subsp. mays
  misc_feature (1)..(1729): Ceres Seq. ID no. 12381747
  misc_feature (1)..(1729): Ortholog of  Ceres SEQ ID NO 14304573 as cited in SEQ ID NO 53242
  misc_feature (1)..(1729): Ortholog of  Ceres SEQ ID NO 15171148 as cited in SEQ ID NO 58167
gcacgagaccattacctagaacatcctaatcgaaaagattgattgattgggttcctggcgttagtttgcgcgattcgggcagaggagtagacggttccagcaaatttggtccaacaattctttgtttggccgcttgggctccggtctctcgattcttcgtagcttggtgggagggcgccggatccagcggccatcatggttgtcgacacggtcagcgcgagcacctccataatagccccccacctgttcgaccacaggtccaggggcgccggcgcttcccaccaccacctccgccggacgttccatgtcgtcgcctgccgacccctgcccaccgccttcgccggccgccgcctcgtggcccgggtcaccaggcagccgtcgtcgcgcctcgccgattggccggtcagggcgctggctatgggggtcacgaaggaggtcagggccagccctcgcagggagtaccgggggatccccggggatggtggagacatgggggacgttggggtcaccagccccacgccgtcatggcctccgcggaacagggcagatgaccccaagctgcataacccgctgctccgcctcgagcgcatgggctgcgggtggctcggcgtcatcttcgagtgggagggggtcatcgttgaggatgatgccgaattggaaaggcaggcgtggttgaccctggcacaggaggagggcaagtcgccgcctcccgcttttctgttgcggagagtcgaagggatgaagaacgagcaggcgatttctgaggttctctgctggtctcgggatccctccgagcttaggagattggccctgaggaaggacgagatccacagcagccttcgaggtggctcctaccaccagatgaggaacggttccagggagttcatgagcacgctcgccaattacaagatccctatcgctgtggtgaccacacgcccacggaaggttattgaggaagccattgaagctgtaggcgtgcgcagcttcttcgatgcggttgtgacagcagaagacgtgtaccggggcaagcctgacccagaaatgttcctgtacgctgctcagcttctcagtttcatcccggagaggtgcatcgtgtttgggaactccaattcggcggtggaagctgcgcatgacgcacgtatgaagtgtgtcgcggtcgcaagcaagcacaagatctacgagcttagcgctgcagaccttgtggtgaagcaactagacgagctatccgtcgttgacttgaagaaccttgctgatattgagtccccggagtttggcatggaacctgaaccagagatggaggaggaggaagtgcccccaccatcgacgtctgtgggtatagatgatctattctggtaagagaccaaattgtacatttgattgattcctctccagaacacagatgtattgttgtcaactgtcatagtgatcagaaagaagggcttatcatccttctgtaatcagtagaatgtgatatgtaaaaaatgttgtctagagctcacacactgtatatacatactcagaaagaaagctgggaactgaatatatgaatcagaacatttgaatctgcagttcctgaaacaatgtaacaccacaaggtttctgtcgccgaatcagtattccggatgctgattatattgttctctgcagtcttcttgccaaaaaaaaaaaaaaaaaaaaaaaaaaaaaaagaaaaaaaaaaaaaaaaaacggcacgagaagccggcacgag

SEQ ID NO: 19799 - protein, 386 aa, Zea mays subsp. mays
  peptide (1)..(386): Ceres Seq. ID no. 12381748
MVVDTVSASTSIIAPHLFDHRSRGAGASHHHLRRTFHVVACRPLPTAFAGRRLVARVTRQPSSRLADWPVRALAMGVTKEVRASPRREYRGIPGDGGDMGDVGVTSPTPSWPPRNRADDPKLHNPLLRLERMGCGWLGVIFEWEGVIVEDDAELERQAWLTLAQEEGKSPPPAFLLRRVEGMKNEQAISEVLCWSRDPSELRRLALRKDEIHSSLRGGSYHQMRNGSREFMSTLANYKIPIAVVTTRPRKVIEEAIEAVGVRSFFDAVVTAEDVYRGKPDPEMFLYAAQLLSFIPERCIVFGNSNSAVEAAHDARMKCVAVASKHKIYELSAADLVVKQLDELSVVDLKNLADIESPEFGMEPEPEMEEEEVPPPSTSVGIDDLFW

SEQ ID NO: 19800 - protein, 312 aa, Zea mays subsp. mays
  peptide (1)..(312): Ceres Seq. ID no. 12381749
MGVTKEVRASPRREYRGIPGDGGDMGDVGVTSPTPSWPPRNRADDPKLHNPLLRLERMGCGWLGVIFEWEGVIVEDDAELERQAWLTLAQEEGKSPPPAFLLRRVEGMKNEQAISEVLCWSRDPSELRRLALRKDEIHSSLRGGSYHQMRNGSREFMSTLANYKIPIAVVTTRPRKVIEEAIEAVGVRSFFDAVVTAEDVYRGKPDPEMFLYAAQLLSFIPERCIVFGNSNSAVEAAHDARMKCVAVASKHKIYELSAADLVVKQLDELSVVDLKNLADIESPEFGMEPEPEMEEEEVPPPSTSVGIDDLFW

SEQ ID NO: 19801 - protein, 288 aa, Zea mays subsp. mays
  peptide (1)..(288): Ceres Seq. ID no. 12381750
MGDVGVTSPTPSWPPRNRADDPKLHNPLLRLERMGCGWLGVIFEWEGVIVEDDAELERQAWLTLAQEEGKSPPPAFLLRRVEGMKNEQAISEVLCWSRDPSELRRLALRKDEIHSSLRGGSYHQMRNGSREFMSTLANYKIPIAVVTTRPRKVIEEAIEAVGVRSFFDAVVTAEDVYRGKPDPEMFLYAAQLLSFIPERCIVFGNSNSAVEAAHDARMKCVAVASKHKIYELSAADLVVKQLDELSVVDLKNLADIESPEFGMEPEPEMEEEEVPPPSTSVGIDDLFW

SEQ ID NO: 19802 - DNA, 1577 bp, Zea mays subsp. mays; identical to SEQ ID NO: 10465
  misc_feature (1)..(1577): Ceres Seq. ID no. 12595047
  misc_feature (1)..(1577): Ortholog of  Ceres SEQ ID NO 15177750 as cited in SEQ ID NO 57772
  misc_feature (1)..(1577): Ortholog of  Ceres SEQ ID NO 13596581 as cited in SEQ ID NO 62420
  misc_feature (1)..(1577): Ortholog of  Ceres SEQ ID NO 13591273 as cited in SEQ ID NO 65904
  misc_feature (1)..(1577): Ortholog of  Ceres SEQ ID NO 13623086 as cited in SEQ ID NO 0

SEQ ID NO: 19803 - protein, 421 aa, Zea mays subsp. mays; identical to SEQ ID NO: 10466
  peptide (1)..(421): Ceres Seq. ID no. 12595048

SEQ ID NO: 19804 - protein, 379 aa, Zea mays subsp. mays; identical to SEQ ID NO: 10467
  peptide (1)..(379): Ceres Seq. ID no. 12595049

SEQ ID NO: 19805 - protein, 345 aa, Zea mays subsp. mays; identical to SEQ ID NO: 10468
  peptide (1)..(345): Ceres Seq. ID no. 12595050

SEQ ID NO: 19806 - DNA, 2763 bp, Zea mays subsp. mays; identical to SEQ ID NO: 19641
  misc_feature (1)..(2763): Ceres Seq. ID no. 13635181
  misc_feature (1)..(2763): Ortholog of  Ceres SEQ ID NO 13598926 as cited in SEQ ID NO 0

SEQ ID NO: 19807 - protein, 814 aa, Zea mays subsp. mays; identical to SEQ ID NO: 19642
  peptide (1)..(814): Ceres Seq. ID no. 13635182

SEQ ID NO: 19808 - protein, 677 aa, Zea mays subsp. mays; identical to SEQ ID NO: 19643
  peptide (1)..(677): Ceres Seq. ID no. 13635183

SEQ ID NO: 19809 - protein, 601 aa, Zea mays subsp. mays; identical to SEQ ID NO: 19644
  peptide (1)..(601): Ceres Seq. ID no. 13635184

SEQ ID NO: 19810 - DNA, 1795 bp, Zea mays subsp. mays
  misc_feature (1)..(1795): Ceres Seq. ID no. 12381755
  misc_feature (1)..(1795): Ortholog of  Ceres SEQ ID NO 14315196 as cited in SEQ ID NO 57698
gcacgagaccattacctagaacatcctaatcaaaactcccgatctcaccaccgcctcgcgatctcccccccgccgccatggctttctccgcgcggaggagcctcgccaccagcctgtcacaccacttctccggccgcctctacccctctatctcgcacctcgttccttcccaccacgagcactccgaccccgctccctccccctcccccgtgccgcagcctcggccccaatcgtcgcagcaatccgcaccaccgttcccctccgcgcttcctcggccgtcgagatcccgggccctggcccccttccccctccctttcgctctccacctcgcggcccaccgctactcctccgccccggcccccgactcggaggtcttggcggactccgccgccgcggcccctgtgtcggagctgctctccgatggggtggcgtcagctgccgcgtccgtctccacgccgccgttgccgtaccccggggaggtcgctgccgccgcggccgaatcatttccacccgtcgcggcgctgcagcacctgctggacgccgttcaatccttcaccggcctcaactggtgggcgactattgcgctgacgacgttgatgatccggctggcgactgtcccgctgctgatcaaccagatgaagtccatgatgaagttaaatgagatgagaccagaaattgaagccatcaatgaagagatgcgaaattcaactgatccaaggtcaatggaagtggggaaacagaaactgggggagctattccttagacatggagtgactccattgacaccattgaagggtctattcatacagggacctatatttatgagctttttctttgctatatcaaatatggttgagaaagtcccttctatgaaaggaggtggtgtgtattggtttactgatttgacaactcctgataatttattaatcctcccagtgttaacatcactgacctttttggctacagtagagcttaatatgcaagatggcatggaagggaatcatatgttaaaaccaatgaaaaagttctcccggttttttggagttttgtttgttccatttacaataggctttccaaaggcaattttcttttactgggtcacatcaaactttttctcacttgtttacggcgctgttctccggaatccggctgtaagacttttcttaaatcttcctcgcttggaatctcagcccacaactgcagaagtccagcccttaaacctatcgggcggaccagagccaagtcctggagtcgattctcctatcacagataaggaaactgagcagtcgagttctgtgctaagtcctggagtcgattctcctatagcagacaaggaatgtgagcagtcgagtcctgcggtgagtcctgaagtcaattctcctatggtggacaaggaaagtgagcagtcgagttctgtgttatgtgaccgtatcagagatcttgagatcagggctaaagcaacgggtgaatctcgagagtaaattcgtgatttgtccacatggaagtaagcaagcacatctcctttgggggtttctggtacttttttttttttgttgggagcaaaggatacccagtagcgaggtataattttgaagagtccgcggtttttcgaaatataacggcccaccatgtttccgtgaataaattggtgtagtatattggcttgtaaaatcgttgcacggtatgatataaccttgtactactagctaacattagccatgatgttccttggattaagcatattgttgctattgagcggcacacgacatgtttgtctaatatttgcttcatgcgg

SEQ ID NO: 19811 - protein, 467 aa, Zea mays subsp. mays
  peptide (1)..(467): Ceres Seq. ID no. 12381756
MAFSARRSLATSLSHHFSGRLYPSISHLVPSHHEHSDPAPSPSPVPQPRPQSSQQSAPPFPSALPRPSRSRALAPFPLPFALHLAAHRYSSAPAPDSEVLADSAAAAPVSELLSDGVASAAASVSTPPLPYPGEVAAAAAESFPPVAALQHLLDAVQSFTGLNWWATIALTTLMIRLATVPLLINQMKSMMKLNEMRPEIEAINEEMRNSTDPRSMEVGKQKLGELFLRHGVTPLTPLKGLFIQGPIFMSFFFAISNMVEKVPSMKGGGVYWFTDLTTPDNLLILPVLTSLTFLATVELNMQDGMEGNHMLKPMKKFSRFFGVLFVPFTIGFPKAIFFYWVTSNFFSLVYGAVLRNPAVRLFLNLPRLESQPTTAEVQPLNLSGGPEPSPGVDSPITDKETEQSSSVLSPGVDSPIADKECEQSSPAVSPEVNSPMVDKESEQSSSVLCDRIRDLEIRAKATGESRE

SEQ ID NO: 19812 - protein, 294 aa, Zea mays subsp. mays
  peptide (1)..(294): Ceres Seq. ID no. 12381757
MIRLATVPLLINQMKSMMKLNEMRPEIEAINEEMRNSTDPRSMEVGKQKLGELFLRHGVTPLTPLKGLFIQGPIFMSFFFAISNMVEKVPSMKGGGVYWFTDLTTPDNLLILPVLTSLTFLATVELNMQDGMEGNHMLKPMKKFSRFFGVLFVPFTIGFPKAIFFYWVTSNFFSLVYGAVLRNPAVRLFLNLPRLESQPTTAEVQPLNLSGGPEPSPGVDSPITDKETEQSSSVLSPGVDSPIADKECEQSSPAVSPEVNSPMVDKESEQSSSVLCDRIRDLEIRAKATGESRE

SEQ ID NO: 19813 - protein, 281 aa, Zea mays subsp. mays
  peptide (1)..(281): Ceres Seq. ID no. 12381758
MKSMMKLNEMRPEIEAINEEMRNSTDPRSMEVGKQKLGELFLRHGVTPLTPLKGLFIQGPIFMSFFFAISNMVEKVPSMKGGGVYWFTDLTTPDNLLILPVLTSLTFLATVELNMQDGMEGNHMLKPMKKFSRFFGVLFVPFTIGFPKAIFFYWVTSNFFSLVYGAVLRNPAVRLFLNLPRLESQPTTAEVQPLNLSGGPEPSPGVDSPITDKETEQSSSVLSPGVDSPIADKECEQSSPAVSPEVNSPMVDKESEQSSSVLCDRIRDLEIRAKATGESRE

SEQ ID NO: 19814 - DNA, 2022 bp, Zea mays subsp. mays
  misc_feature (1)..(2022): Ceres Seq. ID no. 12378252
  misc_feature (1)..(2022): Ortholog of  Ceres SEQ ID NO 12779893 as cited in SEQ ID NO 66238
gcacgagaccattacctagaacatcctaatcaaaaacccggccgatcccgcacccctgactgtcagccgcgatccgctcttgtaggctccctccctctccgacccgcgtctccctcctcccactccactgctcctggtctctctctctctctccttctcctccccccgtccgtggccggagatcgacggtttccattttccagatcgcagttcattcagttgctctgttacctttacacggtctgcatgcctctattgtgtctgcagttttgcgtgcagcggcggagcaggagagatggcgtcggaggccaaggacgtgggcatcctcgccatggacatctacttcccgcccaactgcgtgctccaggaagagttggaaacacatgatggcgtgagcaaagggaagtataccattgggcttgggcaggaaagtatggcattttgcactgaagttgaggatgttatttcgatgagcttgacagtggtgaagtccctcctgaaaaattataacattgacccaatgtgcattggacgtttggaagttggcagtgaaacagtaatagacaagagcaagtctataaagacatggctgatgcagatatttgaggaatctggcaatactgatattgaaggagttgactcctctaatgcatgttatggtggaacagctgcattgtttaattgtgttaactgggttgaaagcaagtcatgggatggtcgctatggacttgttgtttgcacagacagtgcggtttacgctgaaggtccggctcgccctactggtggtgcggctgctattgcaatgctgattggaccaaatgctcctatttgttttgaaagtaaatatagaggatctcatatggcccatgtatacgacttttacaagcccgatcttgcgagtgaatatccggtggttgatgggaagctatcacaaacatgctacctcatggcattggactcctgctacaatgtattttgcaaaaagtatgaaaaacatgaggggaagcagttttcaatttctgatgcagattatgttgtgttccattctccatacaacaagcttgtacagaaaagcttcgctcgtttgtactacaatgatttcttgagaaactgcagcacggttgatggagagtcaagggaaaaattggcaccctatgcaggcttgtcatctgaagaaagctaccagagtcgcgaccttgaaaaggcatctcagcaagtcgccaagaatctgtacgagaccaaggttcagccaacaacattgatcccaaaacaagttgggaatatgtatacagcatcactctacgcagctcttgcatcggttgtccatagtaggcatgaaactctggcaggccagaggattgttatgttttcgtatggcagtgggttgacatcaacaatgttctctttcatgattaatgaaggccatcaccctttcagtctgctaaacatcgcaaacatactggatatttccaagaagctgaaggcaaggcacgtggttcccccagagaaatttgtggaggcactgaaactgatggagcaccgctatggggcaagagatttcgtgacgaatcaagatacaagtctgctatccgcaggcacatactatctcacgcacgttgactccaagtacagaaggttctacgacgtgaaaggtgacggtgtcgccactgcaatgtccaacggccactgatctttcttctgcccgaagctgcaacaagtcaaataacagaggcaagtgtcctaagcatccttagattattatatctattaagaggggaagctcgagttatagattaatctatgcccagctgtaaggttgtaaagttagttagagctgcgcatgcttgtttagtaaaagctctgctgctcttcagttatttagcgaatcaagcacactgctgggctaataagaattgtaaacaataatctgcagaatcactggctacatccaggttatgctgatgaatgcacgatttcatgtttaacacgatcaatgcatctggttacatccaggttatgctg

SEQ ID NO: 19815 - protein, 464 aa, Zea mays subsp. mays
  peptide (1)..(464): Ceres Seq. ID no. 12378253
MASEAKDVGILAMDIYFPPNCVLQEELETHDGVSKGKYTIGLGQESMAFCTEVEDVISMSLTVVKSLLKNYNIDPMCIGRLEVGSETVIDKSKSIKTWLMQIFEESGNTDIEGVDSSNACYGGTAALFNCVNWVESKSWDGRYGLVVCTDSAVYAEGPARPTGGAAAIAMLIGPNAPICFESKYRGSHMAHVYDFYKPDLASEYPVVDGKLSQTCYLMALDSCYNVFCKKYEKHEGKQFSISDADYVVFHSPYNKLVQKSFARLYYNDFLRNCSTVDGESREKLAPYAGLSSEESYQSRDLEKASQQVAKNLYETKVQPTTLIPKQVGNMYTASLYAALASVVHSRHETLAGQRIVMFSYGSGLTSTMFSFMINEGHHPFSLLNIANILDISKKLKARHVVPPEKFVEALKLMEHRYGARDFVTNQDTSLLSAGTYYLTHVDSKYRRFYDVKGDGVATAMSNGH

SEQ ID NO: 19816 - protein, 452 aa, Zea mays subsp. mays
  peptide (1)..(452): Ceres Seq. ID no. 12378254
MDIYFPPNCVLQEELETHDGVSKGKYTIGLGQESMAFCTEVEDVISMSLTVVKSLLKNYNIDPMCIGRLEVGSETVIDKSKSIKTWLMQIFEESGNTDIEGVDSSNACYGGTAALFNCVNWVESKSWDGRYGLVVCTDSAVYAEGPARPTGGAAAIAMLIGPNAPICFESKYRGSHMAHVYDFYKPDLASEYPVVDGKLSQTCYLMALDSCYNVFCKKYEKHEGKQFSISDADYVVFHSPYNKLVQKSFARLYYNDFLRNCSTVDGESREKLAPYAGLSSEESYQSRDLEKASQQVAKNLYETKVQPTTLIPKQVGNMYTASLYAALASVVHSRHETLAGQRIVMFSYGSGLTSTMFSFMINEGHHPFSLLNIANILDISKKLKARHVVPPEKFVEALKLMEHRYGARDFVTNQDTSLLSAGTYYLTHVDSKYRRFYDVKGDGVATAMSNGH

SEQ ID NO: 19817 - protein, 418 aa, Zea mays subsp. mays
  peptide (1)..(418): Ceres Seq. ID no. 12378255
MAFCTEVEDVISMSLTVVKSLLKNYNIDPMCIGRLEVGSETVIDKSKSIKTWLMQIFEESGNTDIEGVDSSNACYGGTAALFNCVNWVESKSWDGRYGLVVCTDSAVYAEGPARPTGGAAAIAMLIGPNAPICFESKYRGSHMAHVYDFYKPDLASEYPVVDGKLSQTCYLMALDSCYNVFCKKYEKHEGKQFSISDADYVVFHSPYNKLVQKSFARLYYNDFLRNCSTVDGESREKLAPYAGLSSEESYQSRDLEKASQQVAKNLYETKVQPTTLIPKQVGNMYTASLYAALASVVHSRHETLAGQRIVMFSYGSGLTSTMFSFMINEGHHPFSLLNIANILDISKKLKARHVVPPEKFVEALKLMEHRYGARDFVTNQDTSLLSAGTYYLTHVDSKYRRFYDVKGDGVATAMSNGH

SEQ ID NO: 19818 - DNA, 484 bp, Zea mays subsp. mays
  misc_feature (1)..(484): Ceres Seq. ID no. 4613578
  misc_feature (1)..(484): Ortholog of  Ceres SEQ ID NO 14303185 as cited in SEQ ID NO 67203
gctccagtctagacggcggtttgacttttcgaccggggaaataggcgctgcgtttgatttgaggaggcgacacgagacgggacgggagggatctcttcgctggaggctggagcgttgcccgattcgtcgcggttctcggacaagggaggagggagggcgcacctcgggctccgatcgaagagctttgttaacattagagattgaaaggtagcatcgtagcaaaatgaaggcaccatcactactggttcagtgtttccctggcttgcttcccagcaaggccactagttgcgtgccaattgtatctgagaaggatctgcagctaccatcaccagctgttgaaataatcccctcaaagagtgttcatccatacaaatatgctggagagaaggttgatgtgcaaggtcttaatattttcaagggtaaagtcagtgtagcagatatgatagttatctcaccttctgaagtagcatcatcaaaatatgat

SEQ ID NO: 19819 - protein, 87 aa, Zea mays subsp. mays
  peptide (1)..(87): Ceres Seq. ID no. 4613579
MKAPSLLVQCFPGLLPSKATSCVPIVSEKDLQLPSPAVEIIPSKSVHPYKYAGEKVDVQGLNIFKGKVSVADMIVISPSEVASSKYD

SEQ ID NO: 19820 - protein, 69 aa, Zea mays subsp. mays
  peptide (1)..(69): Ceres Seq. ID no. 4613580
LQSRRRFDFSTGEIGAAFDLRRRHETGREGSLRWRLERCPIRRGSRTREEGGRTSGSDRRALLTLEIER

SEQ ID NO: 19821 - DNA, 1692 bp, Zea mays subsp. mays
  misc_feature (1)..(1692): Ceres Seq. ID no. 12383532
  misc_feature (1)..(1692): Ortholog of  Ceres SEQ ID NO 15176423 as cited in SEQ ID NO 53228
gcacgagaccattacctagaacatcctaatcgaaaagccgccgccgcaaacgtcgcccccgaccgaagcctagccaccaccaccagcaccagcaacctcgcgtagcagcgctcgacaccgctggacgccccgcgcccgcgcgaaagcaggaccttgattctgtcgttggcgataccatggatgtgtcctacgagaagtgtgctgatccgtcgaactcggacctgcctagcgctgttgttgatggctgagcgatacgacgatggcggctccgaacacctgggatctgctgtagtagagggagctattggaaacgaagggaattcggggaccgaaagttccgagcagactggtgatgagcgcgctggaggaggtgaaggctctcctgttgatgtcgaaaacagcgctgataaacaagagagccaggagacgacggttccgatggaagaaacagaaacgagcgacggcacctcgatcacgtcgatggaggatgccctggaaccgaaccgtcatcacgatctcccgtcggagcctgaggatgtgggcaaccacactcctgatcctgatcactccagcggcaagaactccaaaggaaacagtagcgtgttccagagcgcaaggagggtgctggcttcaaccaataagaaaactccatctgcaactgcacggaagccactgcagttgactaacagaggtaaccaggatgacgcgaaatcgtcggctggaaaggccgccacggttccatcaggcccggttttccgctgtactgaacgggccgagaagcgcagagaattttatatgaagctggaggagaagcatcaagctatggaggaagagaagattcagttggaggctaagttgaagaaagagcaggaggaggcactgaagcagctgaggaagagcctgaccttcaaagccaaccccatgccgagcttctaccacgaggcgacgccgtccccgaaggccgagttcaagaagctgcccacgacccggcccaagtcgcccaagctgggcaggaggaagacggcctcgacctccatggagacgtccaactcgtcgtcggagagcgagggcacgaggccgtgctgccgcgccagccgcgacggcctcgacagcagctgcagatgcggcggcaggagcaggccgcaggccgcgaacgccaagccggccgccgggcccaagaagccgccgccgcagcagcagcagccgaaacaccgcgcccacaagatcgccggcgagggcgccatcaacatcgccgtgcactagccgccgccgccgcttcttgaaacttctttccggtcgcatgcatgcaggacgatggcgatggcgtgcggattttccttctaagttatgagagtgctttgtcggcttgtggatttggtgtagataataatataagttatggtgacgacgaacgaacaggggctgctgccacgagtgaggccggtcagtcagacagaggtggtggtgtttattgcttgcttgcttgtttgtctgtttgtttgtttatttatgctaatcttatttatttaatctgctgtcgaggatggcctgcgcattgccactgtgcaggcgctgcttgttttttcgtcttcttaatttatggggagtggtaagagagacttgagcgctggatgtaacgtgtacaaacgaaaacgaaggcttgctggtggtggtgatggaggattttatctg

SEQ ID NO: 19822 - protein, 360 aa, Zea mays subsp. mays
  peptide (1)..(360): Ceres Seq. ID no. 12383533
MCPTRSVLIRRTRTCLALLLMAERYDDGGSEHLGSAVVEGAIGNEGNSGTESSEQTGDERAGGGEGSPVDVENSADKQESQETTVPMEETETSDGTSITSMEDALEPNRHHDLPSEPEDVGNHTPDPDHSSGKNSKGNSSVFQSARRVLASTNKKTPSATARKPLQLTNRGNQDDAKSSAGKAATVPSGPVFRCTERAEKRREFYMKLEEKHQAMEEEKIQLEAKLKKEQEEALKQLRKSLTFKANPMPSFYHEATPSPKAEFKKLPTTRPKSPKLGRRKTASTSMETSNSSSESEGTRPCCRASRDGLDSSCRCGGRSRPQAANAKPAAGPKKPPPQQQQPKHRAHKIAGEGAINIAVH

SEQ ID NO: 19823 - protein, 340 aa, Zea mays subsp. mays
  peptide (1)..(340): Ceres Seq. ID no. 12383534
MAERYDDGGSEHLGSAVVEGAIGNEGNSGTESSEQTGDERAGGGEGSPVDVENSADKQESQETTVPMEETETSDGTSITSMEDALEPNRHHDLPSEPEDVGNHTPDPDHSSGKNSKGNSSVFQSARRVLASTNKKTPSATARKPLQLTNRGNQDDAKSSAGKAATVPSGPVFRCTERAEKRREFYMKLEEKHQAMEEEKIQLEAKLKKEQEEALKQLRKSLTFKANPMPSFYHEATPSPKAEFKKLPTTRPKSPKLGRRKTASTSMETSNSSSESEGTRPCCRASRDGLDSSCRCGGRSRPQAANAKPAAGPKKPPPQQQQPKHRAHKIAGEGAINIAVH

SEQ ID NO: 19824 - protein, 274 aa, Zea mays subsp. mays
  peptide (1)..(274): Ceres Seq. ID no. 12383535
MEETETSDGTSITSMEDALEPNRHHDLPSEPEDVGNHTPDPDHSSGKNSKGNSSVFQSARRVLASTNKKTPSATARKPLQLTNRGNQDDAKSSAGKAATVPSGPVFRCTERAEKRREFYMKLEEKHQAMEEEKIQLEAKLKKEQEEALKQLRKSLTFKANPMPSFYHEATPSPKAEFKKLPTTRPKSPKLGRRKTASTSMETSNSSSESEGTRPCCRASRDGLDSSCRCGGRSRPQAANAKPAAGPKKPPPQQQQPKHRAHKIAGEGAINIAVH

SEQ ID NO: 19825 - DNA, 466 bp, Zea mays subsp. mays
  misc_feature (1)..(466): Ceres Seq. ID no. 6410186
  misc_feature (1)..(466): Ortholog of  Ceres SEQ ID NO 12583413 as cited in SEQ ID NO 56816
  misc_feature (1)..(466): Ortholog of  Ceres SEQ ID NO 15168480 as cited in SEQ ID NO 57927
  misc_feature (1)..(466): Ortholog of  Ceres SEQ ID NO 15177738 as cited in SEQ ID NO 0
atccatccgtagcgttccattccattccatctccctcctcgcctacggcttcttccaccgcggcatcgtgcccggcctctgcttcggcgcgggcctggggattacgctgttcggcatggcctacatgttcgtccacgacggcctggtccaccgccgctttccggtcggccccatcgccgacgtgccctacttccgccgagtggctgcctcgcacaagatacaccacatggacaagttcggcggcgtcccgtatgggctcttcctgggaccaaaggagctggaggaggttggtggcctggacgagcttgttagcagtccggtgagtgaagctactgatactgaagacgcaggagaagaaaagacgcgtccagttgtatgcgttgtccgaacaagcgtgttcatgggccagagtgtgccaaatgagttctagctttaggcgagtgggccaaatgagtgtgggctgcgt

SEQ ID NO: 19826 - protein, 142 aa, Zea mays subsp. mays
  peptide (1)..(142): Ceres Seq. ID no. 6410187
SIRSVPFHSISLLAYGFFHRGIVPGLCFGAGLGITLFGMAYMFVHDGLVHRRFPVGPIADVPYFRRVAASHKIHHMDKFGGVPYGLFLGPKELEEVGGLDELVSSPVSEATDTEDAGEEKTRPVVCVVRTSVFMGQSVPNEF

SEQ ID NO: 19827 - protein, 106 aa, Zea mays subsp. mays
  peptide (1)..(106): Ceres Seq. ID no. 6410188
PSVAFHSIPSPSSPTASSTAASCPASASARAWGLRCSAWPTCSSTTAWSTAAFRSAPSPTCPTSAEWLPRTRYTTWTSSAASRMGSSWDQRSWRRLVAWTSLLAVR

SEQ ID NO: 19828 - protein, 104 aa, Zea mays subsp. mays; identical to SEQ ID NO: 14802
  peptide (1)..(104): Ceres Seq. ID no. 6410189

SEQ ID NO: 19829 - DNA, 468 bp, Zea mays subsp. mays
  misc_feature (1)..(468): Ceres Seq. ID no. 2112893
  misc_feature (1)..(468): Ortholog of  Ceres SEQ ID NO 14311136 as cited in SEQ ID NO 56694
ctttctcgcttgctcactcgcgtcgacgactgggctaccggcgcctccacccttcggcctgggtkgttctttsgccggtcgacgagcgcacaccagggtacagtacgtattgctcgtgatttgtgtaactacggagcaagctgcatacagcacaagatagaagatgggtatccttgagaggatcaaggagattgaggccgagatggctcggactcagaaaaataaagcaacagaatatcatcttggacaactgaaggcaaaactagcaaagttgaggacacaactattagagcctccaaagggttccagcggaggtggagatggttttgaagtcacaaagtttgggcatggtcgtgttgctcttattggatttcccagtgttggaaagtcaactcttttaacgatgttgactgggacacattctgaagctgcatcatatgagttcacaacgcttacttgcattcctgg

SEQ ID NO: 19830 - protein, 101 aa, Zea mays subsp. mays
  peptide (1)..(101): Ceres Seq. ID no. 2112894
MGILERIKEIEAEMARTQKNKATEYHLGQLKAKLAKLRTQLLEPPKGSSGGGDGFEVTKFGHGRVALIGFPSVGKSTLLTMLTGTHSEAASYEFTTLTCIP

SEQ ID NO: 19831 - protein, 88 aa, Zea mays subsp. mays
  peptide (1)..(88): Ceres Seq. ID no. 2112895
MARTQKNKATEYHLGQLKAKLAKLRTQLLEPPKGSSGGGDGFEVTKFGHGRVALIGFPSVGKSTLLTMLTGTHSEAASYEFTTLTCIP

SEQ ID NO: 19832 - protein, 58 aa, Zea mays subsp. mays
  peptide (1)..(58): Ceres Seq. ID no. 2112896
  misc_feature (22)..(22): Xaa is any aa, unknown or other
  misc_feature (25)..(25): Xaa is any aa, unknown or other
LSRLLTRVDDWATGASTLRPGXFFXRSTSAHQGTVRIARDLCNYGASCIQHKIEDGYP

SEQ ID NO: 19833 - DNA, 1829 bp, Zea mays subsp. mays
  misc_feature (1)..(1829): Ceres Seq. ID no. 12435597
  misc_feature (1)..(1829): Ortholog of  Ceres SEQ ID NO 14313674 as cited in SEQ ID NO 59602
aacgtgcgggactggtctctcccgaataagttgtcacccacacagggcacagcttggagttttcctgattgcattaccctgtccaaactgttcttgccaggaacattattcctcctcgtgttccatcttctaaacaaactgcatcctgccatgattcgatgatcgacctcatgtcgctagcactgccctggccagcagaccggcacggcgatgcgatcggtgcacagagcggtggcgcgagtggtggtgtgggttgcggcgccggcgatgatccgcgcggggctgacgacgccggtgatgacggtgctgctggtgtcgttcctgctggagtacctgcccaagatctaccacgcggcgcgcctgctccggcggatgcagaggcagtctggctacatcttcggcaccatctggtggggcatcgcgctcaacctcatggcctacttcgtcgccgcccatgctgtgggcgcgtgctggtacctgctcggcgtccagcgggccagcaagtgcctgaaagagcagtgcctccaggcggctgggtgcgcgcgcggcagcgcggtggcctgcgcggcgccgctgtactacggcggctccccgtctcccggagtcgtcggcggcgacaggctcgcctgggccgggaacgcgcaggcccggggcacgtgcctcgccagcggcgacaactaccagtacggcgcgtacacgtggacggtgatgctggtggcgaacccgagccgggtggagcggatgctgctccccatcttctggggcctcatgacgctcagcacgttcggcaacctggagagcacgacggagtggctggagatcgtgttcaacatcatcaccatcacgggcgggctcgtcctcgtcaccatgctcatcggcaacatcaaggtgttcctgaacgcgaccacgtccaagaagcaggccatgcacacgcggctgcgcggcgtggagtggtggatgaagcgcaagaaactgccgcggagcttccgcggccgggtgcgccagttcgagcgccagcggtgggccgccacgcgcggcgtcgacgagtgccaaatcgtgcgcgacctccccgagggcctccgccgggacatcaagtaccacctctgcctcgacctcgtccgccaggtcccattcttccagcacatggacgacctcgtgctcgagaacatctgcgacagggtgaaatccctcatctttcccaagggagaaaccatcgtgagggagggcgacgtggtgcagcggatgctgttcatcgtgcggggccacctgcagtgcagccaggtgctgcggaacggcgcgacgagcagctgcacgctggggcctggcaacttcagcggcgacgagctgctgtcgtggtgcctgcgccgcccgttcctggaacgcctcccgacgtcgtcggcgacgctggtgacgctggagagcaccgaggtgttcggcctggacgccgccgacgtcaagtacgtcacgcagcacttccgctacaccttcaccaacgacaaggtgcgccgcagcgcgcgctactactcgcccggctggcgtacctgggcggccgtcgcccgttcagctggcctggaggaggtacaagcaccgcaagacgctctcatcgctctccttcatccgcccgcggcgcccgctgtcccgctgctcctcgctcggggaggagaagctccgcctgtacacggccatcctcacctcgcccaagcccaaccaggacgacgacttctagctagcttatagctaggccgttccaggccggattctcttctcctcagcgaggaggagtatatatatcaaacaacatgcatttattagtagtattcattactctc

SEQ ID NO: 19834 - protein, 523 aa, Zea mays subsp. mays
  peptide (1)..(523): Ceres Seq. ID no. 12435598
MIDLMSLALPWPADRHGDAIGAQSGGASGGVGCGAGDDPRGADDAGDDGAAGVVPAGVPAQDLPRGAPAPADAEAVWLHLRHHLVGHRAQPHGLLRRRPCCGRVLVPARRPAGQQVPERAVPPGGWVRARQRGGLRGAAVLRRLPVSRSRRRRQARLGRERAGPGHVPRQRRQLPVRRVHVDGDAGGEPEPGGADAAPHLLGPHDAQHVRQPGEHDGVAGDRVQHHHHHGRARPRHHAHRQHQGVPERDHVQEAGHAHAAARRGVVDEAQETAAELPRPGAPVRAPAVGRHARRRRVPNRARPPRGPPPGHQVPPLPRPRPPGPILPAHGRPRAREHLRQGEIPHLSQGRNHREGGRRGAADAVHRAGPPAVQPGAAERRDEQLHAGAWQLQRRRAAVVVPAPPVPGTPPDVVGDAGDAGEHRGVRPGRRRRQVRHAALPLHLHQRQGAPQRALLLARLAYLGGRRPFSWPGGGTSTARRSHRSPSSARGARCPAAPRSGRRSSACTRPSSPRPSPTRTTTSS

SEQ ID NO: 19835 - protein, 519 aa, Zea mays subsp. mays
  peptide (1)..(519): Ceres Seq. ID no. 12435599
MSLALPWPADRHGDAIGAQSGGASGGVGCGAGDDPRGADDAGDDGAAGVVPAGVPAQDLPRGAPAPADAEAVWLHLRHHLVGHRAQPHGLLRRRPCCGRVLVPARRPAGQQVPERAVPPGGWVRARQRGGLRGAAVLRRLPVSRSRRRRQARLGRERAGPGHVPRQRRQLPVRRVHVDGDAGGEPEPGGADAAPHLLGPHDAQHVRQPGEHDGVAGDRVQHHHHHGRARPRHHAHRQHQGVPERDHVQEAGHAHAAARRGVVDEAQETAAELPRPGAPVRAPAVGRHARRRRVPNRARPPRGPPPGHQVPPLPRPRPPGPILPAHGRPRAREHLRQGEIPHLSQGRNHREGGRRGAADAVHRAGPPAVQPGAAERRDEQLHAGAWQLQRRRAAVVVPAPPVPGTPPDVVGDAGDAGEHRGVRPGRRRRQVRHAALPLHLHQRQGAPQRALLLARLAYLGGRRPFSWPGGGTSTARRSHRSPSSARGARCPAAPRSGRRSSACTRPSSPRPSPTRTTTSS

SEQ ID NO: 19836 - protein, 508 aa, Zea mays subsp. mays
  peptide (1)..(508): Ceres Seq. ID no. 12435600
MRSVHRAVARVVVWVAAPAMIRAGLTTPVMTVLLVSFLLEYLPKIYHAARLLRRMQRQSGYIFGTIWWGIALNLMAYFVAAHAVGACWYLLGVQRASKCLKEQCLQAAGCARGSAVACAAPLYYGGSPSPGVVGGDRLAWAGNAQARGTCLASGDNYQYGAYTWTVMLVANPSRVERMLLPIFWGLMTLSTFGNLESTTEWLEIVFNIITITGGLVLVTMLIGNIKVFLNATTSKKQAMHTRLRGVEWWMKRKKLPRSFRGRVRQFERQRWAATRGVDECQIVRDLPEGLRRDIKYHLCLDLVRQVPFFQHMDDLVLENICDRVKSLIFPKGETIVREGDVVQRMLFIVRGHLQCSQVLRNGATSSCTLGPGNFSGDELLSWCLRRPFLERLPTSSATLVTLESTEVFGLDAADVKYVTQHFRYTFTNDKVRRSARYYSPGWRTWAAVARSAGLEEVQAPQDALIALLHPPAAPAVPLLLARGGEAPPVHGHPHLAQAQPGRRLLASL

SEQ ID NO: 19837 - DNA, 1557 bp, Zea mays subsp. mays
  misc_feature (1)..(1557): Ceres Seq. ID no. 12418577
  misc_feature (1)..(1557): Ortholog of  Ceres SEQ ID NO 14312989 as cited in SEQ ID NO 59121
  misc_feature (1)..(1557): Ortholog of  Ceres SEQ ID NO 12586556 as cited in SEQ ID NO 64667
  misc_feature (1)..(1557): Ortholog of  Ceres SEQ ID NO 14316045 as cited in SEQ ID NO 66810
  misc_feature (1)..(1557): Ortholog of  Ceres SEQ ID NO 13660894 as cited in SEQ ID NO 67475
gcacgagaccattacctagaacatcctaatcgaaaaatgaacaatttggcgctctcgatgctctcgccgtcgacctcaggtttcccgccaagtcccctaccctccaaggccgccacgaacgccacagctacccgatgccgcgccgcgccctcgggagacgcctcgctgtgcgccttccgcgcgcaccacagcgccggccacgccctccacactaacccgtctctgatgcccgcgctcgccgcctgcgcgcggctgccctccgccgtggccgaggccgagcagatccacgcactcctcgtcaagtcaggcggctcgcgggctgtctcccacgtccaagccttcacgtccctgattcgcgcctacgcgaggctcggccgcgtgtgcgacgcgcggaaggtgttcgatggaatggccgaccggacggtggtcacctggaacgtgctgcttgatgcgcttatcagagatggcgacttggacgctgcgtgggaggtgtttgtgaaaatgccgcagcgcaatgcggtttcttggaacaccataatttctggttttgcaaggaacgggtgggcgccggtggcagtggacttgtttatcgagatgactgtggcttatggtttagcgccagatgaggccacgatggttggcttcgtgtcggctgttcgggacattggtctacttgcaattgggaagagcgcacacgggtatgttctccgtcgggagttctcacttgatggtcctctcggggttgcactggtcagtatgtacacgaggtgcgggagcatgggtgctgcacacagttgcttcttaagtgtcaccaccaagaatgtggagcattggacctctttgatcgcaggtttcgcagcacatggtcaaccagagaatgccttgaggttgttcgtcgagatgaggcaggtgggcattgagcctaatggtgtcaccttcgtagccgtcttgagtgcctgcagccatggcgggctcgtcgatgagggcttcaagtacttcgacctaatgaggagcatgggcatcaggccgatgatccagcactatggctgcttggttgatctccttggccgtgctgggttcttgaaggaggctttcaatcttgccagcaatctacctgaagatcctggttttgtaatctggagctcgctactagcagcctgccgtagccatggcaacgtcgagatggcagagctcactgcgtcgaagttggcagaggcaaaaccaagtcatggcagctcgtatgtgctgctatcgaacacatatgcacgagcggaacaatgggaggactcgaagaggacgcggaggaggatggaggaacatagagtagccaagaaacctgggctcagctggatagagatagatggaagcgtacattcctttgccactgcagacaagctgcatatagaaagcgagggtatttatcatatgttggaggatttgaaacataatattacatcagctgcatatgaacctgaaccgttcgctatttctgaacaattgtaataaatttttctttggaggaagattatcacttgttaataaaaaatccatcatatc

SEQ ID NO: 19838 - protein, 500 aa, Zea mays subsp. mays
  peptide (1)..(500): Ceres Seq. ID no. 12418578
ARDHYLEHPNRKMNNLALSMLSPSTSGFPPSPLPSKAATNATATRCRAAPSGDASLCAFRAHHSAGHALHTNPSLMPALAACARLPSAVAEAEQIHALLVKSGGSRAVSHVQAFTSLIRAYARLGRVCDARKVFDGMADRTVVTWNVLLDALIRDGDLDAAWEVFVKMPQRNAVSWNTIISGFARNGWAPVAVDLFIEMTVAYGLAPDEATMVGFVSAVRDIGLLAIGKSAHGYVLRREFSLDGPLGVALVSMYTRCGSMGAAHSCFLSVTTKNVEHWTSLIAGFAAHGQPENALRLFVEMRQVGIEPNGVTFVAVLSACSHGGLVDEGFKYFDLMRSMGIRPMIQHYGCLVDLLGRAGFLKEAFNLASNLPEDPGFVIWSSLLAACRSHGNVEMAELTASKLAEAKPSHGSSYVLLSNTYARAEQWEDSKRTRRRMEEHRVAKKPGLSWIEIDGSVHSFATADKLHIESEGIYHMLEDLKHNITSAAYEPEPFAISEQL

SEQ ID NO: 19839 - protein, 488 aa, Zea mays subsp. mays
  peptide (1)..(488): Ceres Seq. ID no. 12418579
MNNLALSMLSPSTSGFPPSPLPSKAATNATATRCRAAPSGDASLCAFRAHHSAGHALHTNPSLMPALAACARLPSAVAEAEQIHALLVKSGGSRAVSHVQAFTSLIRAYARLGRVCDARKVFDGMADRTVVTWNVLLDALIRDGDLDAAWEVFVKMPQRNAVSWNTIISGFARNGWAPVAVDLFIEMTVAYGLAPDEATMVGFVSAVRDIGLLAIGKSAHGYVLRREFSLDGPLGVALVSMYTRCGSMGAAHSCFLSVTTKNVEHWTSLIAGFAAHGQPENALRLFVEMRQVGIEPNGVTFVAVLSACSHGGLVDEGFKYFDLMRSMGIRPMIQHYGCLVDLLGRAGFLKEAFNLASNLPEDPGFVIWSSLLAACRSHGNVEMAELTASKLAEAKPSHGSSYVLLSNTYARAEQWEDSKRTRRRMEEHRVAKKPGLSWIEIDGSVHSFATADKLHIESEGIYHMLEDLKHNITSAAYEPEPFAISEQL

SEQ ID NO: 19840 - protein, 481 aa, Zea mays subsp. mays
  peptide (1)..(481): Ceres Seq. ID no. 12418580
MLSPSTSGFPPSPLPSKAATNATATRCRAAPSGDASLCAFRAHHSAGHALHTNPSLMPALAACARLPSAVAEAEQIHALLVKSGGSRAVSHVQAFTSLIRAYARLGRVCDARKVFDGMADRTVVTWNVLLDALIRDGDLDAAWEVFVKMPQRNAVSWNTIISGFARNGWAPVAVDLFIEMTVAYGLAPDEATMVGFVSAVRDIGLLAIGKSAHGYVLRREFSLDGPLGVALVSMYTRCGSMGAAHSCFLSVTTKNVEHWTSLIAGFAAHGQPENALRLFVEMRQVGIEPNGVTFVAVLSACSHGGLVDEGFKYFDLMRSMGIRPMIQHYGCLVDLLGRAGFLKEAFNLASNLPEDPGFVIWSSLLAACRSHGNVEMAELTASKLAEAKPSHGSSYVLLSNTYARAEQWEDSKRTRRRMEEHRVAKKPGLSWIEIDGSVHSFATADKLHIESEGIYHMLEDLKHNITSAAYEPEPFAISEQL

SEQ ID NO: 19841 - DNA, 1463 bp, Zea mays subsp. mays
  misc_feature (1)..(1463): Ceres Seq. ID no. 12376728
  misc_feature (1)..(1463): Ortholog of  Ceres SEQ ID NO 13592961 as cited in SEQ ID NO 20522
  misc_feature (1)..(1463): Ortholog of  Ceres SEQ ID NO 12583469 as cited in SEQ ID NO 51031
  misc_feature (1)..(1463): Ortholog of  Ceres SEQ ID NO 13595998 as cited in SEQ ID NO 68161
gcacgagaccattacctagaacatcctaatcgaaaaaaccaaatgaatagccctgtgaatatataactgcgcccagaaaaccgtcgcaacgaccgcgtctcttgcgttctagtaggaagctagaatagcaggtagcgcctggtggccatggccacggcgtctgcagcttgtcatggcggggggatcgtgtactacaaggtccttccgatgagcatgttcctgctgctgctccgagggctcgtgcagccggtggcggccgcggcgtgctccgtggacgccatctacagcttcggcgactccatcgctgacacgggcaacctcctgcgcgagggccccgttggcttcttcgcctccatcggcagctacccgtacggccagaccctccgcaaacccacaggccgggtgctccgacggcctcctcatcatcgactacttcgcgatggcgctgaacctatcgctggtgagcccgtacctggacaagggagccgacttcgccagcggcgccaacttcgcggtggccggggccacggcgctggaccgggccgtgttgctgcagagcggcatcatggctccaccggcgagcgtgccgctcagctcccagctcgactggttcaaggcgcacctcaacgccaccgcctgcccctcgctacaagattgcgccaagaagctcgccggagcgctgttcttggtcggcgagatcggagggaacgactacaactacggcttcttacagggattcaggtcgatcgaggccatgaaggcctacgtgccacaggtcataaacgccataatggacgtcgccaaggaagtgatcgagctaggcgcgacccagatcgtgatcccggggaacttcccgatcgggtgctccccgagctacctctccctcttcgccgcgtccggcgacctcgacgaccggggctgcctcaggagctacaacgccttcgcccagcaccacaacgagcagctccaggcggccatcgacgggctgaggaaggccaacaccgacgtcaccgtcgtgtacgcggactactacggcgccttcatgcacctgctggaccatgcttcgctcctcgggttcgagcagggcgcgctcctgcaggcgtgctgcggggcgggcggcgcgtacaacttcaacatgaactcgatgtgcggcgcgccgggcacgacgacgtgcgcggacccggcgcgcaacgtcagctgggacggcatccacctcacgcagcaggcgtacagggccatcgcgctgtcccttctcatggaggggttcgcgcagccggatgacgccgtgcaagagatctggagctgctgacgtgcacccgttttggtttcattgggcctgtacctgctatcgatacgtatatatttttcctctagactagaattttgtacctgctattgatccatgtataggtgtttgcattgttcatatatataataataacgtgggaaattagaaatggttt

SEQ ID NO: 19842 - protein, 377 aa, Zea mays subsp. mays
  peptide (1)..(377): Ceres Seq. ID no. 12376729
MATASAACHGGGIVYYKVLPMSMFLLLLRGLVQPVAAAACSVDAIYSFGDSIADTGNLLREGPVGFFASIGSYPYGQTLRKPTGRVLRRPPHHRLLRDGAEPIAGEPVPGQGSRLRQRRQLRGGRGHGAGPGRVAAERHHGSTGERAAQLPARLVQGAPQRHRLPLATRLRQEARRSAVLGRRDRRERLQLRLLTGIQVDRGHEGLRATGHKRHNGRRQGSDRARRDPDRDPGELPDRVLPELPLPLRRVRRPRRPGLPQELQRLRPAPQRAAPGGHRRAEEGQHRRHRRVRGLLRRLHAPAGPCFAPRVRAGRAPAGVLRGGRRVQLQHELDVRRAGHDDVRGPGAQRQLGRHPPHAAGVQGHRAVPSHGGVRAAG

SEQ ID NO: 19843 - protein, 357 aa, Zea mays subsp. mays
  peptide (1)..(357): Ceres Seq. ID no. 12376730
MSMFLLLLRGLVQPVAAAACSVDAIYSFGDSIADTGNLLREGPVGFFASIGSYPYGQTLRKPTGRVLRRPPHHRLLRDGAEPIAGEPVPGQGSRLRQRRQLRGGRGHGAGPGRVAAERHHGSTGERAAQLPARLVQGAPQRHRLPLATRLRQEARRSAVLGRRDRRERLQLRLLTGIQVDRGHEGLRATGHKRHNGRRQGSDRARRDPDRDPGELPDRVLPELPLPLRRVRRPRRPGLPQELQRLRPAPQRAAPGGHRRAEEGQHRRHRRVRGLLRRLHAPAGPCFAPRVRAGRAPAGVLRGGRRVQLQHELDVRRAGHDDVRGPGAQRQLGRHPPHAAGVQGHRAVPSHGGVRAAG

SEQ ID NO: 19844 - protein, 355 aa, Zea mays subsp. mays
  peptide (1)..(355): Ceres Seq. ID no. 12376731
MFLLLLRGLVQPVAAAACSVDAIYSFGDSIADTGNLLREGPVGFFASIGSYPYGQTLRKPTGRVLRRPPHHRLLRDGAEPIAGEPVPGQGSRLRQRRQLRGGRGHGAGPGRVAAERHHGSTGERAAQLPARLVQGAPQRHRLPLATRLRQEARRSAVLGRRDRRERLQLRLLTGIQVDRGHEGLRATGHKRHNGRRQGSDRARRDPDRDPGELPDRVLPELPLPLRRVRRPRRPGLPQELQRLRPAPQRAAPGGHRRAEEGQHRRHRRVRGLLRRLHAPAGPCFAPRVRAGRAPAGVLRGGRRVQLQHELDVRRAGHDDVRGPGAQRQLGRHPPHAAGVQGHRAVPSHGGVRAAG

SEQ ID NO: 19845 - protein, 289 aa, Zea mays subsp. mays
  peptide (1)..(289): Ceres Seq. ID no. 12376732
MALNLSLVSPYLDKGADFASGANFAVAGATALDRAVLLQSGIMAPPASVPLSSQLDWFKAHLNATACPSLQDCAKKLAGALFLVGEIGGNDYNYGFLQGFRSIEAMKAYVPQVINAIMDVAKEVIELGATQIVIPGNFPIGCSPSYLSLFAASGDLDDRGCLRSYNAFAQHHNEQLQAAIDGLRKANTDVTVVYADYYGAFMHLLDHASLLGFEQGALLQACCGAGGAYNFNMNSMCGAPGTTTCADPARNVSWDGIHLTQQAYRAIALSLLMEGFAQPDDAVQEIWSC

SEQ ID NO: 19846 - DNA, 492 bp, Zea mays subsp. mays
  misc_feature (1)..(492): Ceres Seq. ID no. 13568253
  misc_feature (1)..(492): Ortholog of  Ceres SEQ ID NO 15177091 as cited in SEQ ID NO 52140
  misc_feature (1)..(492): Ortholog of  Ceres SEQ ID NO 15172539 as cited in SEQ ID NO 57333
  misc_feature (1)..(492): Ortholog of  Ceres SEQ ID NO 14315951 as cited in SEQ ID NO 57634
  misc_feature (1)..(492): Ortholog of  Ceres SEQ ID NO 13597324 as cited in SEQ ID NO 64842
  misc_feature (1)..(492): Ortholog of  Ceres SEQ ID NO 13658672 as cited in SEQ ID NO 66627
ccggttttgtttgacgatagttgagtagacccctggcaatccacccttgcacggttcttttaggttttttgttcgtcatttgcagctgccattctgcctaaattgtttaagcgaacctcctccggggctctctttgttgaagttcgccacggtggcccatgtcagtgtgatgtaaggttggagttggagctgcaatgacataaaacatagaagccttgatgcatgattgaatacgaaaacaatgagcaggcgcaacagccgtaccatctatgtaggcaatctccctggggacatccgtgagagggaggttgaggatctcttctacaagtatggccgtattttggatattgacttgaaaatacctccgagacctcctggatacgcattcgttgagtttgaggatccacgtgatgctgatgatgcaatttatggccgtgatgggtataactttgatggctacaggttgagggttgaattagctcatggtggcag

SEQ ID NO: 19847 - protein, 83 aa, Zea mays subsp. mays
  peptide (1)..(83): Ceres Seq. ID no. 13568254
MSRRNSRTIYVGNLPGDIREREVEDLFYKYGRILDIDLKIPPRPPGYAFVEFEDPRDADDAIYGRDGYNFDGYRLRVELAHGG

SEQ ID NO: 19848 - DNA, 1006 bp, Zea mays subsp. mays; identical to SEQ ID NO: 4226
  misc_feature (1)..(1006): Ceres Seq. ID no. 13495435
  misc_feature (1)..(1006): Ortholog of  Ceres SEQ ID NO 13595263 as cited in SEQ ID NO 56712
  misc_feature (1)..(1006): Ortholog of  Ceres SEQ ID NO 13655622 as cited in SEQ ID NO 64213

SEQ ID NO: 19849 - protein, 200 aa, Zea mays subsp. mays; identical to SEQ ID NO: 4227
  peptide (1)..(200): Ceres Seq. ID no. 13495436

SEQ ID NO: 19850 - DNA, 472 bp, Zea mays subsp. mays
  misc_feature (1)..(472): Ceres Seq. ID no. 13568255
  misc_feature (1)..(472): Ortholog of  Ceres SEQ ID NO 15175771 as cited in SEQ ID NO 55443
caaagaggggagacccgtttatattgaaaggcttggaaaggttgaccctaggcaaacttatgaatgtyacaacsaatkggrwycgatatgtgcgataccatgtgaaggagtttgagaggagcttcttgattaaatttccagcttgctctgttgctgcaaaaaggcacattgattccagcacaacaattctggatgtccagggcgtgggtttgaaaaatttcagcaaaactgcacgtgaattaattcagcgactgcagaaaattgacaatgataactacccagagactctataccaaatgtttattgtcaatgctggtccgggtttccggctactatggaacactgtgaagtcctttcttgatcccaaaactaccgccaagatacatgttcttgggaacaaataccaaagtaagctgcttgaaataattgacgccagtgaattgccggaattccttggtggcacttgtacctg

SEQ ID NO: 19851 - protein, 156 aa, Zea mays subsp. mays
  peptide (1)..(156): Ceres Seq. ID no. 13568256
  misc_feature (22)..(22): Xaa is any aa, unknown or other
  misc_feature (24)..(24): Xaa is any aa, unknown or other
  misc_feature (26)..(26): Xaa is any aa, unknown or other
  misc_feature (27)..(27): Xaa is any aa, unknown or other
KRGDPFILKGLERLTLGKLMNXTXNXXRYVRYHVKEFERSFLIKFPACSVAAKRHIDSSTTILDVQGVGLKNFSKTARELIQRLQKIDNDNYPETLYQMFIVNAGPGFRLLWNTVKSFLDPKTTAKIHVLGNKYQSKLLEIIDASELPEFLGGTCT

SEQ ID NO: 19852 - protein, 137 aa, Zea mays subsp. mays
  peptide (1)..(137): Ceres Seq. ID no. 13568257
  misc_feature (3)..(3): Xaa is any aa, unknown or other
  misc_feature (5)..(5): Xaa is any aa, unknown or other
  misc_feature (7)..(7): Xaa is any aa, unknown or other
  misc_feature (8)..(8): Xaa is any aa, unknown or other
MNXTXNXXRYVRYHVKEFERSFLIKFPACSVAAKRHIDSSTTILDVQGVGLKNFSKTARELIQRLQKIDNDNYPETLYQMFIVNAGPGFRLLWNTVKSFLDPKTTAKIHVLGNKYQSKLLEIIDASELPEFLGGTCT

SEQ ID NO: 19853 - DNA, 1604 bp, Zea mays subsp. mays
  misc_feature (1)..(1604): Ceres Seq. ID no. 12381743
  misc_feature (1)..(1604): Ortholog of  Ceres SEQ ID NO 12635789 as cited in SEQ ID NO 0
gcacgagaccattacctagaacatcctaatcgaaaaatcaggctttgacacctgttagagcgcggacccgaaatcggattctaattgagctctgagcagcggtgtcctgagtccgtgaccgtgttctctcccccgcgcttcccttcaacgccgcctccctaaagatccgccgcttctctgccctctgctcgtcgattcggcgcctcctctccttcacgcgccccacgctgccgtcgcctcctcctcactgtcgtccatgccgctgtagccgcctacggccatggccgctggagccagcgactatttgacggtggagtaccactccagagagctcccctctttcctctccgacgacgagggagccaccgccggcagcggcgtcctcgtatgcagaacagcagaggacgctcgctcgctctgcgcgcatcgaaccaaaaaccacacctcggcggcagctatataaaagccttcacctgacccgggcgctagggtttattcgctcctcccacccgccgccgtcgccgcctcctctccccagcacccggagctcgctcgaccgccgctcaccatgatcatccccaagaagaaccgcaatgagatctgcaagtacctcttcaagggcttcacacagcaagcattgtaatgagcatcttccgatgggaagctattcaaagcttgatacaatagtgaacttaccttttgcgttgagtggaacagcaagctcacaggaaccaacaggcagcctgagcttctcctttagagctttcacgtcagatgcagccttgcaacatctctcgaccaaccagccacacgagtacagggaagcttaacagcaacaacatcgaagtgtgtcgctcttgaaaaactaggatctggaagcgaagggcaagatgcgggcgtgttgtatgccaagaaggactacaacctggcgaagcatccgcagatcgatgtgcccaacctccaggactccaggtgatcaagctcatgcagagctttaagtccaaggagtatgttagggagaccttctcctggcagtactactactggtacctcaccaacgatggcattgagcacctacgcaactacctgaacctccggtctgagatcgtgcctgccacgctcaagaagtctgccaggccaccgggccgcccatttggctctggccctcctggtgaccgcccaaggtctgcagccaatgaaaaaggttacatttgtgtccaaggtgaagcatggcgaatactacatcgaagccacatggcctttgggtacggctattgaggccgtgtcaccgacaaagcagatcggaaactaatgggccgctgctcgcactgaactgaactctggatttagcgcatgttatcatggttgcagttagcgctcctgacctataatatttgactctcaaataatttctgtactgctgctcggcagcgtgcatgcaaactgagcattttcgagtcagcctctgcgtctgtgtgcgggctaattcaactatgaaattcattcgaatttctttccactttcactttggtatcttcagtgcttacaggaatatgtaaacgtttgatgctttgctttaattctgtgaagctacatattcagcc

SEQ ID NO: 19854 - protein, 97 aa, Zea mays subsp. mays
  peptide (1)..(97): Ceres Seq. ID no. 12381744
MQSFKSKEYVRETFSWQYYYWYLTNDGIEHLRNYLNLRSEIVPATLKKSARPPGRPFGSGPPGDRPRSAANEKGYICVQGEAWRILHRSHMAFGYGY

SEQ ID NO: 19855 - protein, 78 aa, Zea mays subsp. mays
  peptide (1)..(78): Ceres Seq. ID no. 12381745
MRSASTSSRASHSKHCNEHLPMGSYSKLDTIVNLPFALSGTASSQEPTGSLSFSFRAFTSDAALQHLSTNQPHEYREA

SEQ ID NO: 19856 - protein, 60 aa, Zea mays subsp. mays
  peptide (1)..(60): Ceres Seq. ID no. 12381746
MAAGASDYLTVEYHSRELPSFLSDDEGATAGSGVLVCRTAEDARSLCAHRTKNHTSAAAI

SEQ ID NO: 19857 - DNA, 1434 bp, Zea mays subsp. mays
  misc_feature (1)..(1434): Ceres Seq. ID no. 12368425
  misc_feature (1)..(1434): Ortholog of  Ceres SEQ ID NO 13586122 as cited in SEQ ID NO 0
gcacgagaccattacctagaacatcctaatcaaaaagattctgtttgtttcggttcgacagtaataatccggtcaagccgtagaaacttgataccgctgcggctgccccacgagggtgaatcgttacggttcggatattatcttctccgctccgcatcctctgtgtattttcaactcgacgcgttcgttcctatggcgggtccgaggaacagaggaaaccgcacacacccgcaaggatggcggtggcggctaggctctaccactcccgttcgccggagctgtagggcactttcggcgccatggcgatgtggtttggtggcagccggtctgcggcggccggcggatgccgtgaggccagcacatgcaatgcaacgctaggctatggctcaggcctcagggcggtggcgggcctggcggcgcggggagcgggttgcatctcgaccccttggcgtcgtgcactcatgacgagttgcagccaatgcaacatgggcataacagctgttgaagttgccgaccaaacagcaccttaaaaccgttcggttccataggaacaaagggctcctgttgcgccaaataagcagataagtaaaatggtggaagaggccgctaggttctctaagctgttctgtgatagaaacctgccgatctttgcattcctggatacccattatccagataagccggagccaccgtatcctcctcattgtatcattggtactggggaggagaacttcgttccagacctggagtggttggaaaaggagccaaatgtgactataaagaggaaaagttgtattgacggctacatcagctgcatagaggaggacgggtctagtgtttttgttgactgggtgggaaaatatcagatcaaaactgtcttggtactcgggatatgcacggacatctgtgttttggattttgcaagctcaactctggctgctcgaaacattgaccgagtgcctccattacgagatatcgtgatttattcagagaggtgcgctacatatgactttcctgttgagatcgctatgaatatcaaaggagctcttgcccatcctcaggacctgatgcatcatattggactctatatggccaaaggaaggggtgcaaaggttgttgacagggtggttattgaaccttgaataaaaaaacttccctcatcgtagtgatgttgctagagtttcctgtcttctcatccctccattgtaacaatcagatatatatgcgtcttagcataaagttgttgagatactaatgctagcgacaactatgttgacttgtcgagtatgtagagatgggctcatcattttgtggtgagcttgtacatatttcctgagattactttgtcctgccaaacatgcgccagttctccattggttgctaatgttcggctctgggattgtatattcgtatttaataaaagtacttcctccc

SEQ ID NO: 19858 - protein, 183 aa, Zea mays subsp. mays
  peptide (1)..(183): Ceres Seq. ID no. 12368426
MVEEAARFSKLFCDRNLPIFAFLDTHYPDKPEPPYPPHCIIGTGEENFVPDLEWLEKEPNVTIKRKSCIDGYISCIEEDGSSVFVDWVGKYQIKTVLVLGICTDICVLDFASSTLAARNIDRVPPLRDIVIYSERCATYDFPVEIAMNIKGALAHPQDLMHHIGLYMAKGRGAKVVDRVVIEP

SEQ ID NO: 19859 - protein, 125 aa, Zea mays subsp. mays
  peptide (1)..(125): Ceres Seq. ID no. 12368427
ARDHYLEHPNQKDSVCFGSTVIIRSSRRNLIPLRLPHEGESLRFGYYLLRSASSVYFQLDAFVPMAGPRNRGNRTHPQGWRWRLGSTTPVRRSCRALSAPWRCGLVAAGLRRPADAVRPAHAMQR

SEQ ID NO: 19860 - DNA, 518 bp, Zea mays subsp. mays
  misc_feature (1)..(518): Ceres Seq. ID no. 12418782
  misc_feature (1)..(518): Ortholog of  Ceres SEQ ID NO 14315028 as cited in SEQ ID NO 57989
gataggaaggcatattatggattcatcaagattttatgtgggattgagagggttgagcatgctgtcaaggtattccgtatgatgaaaggttatgggcatgctcctggagtaaaatcatatagcttgctcattgagaagctggccagacacaatttaggggatcgttctaatgcacttttcagggaggcagttgcacgtggtgtacctgtggcacaaggagagtacaatgttgacaaaaggtatgtcaagacaaagaaggagaagacggtgaagaagaggctgactttgccagagaagatgagattgaagagcaagaggttatacaagctcagaatgagctttgtcaagaagcccaagcgtcgaatgctccgggtttaagcataattttggtttggttggagcggatgatcatgggagcggacaccaccagatccagttatatctcggaagatcagaaaattgtagtcccttaactgtgcctgcccttgtgagtgactatgcaacatcattttttcgaa

SEQ ID NO: 19861 - protein, 125 aa, Zea mays subsp. mays
  peptide (1)..(125): Ceres Seq. ID no. 12418783
DRKAYYGFIKILCGIERVEHAVKVFRMMKGYGHAPGVKSYSLLIEKLARHNLGDRSNALFREAVARGVPVAQGEYNVDKRYVKTKKEKTVKKRLTLPEKMRLKSKRLYKLRMSFVKKPKRRMLRV

SEQ ID NO: 19862 - protein, 99 aa, Zea mays subsp. mays
  peptide (1)..(99): Ceres Seq. ID no. 12418784
MMKGYGHAPGVKSYSLLIEKLARHNLGDRSNALFREAVARGVPVAQGEYNVDKRYVKTKKEKTVKKRLTLPEKMRLKSKRLYKLRMSFVKKPKRRMLRV

SEQ ID NO: 19863 - protein, 98 aa, Zea mays subsp. mays
  peptide (1)..(98): Ceres Seq. ID no. 12418785
MKGYGHAPGVKSYSLLIEKLARHNLGDRSNALFREAVARGVPVAQGEYNVDKRYVKTKKEKTVKKRLTLPEKMRLKSKRLYKLRMSFVKKPKRRMLRV

SEQ ID NO: 19864 - DNA, 984 bp, Zea mays subsp. mays
  misc_feature (1)..(984): Ceres Seq. ID no. 12363527
  misc_feature (1)..(984): Ortholog of  Ceres SEQ ID NO 12781196 as cited in SEQ ID NO 61049
gcacgagaccattacctagaacatcctaatcgaaaaaaaatatcttctcttctttgttgttacatgcatactgaagttcaaactggacaagaatcttctgtttactctccggccgctgcctatatcgacttctagagctcatccctcaatttctttctcttcgagattatattttaatttgctactgcttcgatggacagtgccatgtaaaggaaaggagttgatctgattgcatgctgtgattattgattttgtgcttcttgggtagctgcaggttggggttccatgcaagaggctcatggacacggtgactgtcaagtgcggccactgcaacaacctctcctacctcagtccacggccccccatggtgcagccgctctcgccgactgatcatcccttggggccattccagtgtcagggaccctgcagtgagtgcaggaggaaccaaccgctgccgctggcctcgccgacatcgactgacctcaccccgagaatgcccttcgttgtcaagcccccggagaagaaacatcgcctcccatctgcttacaatcgcttcatgagggaggagattcagcgcatcaaagctgcgaagcctgatatccctcacagagaggccttcagcatggctgccaagaattgggcgaagtgtgacccgcgctgctcgacgactgcctctactgccacttctaacagcgctcctgaggctgctagagtcgtgcccactcctcatgtaactgagccacgctttgatctggaggatagggccaaggagcatgtcattgagagcttcgacatcttcaagcagattgagcgcaccatctagatgtctccatgtcgaaatggtgcggtagcccaggatcgagtaccatcacatcctgtactttttaccccccatgttactgttgctattattcttgctcttgttggattgtacgcaccctttaattatggacagctgctaccctttataatgtttgccatcgt

SEQ ID NO: 19865 - protein, 174 aa, Zea mays subsp. mays
  peptide (1)..(174): Ceres Seq. ID no. 12363528
MDTVTVKCGHCNNLSYLSPRPPMVQPLSPTDHPLGPFQCQGPCSECRRNQPLPLASPTSTDLTPRMPFVVKPPEKKHRLPSAYNRFMREEIQRIKAAKPDIPHREAFSMAAKNWAKCDPRCSTTASTATSNSAPEAARVVPTPHVTEPRFDLEDRAKEHVIESFDIFKQIERTI

SEQ ID NO: 19866 - protein, 152 aa, Zea mays subsp. mays
  peptide (1)..(152): Ceres Seq. ID no. 12363529
MVQPLSPTDHPLGPFQCQGPCSECRRNQPLPLASPTSTDLTPRMPFVVKPPEKKHRLPSAYNRFMREEIQRIKAAKPDIPHREAFSMAAKNWAKCDPRCSTTASTATSNSAPEAARVVPTPHVTEPRFDLEDRAKEHVIESFDIFKQIERTI

SEQ ID NO: 19867 - protein, 109 aa, Zea mays subsp. mays
  peptide (1)..(109): Ceres Seq. ID no. 12363530
MPFVVKPPEKKHRLPSAYNRFMREEIQRIKAAKPDIPHREAFSMAAKNWAKCDPRCSTTASTATSNSAPEAARVVPTPHVTEPRFDLEDRAKEHVIESFDIFKQIERTI

SEQ ID NO: 19868 - DNA, 1149 bp, Zea mays subsp. mays
  misc_feature (1)..(1149): Ceres Seq. ID no. 13492380
  misc_feature (1)..(1149): Ortholog of  Ceres SEQ ID NO 13655598 as cited in SEQ ID NO 64077
  misc_feature (1)..(1149): Ortholog of  Ceres SEQ ID NO 15180408 as cited in SEQ ID NO 0
ccacgtcccacccctcctgcatttcaaaataggcgtatctccctgcgcttttcctagccctttgtcatccaaggaaacaataaacaaccggcgcttttacacccccgccaagaacaggagcaacaacaacaaggctcctcgcaacaatccattctcatccatggcgaagctcatgaacaagttggtcgattcgttcgagcacgacgagataccggacgtcggctgcgtgcgcgccgtgctggccgagctcgtcctcaccttcctcttcgtcttcaccggcgtctccgccgccatggccgccggatccgacgggaagcccggcgacgctatgccgatggcgacgctggcggcggtggcaatcgcgcacgcgctggccgctggcgtcctggtgacggccgggttccacgtctccggcggccacctgaaccccgcggtgacggtggggctcatggtgcgcggccacatcaccaagctccgggcggtgctgtacgtcgccgcccagctgctggcctcctccgccgcctgcgtcctcctccgcttcctcagcggcggcatggtgaccccggtgcacgccctgggcaggggcatcagcccgatgcagggcctggtgatggaggtgatcctcaccttctccctgctcttcgtcacctacgccatgatcctggacccgcggagccaggtccgcgccatcggcccgctgctgacgggcctcatcgtcggcgccaacagcctcgccggcggcaacttcaccggcgcgtccatgaacccggcacgctccttcggcccggccctggccaccggggactggacaaaccactgggtctactggatcggcccgctgctcggcgggcccctggcaggcttcgtgtacgagtcgctgttcctggtgcagaagatgcacgagccgctgctcaatggggaagtctgacgaccatcagcccctgtgttgtggcgcatgcttcatgcttgtttctgtaaaacaggtcattctctgcaagcatggtacatacattggccaaggtaattagagaggcttgctgtaaagcagtaggattgctggctgtagaaattgttgatgggctttttttgggggtttcctgccaaggaattctttcttttatataatctcaaaaaagttttttttttggt

SEQ ID NO: 19869 - protein, 308 aa, Zea mays subsp. mays
  peptide (1)..(308): Ceres Seq. ID no. 13492381
HVPPLLHFKIGVSPCAFPSPLSSKETINNRRFYTPAKNRSNNNKAPRNNPFSSMAKLMNKLVDSFEHDEIPDVGCVRAVLAELVLTFLFVFTGVSAAMAAGSDGKPGDAMPMATLAAVAIAHALAAGVLVTAGFHVSGGHLNPAVTVGLMVRGHITKLRAVLYVAAQLLASSAACVLLRFLSGGMVTPVHALGRGISPMQGLVMEVILTFSLLFVTYAMILDPRSQVRAIGPLLTGLIVGANSLAGGNFTGASMNPARSFGPALATGDWTNHWVYWIGPLLGGPLAGFVYESLFLVQKMHEPLLNGEV

SEQ ID NO: 19870 - protein, 255 aa, Zea mays subsp. mays
  peptide (1)..(255): Ceres Seq. ID no. 13492382
MAKLMNKLVDSFEHDEIPDVGCVRAVLAELVLTFLFVFTGVSAAMAAGSDGKPGDAMPMATLAAVAIAHALAAGVLVTAGFHVSGGHLNPAVTVGLMVRGHITKLRAVLYVAAQLLASSAACVLLRFLSGGMVTPVHALGRGISPMQGLVMEVILTFSLLFVTYAMILDPRSQVRAIGPLLTGLIVGANSLAGGNFTGASMNPARSFGPALATGDWTNHWVYWIGPLLGGPLAGFVYESLFLVQKMHEPLLNGEV

SEQ ID NO: 19871 - protein, 251 aa, Zea mays subsp. mays
  peptide (1)..(251): Ceres Seq. ID no. 13492383
MNKLVDSFEHDEIPDVGCVRAVLAELVLTFLFVFTGVSAAMAAGSDGKPGDAMPMATLAAVAIAHALAAGVLVTAGFHVSGGHLNPAVTVGLMVRGHITKLRAVLYVAAQLLASSAACVLLRFLSGGMVTPVHALGRGISPMQGLVMEVILTFSLLFVTYAMILDPRSQVRAIGPLLTGLIVGANSLAGGNFTGASMNPARSFGPALATGDWTNHWVYWIGPLLGGPLAGFVYESLFLVQKMHEPLLNGEV

SEQ ID NO: 19872 - DNA, 1770 bp, Zea mays subsp. mays; identical to SEQ ID NO: 8430
  misc_feature (1)..(1770): Ceres Seq. ID no. 12405403
  misc_feature (1)..(1770): Ortholog of  Ceres SEQ ID NO 14309674 as cited in SEQ ID NO 55707
  misc_feature (1)..(1770): Ortholog of  Ceres SEQ ID NO 13658728 as cited in SEQ ID NO 66270
  misc_feature (1)..(1770): Ortholog of  Ceres SEQ ID NO 12465428 as cited in SEQ ID NO 68898

SEQ ID NO: 19873 - protein, 292 aa, Zea mays subsp. mays; identical to SEQ ID NO: 8431
  peptide (1)..(292): Ceres Seq. ID no. 12405404

SEQ ID NO: 19874 - protein, 280 aa, Zea mays subsp. mays; identical to SEQ ID NO: 8432
  peptide (1)..(280): Ceres Seq. ID no. 12405405

SEQ ID NO: 19875 - protein, 206 aa, Zea mays subsp. mays; identical to SEQ ID NO: 8433
  peptide (1)..(206): Ceres Seq. ID no. 12405406

SEQ ID NO: 19876 - DNA, 482 bp, Zea mays subsp. mays
  misc_feature (1)..(482): Ceres Seq. ID no. 2113060
  misc_feature (1)..(482): Ortholog of  Ceres SEQ ID NO 14302251 as cited in SEQ ID NO 62093
gagaactagacgccactcctacagttttacgtttacccaccaccaccagtccaccaccgagcattagcttcccgaccagatcaaccaggcccgccccgacccgaagatgcagcggtggctcccggcgctcctccgccgcgccgcgcccggcggcggggcggcgcggctcttcgcctcgtcctccctcctcttcgacgacacgcaggagcaggttgtttatgcaaaaacagatctaactgcgggatcaaaaggaataactgcattcataatcgagaaagggatgcccgggttcagtactgctcagaaattggacaaacttggcatgagaggaagcgacacatgtgaacttgtttttgagaactgctttgtgccacgcgagaatgtcctcggtgaagaaggcaaaggtgtttatgtcatgatgtcagggcttgatctggaaaggcttgtattagctgcgggccctattggccttatgcaggcat

SEQ ID NO: 19877 - protein, 125 aa, Zea mays subsp. mays
  peptide (1)..(125): Ceres Seq. ID no. 2113061
MQRWLPALLRRAAPGGGAARLFASSSLLFDDTQEQVVYAKTDLTAGSKGITAFIIEKGMPGFSTAQKLDKLGMRGSDTCELVFENCFVPRENVLGEEGKGVYVMMSGLDLERLVLAAGPIGLMQA

SEQ ID NO: 19878 - protein, 77 aa, Zea mays subsp. mays
  peptide (1)..(77): Ceres Seq. ID no. 2113062
ELDATPTVLRLPTTTSPPPSISFPTRSTRPAPTRRCSGGSRRSSAAPRPAAGRRGSSPRPPSSSTTRRSRLFMQKQI

SEQ ID NO: 19879 - protein, 67 aa, Zea mays subsp. mays
  peptide (1)..(67): Ceres Seq. ID no. 2113063
MPGFSTAQKLDKLGMRGSDTCELVFENCFVPRENVLGEEGKGVYVMMSGLDLERLVLAAGPIGLMQA

SEQ ID NO: 19880 - DNA, 1856 bp, Zea mays subsp. mays; identical to SEQ ID NO: 4052
  misc_feature (1)..(1856): Ceres Seq. ID no. 13635560
  misc_feature (1)..(1856): Ortholog of  Ceres SEQ ID NO 14314404 as cited in SEQ ID NO 57421
  misc_feature (1)..(1856): Ortholog of  Ceres SEQ ID NO 13493536 as cited in SEQ ID NO 58515
  misc_feature (1)..(1856): Ortholog of  Ceres SEQ ID NO 15225741 as cited in SEQ ID NO 59606
  misc_feature (1)..(1856): Ortholog of  Ceres SEQ ID NO 12618461 as cited in SEQ ID NO 64349

SEQ ID NO: 19881 - protein, 549 aa, Zea mays subsp. mays; identical to SEQ ID NO: 4053
  peptide (1)..(549): Ceres Seq. ID no. 13635561
  misc_feature (496)..(496): Xaa is any aa, unknown or other

SEQ ID NO: 19882 - protein, 548 aa, Zea mays subsp. mays; identical to SEQ ID NO: 4054
  peptide (1)..(548): Ceres Seq. ID no. 13635562
  misc_feature (495)..(495): Xaa is any aa, unknown or other

SEQ ID NO: 19883 - protein, 418 aa, Zea mays subsp. mays; identical to SEQ ID NO: 4055
  peptide (1)..(418): Ceres Seq. ID no. 13635563
  misc_feature (365)..(365): Xaa is any aa, unknown or other

SEQ ID NO: 19884 - DNA, 750 bp, Zea mays subsp. mays
  misc_feature (1)..(750): Ceres Seq. ID no. 12556393
  misc_feature (1)..(750): Ortholog of  Ceres SEQ ID NO 13585324 as cited in SEQ ID NO 64329
tctctgtggtggagttttacttcctgcacagattccccctgccttttgctggctacctcatcttcatttccatattggctggattctggggccagtgtttggttaggaagatcgtgcatgtgctcaagagagcatcgcttattgtcttcatcctctcctctgttatcttcgtcagtgctcttacgatgggtgtcgttggaacccagaagagcatttcgatgatcaacaatcacgaatatatggggttcctcaacttctgcgagtaactcaaacaccatcagactgtcgatccgtccgggagaatccaggccaatgcctaattgacctcatctccctcaaaatctagaagaataaagtcgccaagtatgtgcacaggttagctcctcgctaacatgtgcgcatttaggccgacagagtcgctgtagtgaattaagctcgtgttagctcctggctaacgagcagaccatatggctttagttttgtggaagtgggcgcgatttcgtcatgtcatgcatgtgttagctgctggctaaccctgcaaatgcgtgtgttggtgcaggtttttgtcacgtctgcgtcagctcctggctgaccagcagttgtttgtcgttcattctctgcgtcagctcctggctgaccagcagttatttgttgttcattcttgcgctagcaccaggntaggctgcaaaactgcaaatatttgttgcatggaacattgtaaatatcagtcaattcccattctgtttgttc

SEQ ID NO: 19885 - protein, 87 aa, Zea mays subsp. mays
  peptide (1)..(87): Ceres Seq. ID no. 12556394
SVVEFYFLHRFPLPFAGYLIFISILAGFWGQCLVRKIVHVLKRASLIVFILSSVIFVSALTMGVVGTQKSISMINNHEYMGFLNFCE

SEQ ID NO: 19886 - protein, 73 aa, Zea mays subsp. mays
  peptide (1)..(73): Ceres Seq. ID no. 12556395
SLWWSFTSCTDSPCLLLATSSSFPYWLDSGASVWLGRSCMCSREHRLLSSSSPLLSSSVLLRWVSLEPRRAFR

SEQ ID NO: 19887 - DNA, 537 bp, Zea mays subsp. mays
  misc_feature (1)..(537): Ceres Seq. ID no. 2727698
  misc_feature (1)..(537): Ortholog of  Ceres SEQ ID NO 15173263 as cited in SEQ ID NO 64606
gaaaagaagaacactttctctctgaaatctcaaattcatctcttctcttccgatttcgctgaatcatgtcagacgacgagcatcacttcgaatccagcgacgccggagcttctaagacttatcctcaacaagccggtaacattcgtaaaggtggtcacatcgncatcaagggacgtccctgcaaggtggttgaggtatcgacttcgaagactgggaagcatggtcacgccaagtgtcactttgttgccattgatatctttacttctaagaagcttgaanatatccgtccttcttcccacaattgtgatgttccacatgtgaatcgcgttgattatcagttgattgatatctctgaagatggctttggtagtcttcttactgataatggtagccactaaggatgatctgannctgccaacagatgaacttttactcacacagctcaagaatggatttgagganggtaaggatatngttgtgtctgtcatgctgcatgggaaagagcagatgtgtgctctcaaggaagttggcccaagt

SEQ ID NO: 19888 - protein, 110 aa, Zea mays subsp. mays
  peptide (1)..(110): Ceres Seq. ID no. 2727699
  misc_feature (33)..(33): Xaa is any aa, unknown or other
  misc_feature (72)..(72): Xaa is any aa, unknown or other
MSDDEHHFESSDAGASKTYPQQAGNIRKGGHIXIKGRPCKVVEVSTSKTGKHGHAKCHFVAIDIFTSKKLEXIRPSSHNCDVPHVNRVDYQLIDISEDGFGSLLTDNGSH

SEQ ID NO: 19889 - protein, 106 aa, Zea mays subsp. mays
  peptide (1)..(106): Ceres Seq. ID no. 2727700
  misc_feature (55)..(55): Xaa is any aa, unknown or other
  misc_feature (93)..(93): Xaa is any aa, unknown or other
EKKNTFSLKSQIHLFSSDFAESCQTTSITSNPATPELLRLILNKPVTFVKVVTSXSRDVPARWLRYRLRRLGSMVTPSVTLLPLISLLLRSLXISVLLPTIVMFHM

SEQ ID NO: 19890 - protein, 60 aa, Zea mays subsp. mays
  peptide (1)..(60): Ceres Seq. ID no. 2727701
  misc_feature (18)..(18): Xaa is any aa, unknown or other
  misc_feature (35)..(35): Xaa is any aa, unknown or other
  misc_feature (39)..(39): Xaa is any aa, unknown or other
MALVVFLLIMVATKDDLXLPTDELLLTQLKNGFEXGKDXVVSVMLHGKEQMCALKEVGPS

SEQ ID NO: 19891 - DNA, 686 bp, Zea mays subsp. mays
  misc_feature (1)..(686): Ceres Seq. ID no. 12556415
  misc_feature (1)..(686): Ortholog of  Ceres SEQ ID NO 12587870 as cited in SEQ ID NO 63523
aaacacaggagatatagctgaaagcagtgagcaagtggggcattactggctagagctgggaaggcgatccaagtaccagttgcacatggtgatagccatactgtcatacatcctcttcgggctgctgccaccagtcatctacggactgtcattcaggacgagcgacaacagagagaacaaagtgctggtggtcgctgctgcatctctcctgtgcattgcgctgctcgcaatcgggaaggcacatgttaagaggcataggacatacctcacaaaccctcctctactacctgtccattggattcagcagctccggactgtcgtacgtcgcaggcgtcctcctcgcgaaggtcctagcacacttcggtatcattgatcagggtggtgcatcaagctcctgctcctccaggtctctcattccctgaagcagccgcctgggcttcctactgagactggagccctcatttagtagttttgatggttaaatggattatctcagcacacatctgcatggagacactatcttgcaattcacacagtttttatcacaagcccttggctctcagaattcgtctctcttttttcacagcacttggccatagtataattttcagaattngtctgtaccccaaccttgtcatcgtatttttgacaggaacatgttgtcaattacaatctccttttttcac

SEQ ID NO: 19892 - protein, 123 aa, Zea mays subsp. mays
  peptide (1)..(123): Ceres Seq. ID no. 12556416
NTGDIAESSEQVGHYWLELGRRSKYQLHMVIAILSYILFGLLPPVIYGLSFRTSDNRENKVLVVAAASLLCIALLAIGKAHVKRHRTYLTNPPLLPVHWIQQLRTVVRRRRPPREGPSTLRYH

SEQ ID NO: 19893 - protein, 95 aa, Zea mays subsp. mays
  peptide (1)..(95): Ceres Seq. ID no. 12556417
MVIAILSYILFGLLPPVIYGLSFRTSDNRENKVLVVAAASLLCIALLAIGKAHVKRHRTYLTNPPLLPVHWIQQLRTVVRRRRPPREGPSTLRYH

SEQ ID NO: 19894 - protein, 70 aa, Zea mays subsp. mays
  peptide (1)..(70): Ceres Seq. ID no. 12556418
  misc_feature (48)..(48): Xaa is any aa, unknown or other
MVKWIISAHICMETLSCNSHSFYHKPLALRIRLSFFTALGHSIIFRIXLYPNLVIVFLTGTCCQLQSPFF

SEQ ID NO: 19895 - DNA, 1315 bp, Zea mays subsp. mays; identical to SEQ ID NO: 14233
  misc_feature (1)..(1315): Ceres Seq. ID no. 13635214
  misc_feature (1)..(1315): Ortholog of  Ceres SEQ ID NO 13590307 as cited in SEQ ID NO 67154

SEQ ID NO: 19896 - protein, 153 aa, Zea mays subsp. mays; identical to SEQ ID NO: 14234
  peptide (1)..(153): Ceres Seq. ID no. 15220341
  misc_feature (10)..(10): Xaa is any aa, unknown or other
  misc_feature (11)..(11): Xaa is any aa, unknown or other
  misc_feature (26)..(26): Xaa is any aa, unknown or other
  misc_feature (27)..(27): Xaa is any aa, unknown or other
  misc_feature (29)..(29): Xaa is any aa, unknown or other
  misc_feature (30)..(30): Xaa is any aa, unknown or other
  misc_feature (32)..(32): Xaa is any aa, unknown or other
  misc_feature (33)..(33): Xaa is any aa, unknown or other
  misc_feature (34)..(34): Xaa is any aa, unknown or other
  misc_feature (40)..(40): Xaa is any aa, unknown or other
  misc_feature (47)..(47): Xaa is any aa, unknown or other
  misc_feature (50)..(50): Xaa is any aa, unknown or other
  misc_feature (55)..(55): Xaa is any aa, unknown or other
  misc_feature (56)..(56): Xaa is any aa, unknown or other
  misc_feature (63)..(63): Xaa is any aa, unknown or other
  misc_feature (78)..(78): Xaa is any aa, unknown or other
  misc_feature (87)..(87): Xaa is any aa, unknown or other
  misc_feature (93)..(93): Xaa is any aa, unknown or other
  misc_feature (97)..(97): Xaa is any aa, unknown or other
  misc_feature (104)..(104): Xaa is any aa, unknown or other
  misc_feature (106)..(106): Xaa is any aa, unknown or other
  misc_feature (117)..(117): Xaa is any aa, unknown or other
  misc_feature (118)..(118): Xaa is any aa, unknown or other
  misc_feature (123)..(123): Xaa is any aa, unknown or other
  misc_feature (132)..(132): Xaa is any aa, unknown or other
  misc_feature (133)..(133): Xaa is any aa, unknown or other
  misc_feature (140)..(140): Xaa is any aa, unknown or other
  misc_feature (148)..(148): Xaa is any aa, unknown or other

SEQ ID NO: 19897 - protein, 143 aa, Zea mays subsp. mays; identical to SEQ ID NO: 14235
  peptide (1)..(143): Ceres Seq. ID no. 15220342
  misc_feature (8)..(8): Xaa is any aa, unknown or other
  misc_feature (9)..(9): Xaa is any aa, unknown or other
  misc_feature (15)..(15): Xaa is any aa, unknown or other
  misc_feature (24)..(24): Xaa is any aa, unknown or other
  misc_feature (25)..(25): Xaa is any aa, unknown or other
  misc_feature (32)..(32): Xaa is any aa, unknown or other
  misc_feature (39)..(39): Xaa is any aa, unknown or other
  misc_feature (49)..(49): Xaa is any aa, unknown or other
  misc_feature (50)..(50): Xaa is any aa, unknown or other
  misc_feature (62)..(62): Xaa is any aa, unknown or other
  misc_feature (75)..(75): Xaa is any aa, unknown or other
  misc_feature (77)..(77): Xaa is any aa, unknown or other
  misc_feature (78)..(78): Xaa is any aa, unknown or other
  misc_feature (79)..(79): Xaa is any aa, unknown or other
  misc_feature (86)..(86): Xaa is any aa, unknown or other
  misc_feature (101)..(101): Xaa is any aa, unknown or other
  misc_feature (104)..(104): Xaa is any aa, unknown or other
  misc_feature (119)..(119): Xaa is any aa, unknown or other

SEQ ID NO: 19898 - protein, 130 aa, Zea mays subsp. mays; identical to SEQ ID NO: 14236
  peptide (1)..(130): Ceres Seq. ID no. 15220343
  misc_feature (2)..(2): Xaa is any aa, unknown or other
  misc_feature (11)..(11): Xaa is any aa, unknown or other
  misc_feature (12)..(12): Xaa is any aa, unknown or other
  misc_feature (19)..(19): Xaa is any aa, unknown or other
  misc_feature (26)..(26): Xaa is any aa, unknown or other
  misc_feature (36)..(36): Xaa is any aa, unknown or other
  misc_feature (37)..(37): Xaa is any aa, unknown or other
  misc_feature (49)..(49): Xaa is any aa, unknown or other
  misc_feature (62)..(62): Xaa is any aa, unknown or other
  misc_feature (64)..(64): Xaa is any aa, unknown or other
  misc_feature (65)..(65): Xaa is any aa, unknown or other
  misc_feature (66)..(66): Xaa is any aa, unknown or other
  misc_feature (73)..(73): Xaa is any aa, unknown or other
  misc_feature (88)..(88): Xaa is any aa, unknown or other
  misc_feature (91)..(91): Xaa is any aa, unknown or other
  misc_feature (106)..(106): Xaa is any aa, unknown or other

SEQ ID NO: 19899 - DNA, 355 bp, Zea mays subsp. mays
  misc_feature (1)..(355): Ceres Seq. ID no. 2727880
  misc_feature (1)..(355): Ortholog of  Ceres SEQ ID NO 12624676 as cited in SEQ ID NO 61197
gcacctaacgcagattcttcttctctaccatattcgttgaaaccagagaagatggtgggtgtgtcgccgaagatcgctccgtcgatgttgtcatcggactttgcaaatcttgccgcggaggctaagcggatgatcgatttgggcgccaattggcttcacatggacattatggacgggcattttgtttctaacctaacgattggtgctcctgtcatcgagagtttgaggaagcacacaaatgcatatcttgattgccacttaatggngacgaaccccatggattatgtggatcagatggctaaagctggggcgtctggtttcacattccacgttgaggtggcccaagagaattggc

SEQ ID NO: 19900 - protein, 118 aa, Zea mays subsp. mays
  peptide (1)..(118): Ceres Seq. ID no. 2727881
  misc_feature (89)..(89): Xaa is any aa, unknown or other
APNADSSSLPYSLKPEKMVGVSPKIAPSMLSSDFANLAAEAKRMIDLGANWLHMDIMDGHFVSNLTIGAPVIESLRKHTNAYLDCHLMXTNPMDYVDQMAKAGASGFTFHVEVAQENW

SEQ ID NO: 19901 - protein, 101 aa, Zea mays subsp. mays
  peptide (1)..(101): Ceres Seq. ID no. 2727882
  misc_feature (72)..(72): Xaa is any aa, unknown or other
MVGVSPKIAPSMLSSDFANLAAEAKRMIDLGANWLHMDIMDGHFVSNLTIGAPVIESLRKHTNAYLDCHLMXTNPMDYVDQMAKAGASGFTFHVEVAQENW

SEQ ID NO: 19902 - protein, 90 aa, Zea mays subsp. mays
  peptide (1)..(90): Ceres Seq. ID no. 2727883
  misc_feature (61)..(61): Xaa is any aa, unknown or other
MLSSDFANLAAEAKRMIDLGANWLHMDIMDGHFVSNLTIGAPVIESLRKHTNAYLDCHLMXTNPMDYVDQMAKAGASGFTFHVEVAQENW

SEQ ID NO: 19903 - DNA, 553 bp, Zea mays subsp. mays
  misc_feature (1)..(553): Ceres Seq. ID no. 12556468
  misc_feature (1)..(553): Ortholog of  Ceres SEQ ID NO 12587870 as cited in SEQ ID NO 63523
aaacacaggagatatagctgaaagcagtgagcaagtggggcattactggctagagctgggaaggcgatccaagtaccagttgcacatggtgatagccatactgtcatacatcctcttcgggctgctgccaccagtcatctacggactgtcattcaggacgagcgacaacagagagaacaaagtgctggtggtcgctgctgcatctctcctgtgcattgcgctgctcgcaatcgggaaggcacatgttaagaggcataggacatacctcacaaccctcctctactacctgtccattggattcagcagctccggactgtcgtacgtcgcaggcgtcctcctcgcgaaggtcctagcacacttcggtatcattgatcagggtggtgcatcagctcctgctcctccaggtctctcattccctgaagcagccgtagggcttcaaactgagactggagccctcatttagtagttttgatggataaatggattatctcagcacacatctgcatggagacactatctgcaattcacacagtttttatcacagcccatggat

SEQ ID NO: 19904 - protein, 153 aa, Zea mays subsp. mays
  peptide (1)..(153): Ceres Seq. ID no. 12556469
NTGDIAESSEQVGHYWLELGRRSKYQLHMVIAILSYILFGLLPPVIYGLSFRTSDNRENKVLVVAAASLLCIALLAIGKAHVKRHRTYLTTLLYYLSIGFSSSGLSYVAGVLLAKVLAHFGIIDQGGASAPAPPGLSFPEAAVGLQTETGALI

SEQ ID NO: 19905 - protein, 125 aa, Zea mays subsp. mays
  peptide (1)..(125): Ceres Seq. ID no. 12556470
MVIAILSYILFGLLPPVIYGLSFRTSDNRENKVLVVAAASLLCIALLAIGKAHVKRHRTYLTTLLYYLSIGFSSSGLSYVAGVLLAKVLAHFGIIDQGGASAPAPPGLSFPEAAVGLQTETGALI

SEQ ID NO: 19906 - DNA, 435 bp, Zea mays subsp. mays
  misc_feature (1)..(435): Ceres Seq. ID no. 2732244
  misc_feature (1)..(435): Ortholog of  Ceres SEQ ID NO 15170764 as cited in SEQ ID NO 52602
gtcgcattccgcaacacctgctcctcgcccccttctctcagaggcgacgcctcgggcgctcctaccctgccccgtctccggtccccccgcgccgtcggcgaggcagccggccgtcacagaagcccgatccggaccccgcgagaatgaagacatccagttgcgtctaaactccattagaagactttcaacaattgcacgggctcttggagaagaaagaaccaggaaggagctgattccttttcttagtgaaaacaacgatgatgaagacgaggtgcttcttgcaatggctgaggaattgggtgtgttcattccgtatgttggtggtgtagaacatgctcatgttttgctcccacctttggagacattgtgtacagtggaggaaacttgtgtccgtgataaagcagttgaatctctgtgccgtattggtgccaaatg

SEQ ID NO: 19907 - protein, 144 aa, Zea mays subsp. mays
  peptide (1)..(144): Ceres Seq. ID no. 2732245
SHSATPAPRPLLSEATPRALLPCPVSGPPAPSARQPAVTEARSGPRENEDIQLRLNSIRRLSTIARALGEERTRKELIPFLSENNDDEDEVLLAMAEELGVFIPYVGGVEHAHVLLPPLETLCTVEETCVRDKAVESLCRIGAK

SEQ ID NO: 19908 - protein, 50 aa, Zea mays subsp. mays
  peptide (1)..(50): Ceres Seq. ID no. 4903276
MAEELGVFIPYVGGVEHAHVLLPPLETLCTVEETCVRDKAVESLCRIGAK

SEQ ID NO: 19909 - DNA, 868 bp, Zea mays subsp. mays; identical to SEQ ID NO: 18096
  misc_feature (1)..(868): Ceres Seq. ID no. 12358010
  misc_feature (1)..(868): Ortholog of  Ceres SEQ ID NO 14305026 as cited in SEQ ID NO 52980
  misc_feature (1)..(868): Ortholog of  Ceres SEQ ID NO 15175670 as cited in SEQ ID NO 55204
  misc_feature (1)..(868): Ortholog of  Ceres SEQ ID NO 13655712 as cited in SEQ ID NO 63394
  misc_feature (1)..(868): Ortholog of  Ceres SEQ ID NO 13662391 as cited in SEQ ID NO 68631

SEQ ID NO: 19910 - protein, 189 aa, Zea mays subsp. mays; identical to SEQ ID NO: 18097
  peptide (1)..(189): Ceres Seq. ID no. 12358011

SEQ ID NO: 19911 - protein, 176 aa, Zea mays subsp. mays; identical to SEQ ID NO: 18098
  peptide (1)..(176): Ceres Seq. ID no. 12358012

SEQ ID NO: 19912 - protein, 163 aa, Zea mays subsp. mays; identical to SEQ ID NO: 18099
  peptide (1)..(163): Ceres Seq. ID no. 12358013

SEQ ID NO: 19913 - DNA, 570 bp, Zea mays subsp. mays
  misc_feature (1)..(570): Ceres Seq. ID no. 12378176
  misc_feature (1)..(570): Ortholog of  Ceres SEQ ID NO 13597194 as cited in SEQ ID NO 63661
tgcatgtttgaagggtctgaatggagttccagacattgtagagtgctcttttgtgcaatcaactgtgacagagttgccattctttgcctccaaggttcggctcggcaagaatggagtggaggaagtgcttggtctgggtgagctcaacgagttcgagaagaagggtctggaaaacctcaagggcgagctcaagtcttccatcgacaagggtatcaagtttgcccacgggaactaggcaccttgcccggcttctaacaattgatgccccttgcatttttgtttgactgcctatttttcctgccccccgtatggttggggcaatgaggcgtagtggtcgataataaaacccagcggaacaaagaaaacgtgtaccagaaactgtttgcaaacaccggtgccttttttttgtgttgaaccaccattagttgagccgtgagggaatggtgaacaagctttccacttgctcatttccgagcgcttctctttgattgtatccatggtttggactcatgactgtacgtcttggcagttggcttggcacccaggaatcnnnncactggagttgctgcc

SEQ ID NO: 19914 - protein, 77 aa, Zea mays subsp. mays
  peptide (1)..(77): Ceres Seq. ID no. 12378177
ACLKGLNGVPDIVECSFVQSTVTELPFFASKVRLGKNGVEEVLGLGELNEFEKKGLENLKGELKSSIDKGIKFAHGN

SEQ ID NO: 19915 - protein, 57 aa, Zea mays subsp. mays
  peptide (1)..(57): Ceres Seq. ID no. 12378178
MEWRKCLVWVSSTSSRRRVWKTSRASSSLPSTRVSSLPTGTRHLARLLTIDAPCIFV

SEQ ID NO: 19916 - protein, 46 aa, Zea mays subsp. mays
  peptide (1)..(46): Ceres Seq. ID no. 12378179
CMFEGSEWSSRHCRVLFCAINCDRVAILCLQGSARQEWSGGSAWSG

SEQ ID NO: 19917 - DNA, 417 bp, Zea mays subsp. mays
  misc_feature (1)..(417): Ceres Seq. ID no. 13624351
  misc_feature (1)..(417): Ortholog of  Ceres SEQ ID NO 12636872 as cited in SEQ ID NO 19731
atctggactctggagtctgttgtctgcgtgtgtgcggctggttctctctgccaccgcacgagtcgcagcagagagggaaaaaccctagcagcctcccttcgtcccaactcccaaccccgcgaccccatggccgcatctaacggcggcggcggcccggcccgatctccgcagaggcggaggcggcgcttggagaggctatcaagctggtgttcgggcggtggacggcgctgcagatggcggtggagaaccagtggggcggccgcgactcccgcgccaaggccgaccagttgggcgagtccatcctattctggttctgccgcactaagggtccatattatttcgaagacttggttgatatgatgtatgacaaaatttctgaatcttttaatgcctactttgaggataatagtattgagg

SEQ ID NO: 19918 - protein, 119 aa, Zea mays subsp. mays
  peptide (1)..(119): Ceres Seq. ID no. 13624352
IWTLESVVCVCAAGSLCHRTSRSREGKTLAASLRPNSQPRDPMAASNGGGGPARSPQRRRRRLERLSSWCSGGGRRCRWRWRTSGAAATPAPRPTSWASPSYSGSAALRVHIISKTWLI

SEQ ID NO: 19919 - protein, 77 aa, Zea mays subsp. mays
  peptide (1)..(77): Ceres Seq. ID no. 13624353
MAASNGGGGPARSPQRRRRRLERLSSWCSGGGRRCRWRWRTSGAAATPAPRPTSWASPSYSGSAALRVHIISKTWLI

SEQ ID NO: 19920 - protein, 61 aa, Zea mays subsp. mays
  peptide (1)..(61): Ceres Seq. ID no. 13624354
MAVENQWGGRDSRAKADQLGESILFWFCRTKGPYYFEDLVDMMYDKISESFNAYFEDNSIE

SEQ ID NO: 19921 - DNA, 675 bp, Zea mays subsp. mays; identical to SEQ ID NO: 19598
  misc_feature (1)..(675): Ceres Seq. ID no. 12375559
  misc_feature (1)..(675): Ortholog of  Ceres SEQ ID NO 13597865 as cited in SEQ ID NO 64954

SEQ ID NO: 19922 - protein, 225 aa, Zea mays subsp. mays; identical to SEQ ID NO: 19599
  peptide (1)..(225): Ceres Seq. ID no. 12375560

SEQ ID NO: 19923 - protein, 213 aa, Zea mays subsp. mays; identical to SEQ ID NO: 19600
  peptide (1)..(213): Ceres Seq. ID no. 12375561

SEQ ID NO: 19924 - protein, 181 aa, Zea mays subsp. mays; identical to SEQ ID NO: 19601
  peptide (1)..(181): Ceres Seq. ID no. 12375562

SEQ ID NO: 19925 - DNA, 403 bp, Zea mays subsp. mays
  misc_feature (1)..(403): Ceres Seq. ID no. 13589415
  misc_feature (1)..(403): Ortholog of  Ceres SEQ ID NO 15177927 as cited in SEQ ID NO 1170
  misc_feature (1)..(403): Ortholog of  Ceres SEQ ID NO 13596295 as cited in SEQ ID NO 68019
accctgacttgtgcgccatcacacacaagacacaaccccactcacccggcagggaggccctctttgtcggcggaggccatggtttccctcaagccgcagaagaggctcgccgcgggagtcctaaaatgtggcaaggggaaggtgtggcttgaccccaacgaggtctacgagatctcgatggctaactcgcgtcagaacattcgtaagctggtgaaggatggattcataattaagaagccacagaaaatccactcaaggtcccgggcaaggagggcccatgaggccaagcagaaggggaggcactctggttacggtaagcgcaggggtaccagggaggctaggctccccaccaagatcctttggatgcgcaggatgcgtgtcctcaggcgtctgctgcgcaagt

SEQ ID NO: 19926 - protein, 134 aa, Zea mays subsp. mays
  peptide (1)..(134): Ceres Seq. ID no. 13589416
TLTCAPSHTRHNPTHPAGRPSLSAEAMVSLKPQKRLAAGVLKCGKGKVWLDPNEVYEISMANSRQNIRKLVKDGFIIKKPQKIHSRSRARRAHEAKQKGRHSGYGKRRGTREARLPTKILWMRRMRVLRRLLRK

SEQ ID NO: 19927 - protein, 108 aa, Zea mays subsp. mays
  peptide (1)..(108): Ceres Seq. ID no. 13589417
MVSLKPQKRLAAGVLKCGKGKVWLDPNEVYEISMANSRQNIRKLVKDGFIIKKPQKIHSRSRARRAHEAKQKGRHSGYGKRRGTREARLPTKILWMRRMRVLRRLLRK

SEQ ID NO: 19928 - protein, 75 aa, Zea mays subsp. mays
  peptide (1)..(75): Ceres Seq. ID no. 13589418
MANSRQNIRKLVKDGFIIKKPQKIHSRSRARRAHEAKQKGRHSGYGKRRGTREARLPTKILWMRRMRVLRRLLRK

SEQ ID NO: 19929 - DNA, 1463 bp, Zea mays subsp. mays
  misc_feature (1)..(1463): Ceres Seq. ID no. 12383473
  misc_feature (1)..(1463): Ortholog of  Ceres SEQ ID NO 12586195 as cited in SEQ ID NO 63768
  misc_feature (1)..(1463): Ortholog of  Ceres SEQ ID NO 13599518 as cited in SEQ ID NO 0
gcacgagaccattacctagaacatcctaatcgaaaacccgatcagtcgccgcccaagcctagcagatccgccggcgagcgcgcgggggcaatgggtgtcgtctcggcagcggcggacgcgattgtcgcggttttctccctcaccatcgtcgtcgcggcgccgctactcgacgcgcagtccgtcctcccgcataccctctacccggcgccgctcctggaactcaagcgctggtacgccgccgagtttggcgactacctcgtggcccagtcccccggcttcttccgtggccttgtttgcctcgagctcgccttccaatggccgctcgccgtcgccacactctacggcatcctcacccgccgccgctgggctgccaccacctccctcatggccggcgttggcaccctcacctccatggtaaagccgtgtttcccttctcccttgtagtggagtcacgattgtaatgcattatgcatgcatgtctggaatttcgtgagaccagtgtctcaccgctgcagctctgcccctgtgccccagatccaaaacactaccatggtggatgcacaattgtacacttaaaagtcagttcagttgatgtggaatccaaacatagtttctcatgtgcttattttgttatgattggctgattgttcaaatgaaatcgtgctggaaaaggttttgtagacccatgggattcagagttacttccatattgtcttggcataccaattgcatttcctgttggtgatgattcccagaatgtcaagctattgccaacatttttagttttgttctctgaaccatggttccttttgacctcaaatgtgctatggataggtgacgttgttcaggttaaatctcaaccgcactgtctcgtattaaatgataggagggaaaaaaatttcttgtcacaatatcagatatcaaatcatcgcaaaaattgagtactgactacctgttatgctagattctgcaattcttggtgagatgttaggttcaggcaaatcaacaccaaagttgcttcagatgtatgttccttatgctgtttttgctgtcattgctattctacgtggactttgctcatgctctggacgcactactgctggttcatcacttgggccttctgcccggaagaagagggtctagatcagcagtgacacttggagaattttcggtttgagacagtggcgccagagcactaatgctggtcagaagacgattatctggatcaggtttctatccctggtatttagcacggatgttgaaaaatccagatagtgttagtggctgtttctctaggatttggtgttcgttttccctgaaatgtgatattcatcttgcctttatttccattttaccctttgattatatgtcttgctaactaagacattgttttgtttactggatgagctgattcaactctggcattgttctggcgaataagtttcataaatccttgtcttggt

SEQ ID NO: 19930 - protein, 147 aa, Zea mays subsp. mays
  peptide (1)..(147): Ceres Seq. ID no. 12383474
ARDHYLEHPNRKPDQSPPKPSRSAGERAGAMGVVSAAADAIVAVFSLTIVVAAPLLDAQSVLPHTLYPAPLLELKRWYAAEFGDYLVAQSPGFFRGLVCLELAFQWPLAVATLYGILTRRRWAATTSLMAGVGTLTSMVKPCFPSPL

SEQ ID NO: 19931 - protein, 117 aa, Zea mays subsp. mays
  peptide (1)..(117): Ceres Seq. ID no. 12383475
MGVVSAAADAIVAVFSLTIVVAAPLLDAQSVLPHTLYPAPLLELKRWYAAEFGDYLVAQSPGFFRGLVCLELAFQWPLAVATLYGILTRRRWAATTSLMAGVGTLTSMVKPCFPSPL

SEQ ID NO: 19932 - DNA, 1633 bp, Zea mays subsp. mays
  misc_feature (1)..(1633): Ceres Seq. ID no. 13495210
  misc_feature (1)..(1633): Ortholog of  Ceres SEQ ID NO 14312216 as cited in SEQ ID NO 53930
  misc_feature (1)..(1633): Ortholog of  Ceres SEQ ID NO 13656404 as cited in SEQ ID NO 65806
  misc_feature (1)..(1633): Ortholog of  Ceres SEQ ID NO 12779935 as cited in SEQ ID NO 66774
  misc_feature (1)..(1633): Ortholog of  Ceres SEQ ID NO 13598695 as cited in SEQ ID NO 67368
  misc_feature (1)..(1633): Ortholog of  Ceres SEQ ID NO 13591174 as cited in SEQ ID NO 68289
gcacgagaccattacctagaacatcctaatcgaaaaagctgccagcctagctgccaacgattgtcgtaagtcttggagaaactgcgcatcagtttgacctagctgccagcctgatactactcacgaactggcatggcatggtaggtgggttcgggctttcaagcatggcttccacacttttcctctagctactagctcctcccgcgcgcgacggccatggccagcgagctgctgtcgccgctcatcccgcaccagcagcgtcgacgcgctctcgccgtcgacgtggccgcgcccctgctcgcgctcctcctggccgctgtcgccttctcccgctcaccggtggcggcactggtcagctcttcgaggctcgttgacctgacactcctcgccggcgctcaggggaagggagcggtgtgcttggatgggaccccgcctggttaccaccttcggagaggattcggttccggagctcacaactggctcgtcttccttgagggaggaggttggtgcaacaccacgcagagctgctccgagcgcaaaatgaccaacttcggttcatctaagtatatgggagcagtaaacttcactgggatactcagcaatgatcacacagaaaatcctgatttctacaactggaatacagttgtcataaggtactgcgacggagcatcatttgctggggatgcagagggagaagatctggatggaaccaaacttttcttcagaggattgcgtatctgggaagcagttgtagatgaactcatgggaaaaggaatggacgctgctaaacaagccttgcttacaggctgttctgctggttctctagctgcgctactgcactgtgataatttccatggacggtttcctcatgaagtttcagttaaatgcctttctgatgctggattttttattgacgagaaggatttatctggagaaagatccatgcggtcgctcatcagtggagtagttcaccttcagaatgttaaagaagttttacccaatgactgcctccaaaagaaggatccaacagaggcagtgtttctttcctgctgaactgattaagggcatcaccacccccacgtttattctgaactccgattacgattcttggcagatacgaaacattctcgcaccaaatggatcctatcctggccaggaatggtctagttgcaaagcagatatccggaactgcagttgcgcacaaattgatgtactgcatggattcaagaagaaattagtcagtgaattgaaggttgccgaagataacaaggactggggcctgttcattgattcatgctttacccactgtcaaacaccattcgatatcacatggaattcaccgatctcaccaaggctcggcaacaagtctatctcagaggccgttggggattggtatttcgatagaaggcaaaacgcgaaacagattgactgcgagtacccatgcaaccccacatgcagcagtcttctgcctactgcttgattcgcaaagggctgcactgagatcaccaggcttttctcattttcaaattagttttgctgaggattcaaaaagggagctttgccttattggtaaaacctgcaattgactaaacacgacttgcagtagttgtgcttccatcaaaagcaatatgtc

SEQ ID NO: 19933 - protein, 278 aa, Zea mays subsp. mays
  peptide (1)..(278): Ceres Seq. ID no. 13495211
MASELLSPLIPHQQRRRALAVDVAAPLLALLLAAVAFSRSPVAALVSSSRLVDLTLLAGAQGKGAVCLDGTPPGYHLRRGFGSGAHNWLVFLEGGGWCNTTQSCSERKMTNFGSSKYMGAVNFTGILSNDHTENPDFYNWNTVVIRYCDGASFAGDAEGEDLDGTKLFFRGLRIWEAVVDELMGKGMDAAKQALLTGCSAGSLAALLHCDNFHGRFPHEVSVKCLSDAGFFIDEKDLSGERSMRSLISGVVHLQNVKEVLPNDCLQKKDPTEAVFLSC

SEQ ID NO: 19934 - protein, 170 aa, Zea mays subsp. mays
  peptide (1)..(170): Ceres Seq. ID no. 13495212
MTNFGSSKYMGAVNFTGILSNDHTENPDFYNWNTVVIRYCDGASFAGDAEGEDLDGTKLFFRGLRIWEAVVDELMGKGMDAAKQALLTGCSAGSLAALLHCDNFHGRFPHEVSVKCLSDAGFFIDEKDLSGERSMRSLISGVVHLQNVKEVLPNDCLQKKDPTEAVFLSC

SEQ ID NO: 19935 - protein, 166 aa, Zea mays subsp. mays
  peptide (1)..(166): Ceres Seq. ID no. 13495213
MLKKFYPMTASKRRIQQRQCFFPAELIKGITTPTFILNSDYDSWQIRNILAPNGSYPGQEWSSCKADIRNCSCAQIDVLHGFKKKLVSELKVAEDNKDWGLFIDSCFTHCQTPFDITWNSPISPRLGNKSISEAVGDWYFDRRQNAKQIDCEYPCNPTCSSLLPTA

SEQ ID NO: 19936 - DNA, 1885 bp, Zea mays subsp. mays
  misc_feature (1)..(1885): Ceres Seq. ID no. 13577867
  misc_feature (1)..(1885): Ortholog of  Ceres SEQ ID NO 14302935 as cited in SEQ ID NO 20442
aacacatgtgtgtgcagtgtagacgagcgcgtacgtaacttattgggaggttgcgcgtacggcaactcccgtcgcctccgcgctcccctaaccgcctcccccttgtctcatggtggaagtggaacaaccctccgcctgcgccgctgcgaagtaagtgagaagggaaaacaagaaacgaggagggagggaggggacgacgtacggagcgagctagcggcgcggcgggcgtcgctcggcatggacgcggaggcggcggcggcggcggcggcgacggcggtggaggagagggagcggctgcggaggagcttcgcgtcggggaggacgcggccggcggcgtggcgggaggcgcagctgcgcggccttctgcgcatggccgccgagagggaggacgacatctgcgccgccctgcacgccgacctcgcgaagccccttaccgagtgttatgtacacgagntatcattggtcattncttcgtgcaaatttgctctcaagaatctcaagaaatggatgaagccccgaaaggtccccggcgggctgctgaccttcccgtcggcggccagcgtcgcggcggagcctctcggcgtcgtgctcgtcatctccgcctggaactaccccttcttgctggccatcgacccggtcgtgggggcattcgcggcgggcaacgccgtggcgctgaagccgtcggaggtggcgccggccacgtcgttgctgctggccgacctgctgccgcgctacgtggacccctcgtgcgtcagggtcgtgcagggcggcatcccggagaccaccgcgctgctggagctccagtgggacaagatcttctacacaggtaacagcagagtaggacgcatcgtcatgtcctacgctgccaatcacctgacgcccgtggtcttggagctcggtggcaaatgccctgtcgtcgtcgactccgacgtcaacctccacgtcgctgccaagaggatcgccgccggcaagtggggctgcaacagcggccaagcctgcgtctcgccggactacgtcgtcaccaccaaatcgttcgcgccaaagctgctggagtccctgaagcgagtgctattcgagttctacggggaggagccgctgcggtcgccggacctgtcgcgcgtcgtcaactccaaccacttcaacaggctcatggcgctcatggacgactactcggtctccggcaatgtcgcgttcggcggccagatcgacgagcggcggctaaggatcgccccgacgctgctgctggacgtcccgctcgactccgcgatgatgaaggaggagatcttcgggccgctgcttcccataatcacggtggacaagatcggcgagagcttcgctgtgatcaactccatgcccaagccgctggcagcttacctcttcagcaacgacgggcaggctcaagcagcagttcgagaggaccgtctcggcgggagggatcatgttcaacgacaccggcatccacctgacaaacccgaacctgccgttcggaggagtcggggagagcggcatgggcgcctaccacggcgccttcagcttcgacgccttctcccacaggaaggccgtcctggaccgcagcttcctcggcgaggccagggccaggtacccgccgtacacgccggcgaagctcgccatcctcaggggcgtgctcaatggcagcccgcttgccacggttcaggcggctgcggggtgtacaggaggggcatcagctgactgactgactgaccccccttcatgcttattattaataataagcataaatattcaccgcatacacattgctgtgcttttattaaggttgttgtgagggcgaaaaatgtattgaccctttgcgtgtgcgcgtgcgtgtatagcaactattaataaaagaaaaaagtgatgttcattc

SEQ ID NO: 19937 - protein, 569 aa, Zea mays subsp. mays
  peptide (1)..(569): Ceres Seq. ID no. 13577868
  misc_feature (152)..(152): Xaa is any aa, unknown or other
  misc_feature (157)..(157): Xaa is any aa, unknown or other
NTCVCSVDERVRNLLGGCAYGNSRRLRAPLTASPLSHGGSGTTLRLRRCEVSEKGKQETRREGGDDVRSELAARRASLGMDAEAAAAAAATAVEERERLRRSFASGRTRPAAWREAQLRGLLRMAAEREDDICAALHADLAKPLTECYVHEXSLVIXSCKFALKNLKKWMKPRKVPGGLLTFPSAASVAAEPLGVVLVISAWNYPFLLAIDPVVGAFAAGNAVALKPSEVAPATSLLLADLLPRYVDPSCVRVVQGGIPETTALLELQWDKIFYTGNSRVGRIVMSYAANHLTPVVLELGGKCPVVVDSDVNLHVAAKRIAAGKWGCNSGQACVSPDYVVTTKSFAPKLLESLKRVLFEFYGEEPLRSPDLSRVVNSNHFNRLMALMDDYSVSGNVAFGGQIDERRLRIAPTLLLDVPLDSAMMKEEIFGPLLPIITVDKIGESFAVINSMPKPLAAYLFSNDGQAQAAVREDRLGGRDHVQRHRHPPDKPEPAVRRSRGERHGRLPRRLQLRRLLPQEGRPGPQLPRRGQGQVPAVHAGEARHPQGRAQWQPACHGSGGCGVYRRGIS

SEQ ID NO: 19938 - protein, 490 aa, Zea mays subsp. mays
  peptide (1)..(490): Ceres Seq. ID no. 13577869
  misc_feature (73)..(73): Xaa is any aa, unknown or other
  misc_feature (78)..(78): Xaa is any aa, unknown or other
MDAEAAAAAAATAVEERERLRRSFASGRTRPAAWREAQLRGLLRMAAEREDDICAALHADLAKPLTECYVHEXSLVIXSCKFALKNLKKWMKPRKVPGGLLTFPSAASVAAEPLGVVLVISAWNYPFLLAIDPVVGAFAAGNAVALKPSEVAPATSLLLADLLPRYVDPSCVRVVQGGIPETTALLELQWDKIFYTGNSRVGRIVMSYAANHLTPVVLELGGKCPVVVDSDVNLHVAAKRIAAGKWGCNSGQACVSPDYVVTTKSFAPKLLESLKRVLFEFYGEEPLRSPDLSRVVNSNHFNRLMALMDDYSVSGNVAFGGQIDERRLRIAPTLLLDVPLDSAMMKEEIFGPLLPIITVDKIGESFAVINSMPKPLAAYLFSNDGQAQAAVREDRLGGRDHVQRHRHPPDKPEPAVRRSRGERHGRLPRRLQLRRLLPQEGRPGPQLPRRGQGQVPAVHAGEARHPQGRAQWQPACHGSGGCGVYRRGIS

SEQ ID NO: 19939 - protein, 446 aa, Zea mays subsp. mays
  peptide (1)..(446): Ceres Seq. ID no. 13577870
  misc_feature (29)..(29): Xaa is any aa, unknown or other
  misc_feature (34)..(34): Xaa is any aa, unknown or other
MAAEREDDICAALHADLAKPLTECYVHEXSLVIXSCKFALKNLKKWMKPRKVPGGLLTFPSAASVAAEPLGVVLVISAWNYPFLLAIDPVVGAFAAGNAVALKPSEVAPATSLLLADLLPRYVDPSCVRVVQGGIPETTALLELQWDKIFYTGNSRVGRIVMSYAANHLTPVVLELGGKCPVVVDSDVNLHVAAKRIAAGKWGCNSGQACVSPDYVVTTKSFAPKLLESLKRVLFEFYGEEPLRSPDLSRVVNSNHFNRLMALMDDYSVSGNVAFGGQIDERRLRIAPTLLLDVPLDSAMMKEEIFGPLLPIITVDKIGESFAVINSMPKPLAAYLFSNDGQAQAAVREDRLGGRDHVQRHRHPPDKPEPAVRRSRGERHGRLPRRLQLRRLLPQEGRPGPQLPRRGQGQVPAVHAGEARHPQGRAQWQPACHGSGGCGVYRRGIS

SEQ ID NO: 19940 - DNA, 1719 bp, Zea mays subsp. mays; identical to SEQ ID NO: 3268
  misc_feature (1)..(1719): Ceres Seq. ID no. 12348980
  misc_feature (1)..(1719): Ortholog of  Ceres SEQ ID NO 13592852 as cited in SEQ ID NO 20709
  misc_feature (1)..(1719): Ortholog of  Ceres SEQ ID NO 13532807 as cited in SEQ ID NO 53012
  misc_feature (1)..(1719): Ortholog of  Ceres SEQ ID NO 14313425 as cited in SEQ ID NO 54973
  misc_feature (1)..(1719): Ortholog of  Ceres SEQ ID NO 13663060 as cited in SEQ ID NO 60964
  misc_feature (1)..(1719): Ortholog of  Ceres SEQ ID NO 13656849 as cited in SEQ ID NO 65764
  misc_feature (1)..(1719): Ortholog of  Ceres SEQ ID NO 13500573 as cited in SEQ ID NO 67431
  misc_feature (1)..(1719): Ortholog of  Ceres SEQ ID NO 13656501 as cited in SEQ ID NO 69206

SEQ ID NO: 19941 - protein, 369 aa, Zea mays subsp. mays; identical to SEQ ID NO: 3269
  peptide (1)..(369): Ceres Seq. ID no. 12348981

SEQ ID NO: 19942 - protein, 367 aa, Zea mays subsp. mays; identical to SEQ ID NO: 3270
  peptide (1)..(367): Ceres Seq. ID no. 12348982

SEQ ID NO: 19943 - protein, 366 aa, Zea mays subsp. mays; identical to SEQ ID NO: 3271
  peptide (1)..(366): Ceres Seq. ID no. 12348983

SEQ ID NO: 19944 - DNA, 1275 bp, Zea mays subsp. mays
  misc_feature (1)..(1275): Ceres Seq. ID no. 12390143
  misc_feature (1)..(1275): Ortholog of  Ceres SEQ ID NO 14308430 as cited in SEQ ID NO 55350
  misc_feature (1)..(1275): Ortholog of  Ceres SEQ ID NO 15177799 as cited in SEQ ID NO 59221
  misc_feature (1)..(1275): Ortholog of  Ceres SEQ ID NO 13662846 as cited in SEQ ID NO 65519
aacaggcaagtcttcgcttcgctcctctctgcggctccctccggcgagcggcgatggccttctcacccccactgatcgactgggaggcggagagctaccctgcctacccagatttcgcggccattccccttttcgtcgtcttcttcctcgtcgtccgtttcttcctcgaccgcttcgtattcgagtggttagccaggaagctgattttcaaggaggaggatgagaagaagcttggccctactacatatgcaggcaagagaaagatcaggaaatttaaagaatcagcttggaaatgcatgtattttctttctggggagctattggcattgtctgtgacgtacaacgagccatggttcacaaccacaagaaatttctgggttggaccaggcgatcagatctggccagatcaaaaaattaaattgaaactcaagacagtctatatgtatgttgctggcttttacacatactcgatatttgcccttttgttttgggaaataaggcgttcagacttcggtatttcaatgactcatcatgtagcaaccgtctgtctgatagcactgtcttacatattcagatttgctcgggtgggttcagttgtccttgccattcatgatgctactgatgtgttcctggagcttggaaaaatttccaagtatagtggccatgagttgtttgcagatgtttcatttcttgttttcgtcagttcttgggtactcctccgccttatatattatccgttctggattctctggagcacgagctatgaagttgttctgactctagacaaggaaaagcataaagttgacgggccaatatactactatgtattcaacagtcttctcttctctctacttgttctacacatatattggtgggttttaatgtatcggatgcttgtgaagcaaatacagtctagagggcacgttggcgatgatatacgatctgattctgaaggtgaagaggaacatgaggattgattgagctgtgtagagtcggaagataataaataacatggggatggattgagctgtataagttccaaaggcgaaaaggaatacatggatggattgagctgtgtaaattctgaaggtgtatcaaatcattctgctgtttttcttctgtccttgttcttgataagtaacaataaattagtgcccttctctaggtgagcatcatcgatagatgtcacttgggcattatcattatctattgatgtaaaatcaggtcacattgcatagcacacacacaacagttaatggaaaatgttagcagtgc

SEQ ID NO: 19945 - protein, 324 aa, Zea mays subsp. mays
  peptide (1)..(324): Ceres Seq. ID no. 12390144
QASLRFAPLCGSLRRAAMAFSPPLIDWEAESYPAYPDFAAIPLFVVFFLVVRFFLDRFVFEWLARKLIFKEEDEKKLGPTTYAGKRKIRKFKESAWKCMYFLSGELLALSVTYNEPWFTTTRNFWVGPGDQIWPDQKIKLKLKTVYMYVAGFYTYSIFALLFWEIRRSDFGISMTHHVATVCLIALSYIFRFARVGSVVLAIHDATDVFLELGKISKYSGHELFADVSFLVFVSSWVLLRLIYYPFWILWSTSYEVVLTLDKEKHKVDGPIYYYVFNSLLFSLLVLHIYWWVLMYRMLVKQIQSRGHVGDDIRSDSEGEEEHED

SEQ ID NO: 19946 - protein, 307 aa, Zea mays subsp. mays
  peptide (1)..(307): Ceres Seq. ID no. 12390145
MAFSPPLIDWEAESYPAYPDFAAIPLFVVFFLVVRFFLDRFVFEWLARKLIFKEEDEKKLGPTTYAGKRKIRKFKESAWKCMYFLSGELLALSVTYNEPWFTTTRNFWVGPGDQIWPDQKIKLKLKTVYMYVAGFYTYSIFALLFWEIRRSDFGISMTHHVATVCLIALSYIFRFARVGSVVLAIHDATDVFLELGKISKYSGHELFADVSFLVFVSSWVLLRLIYYPFWILWSTSYEVVLTLDKEKHKVDGPIYYYVFNSLLFSLLVLHIYWWVLMYRMLVKQIQSRGHVGDDIRSDSEGEEEHED

SEQ ID NO: 19947 - protein, 226 aa, Zea mays subsp. mays
  peptide (1)..(226): Ceres Seq. ID no. 12390146
MYFLSGELLALSVTYNEPWFTTTRNFWVGPGDQIWPDQKIKLKLKTVYMYVAGFYTYSIFALLFWEIRRSDFGISMTHHVATVCLIALSYIFRFARVGSVVLAIHDATDVFLELGKISKYSGHELFADVSFLVFVSSWVLLRLIYYPFWILWSTSYEVVLTLDKEKHKVDGPIYYYVFNSLLFSLLVLHIYWWVLMYRMLVKQIQSRGHVGDDIRSDSEGEEEHED

SEQ ID NO: 19948 - DNA, 1705 bp, Zea mays subsp. mays
  misc_feature (1)..(1705): Ceres Seq. ID no. 12381724
  misc_feature (1)..(1705): Ortholog of  Ceres SEQ ID NO 15225493 as cited in SEQ ID NO 65438
  misc_feature (1)..(1705): Ortholog of  Ceres SEQ ID NO 14313344 as cited in SEQ ID NO 69148
gcacgagaccattacctagaacatcctaatcgaaaaaagttgcaaccggagtccggagcatagcaacctcgctgggctcgggcccgcggcgccgggatatactccagggaagtcgagcaaggagagtgtggactgtggacgacaggggtaaagatcgagtgagcatcgctgcaccatgcgcccttctctctgctgtgcacctctttttcttctgctactattacatttggcatttgctagacctctctttcctctaccgagtaagacaaagaatgaagagaagaagcccatacagacgtttcggccatataacattgctcatcgtggatcaaatggggaaattcccgaggaaacagctgctgcatacatgagagctattgaagaaggggccgattttatagagtctgacatccttgctagcaaagatggggccttgatttgttttcatgatgtaacacttgatgatacaactgatgttgccaagcgtaaggaatttgccaatcgaagaagaacctatgaagtggagtggtttaatgttactggatggtttgtagtggacttcacactggaggaacttaaaacacttagagtgaagcagagatactcgtttagagatcaacaatacaatggtatgttttcaatcatcacgtttgaagaattcatttcaattgccctagatgcagacagaactgtcggcatatatcccgagattaaagatccagtttttatcaacaagcatgtcaagtgggctgatgggaagaagtttgaggacaaatttgtggataccttgcttaaatatggatacaaaggtcaatatatgtcagagaattggctgaagcagccattgtttatacaatcctttgctcccacctccattgtacatgtatcagattttattgactctcccaaggtatttttgattgatgatatcagtgtgagaacacaagacacgaaccagtcatactgggaaattacttcagatgaataccttgcatacattagtaaatatgtcgttggccttggtccatggaaggacactattgttccagcttcaggaaactacttgatgccacctagtgatcttgtcgcacgggcacatgctcataatctccaggtacatccatacacgtacaggaacgagaaccagttcctgcacttcaacttttttcaagatccctacaatgaatacgacttctggataaacactgtgggggttgatggactgtttacagatttcaccggaacccttcacaggtaccaagaattgacatccccacaccggaaggatgagactgcaaatagcctcctagtaaaaattagccaaatgatctcagcatatgaaggtctctgatcagcacgacgttgctgaaaattgtttgtgcttttgttaatcgatctgcaagagcacacgatccattcatcacggacggactgcgactttgcaaggtgaaataaacgagttgtttctggttgggacttgttagcacgagccgtactctccattaaagctcttaaaccctgtgagaaatttctagtgtgggaatacttgttttcgggaaggtactgtaatgactagttcacgatagaaaccgtatcatggtttagcgtgccaggatggacgagttggtctcgggtctttgcacagttggcctacaattgtacttgccggagtgttgaaatttctagtgtgggaataatcgttttc

SEQ ID NO: 19949 - protein, 391 aa, Zea mays subsp. mays
  peptide (1)..(391): Ceres Seq. ID no. 12381725
MRPSLCCAPLFLLLLLHLAFARPLFPLPSKTKNEEKKPIQTFRPYNIAHRGSNGEIPEETAAAYMRAIEEGADFIESDILASKDGALICFHDVTLDDTTDVAKRKEFANRRRTYEVEWFNVTGWFVVDFTLEELKTLRVKQRYSFRDQQYNGMFSIITFEEFISIALDADRTVGIYPEIKDPVFINKHVKWADGKKFEDKFVDTLLKYGYKGQYMSENWLKQPLFIQSFAPTSIVHVSDFIDSPKVFLIDDISVRTQDTNQSYWEITSDEYLAYISKYVVGLGPWKDTIVPASGNYLMPPSDLVARAHAHNLQVHPYTYRNENQFLHFNFFQDPYNEYDFWINTVGVDGLFTDFTGTLHRYQELTSPHRKDETANSLLVKISQMISAYEGL

SEQ ID NO: 19950 - protein, 327 aa, Zea mays subsp. mays
  peptide (1)..(327): Ceres Seq. ID no. 12381726
MRAIEEGADFIESDILASKDGALICFHDVTLDDTTDVAKRKEFANRRRTYEVEWFNVTGWFVVDFTLEELKTLRVKQRYSFRDQQYNGMFSIITFEEFISIALDADRTVGIYPEIKDPVFINKHVKWADGKKFEDKFVDTLLKYGYKGQYMSENWLKQPLFIQSFAPTSIVHVSDFIDSPKVFLIDDISVRTQDTNQSYWEITSDEYLAYISKYVVGLGPWKDTIVPASGNYLMPPSDLVARAHAHNLQVHPYTYRNENQFLHFNFFQDPYNEYDFWINTVGVDGLFTDFTGTLHRYQELTSPHRKDETANSLLVKISQMISAYEGL

SEQ ID NO: 19951 - protein, 239 aa, Zea mays subsp. mays
  peptide (1)..(239): Ceres Seq. ID no. 12381727
MFSIITFEEFISIALDADRTVGIYPEIKDPVFINKHVKWADGKKFEDKFVDTLLKYGYKGQYMSENWLKQPLFIQSFAPTSIVHVSDFIDSPKVFLIDDISVRTQDTNQSYWEITSDEYLAYISKYVVGLGPWKDTIVPASGNYLMPPSDLVARAHAHNLQVHPYTYRNENQFLHFNFFQDPYNEYDFWINTVGVDGLFTDFTGTLHRYQELTSPHRKDETANSLLVKISQMISAYEGL

SEQ ID NO: 19952 - DNA, 1458 bp, Zea mays subsp. mays
  misc_feature (1)..(1458): Ceres Seq. ID no. 12382366
  misc_feature (1)..(1458): Ortholog of  Ceres SEQ ID NO 13656091 as cited in SEQ ID NO 69094
agcctaggttagtgtctaacatcgtcgatccctccatgaagatcctacaaatctagctacgtagctagcgatcgatcgaattccatatcattgtttactcagacacatcatcagctacgtaactgcgtcagcttctggttgatcggatcgcgtccatggctgcggcggccgggggcggcaggcggccgtgggtggtggacgtggagaagaagctgggcgaggcggacgcgtcggtggaggtgtcgcggtggcagcggcactgcatctaccgcgtcccggcgtgcatcaaggacctgaagcccaaggcgtacaagccgcaggtggtgtcgctgggccccttccaccacggcgacgcggagctggttcccatggaggagcacaagcggcgggcgctgcgtcacctcctgcgccgcgccaagaggccgctggaggacttcgtggccgccgtggaggagatcgcggagccgctggagagcgcgtacctggacctcggcgccgagtggcgcggcggcgggagggagcggttcctggaggtgatgatcgtcgacggctgcttcctgctggaggtgatgagagccaccgtcctcgacgggaagaacaccgccgactacgcgcccaacgaccccatcttcagccaccacggggtgctgtacatggtgccgtacatccgccgcgacatgctcatgctcgagaaccagctcccgctcatcctgctcgagaagctcgtcgccgtcgagactggcaagcctacgaacggcgatgccatcaacaggatggtgctgaggttcctgtccccgacaccgcggctaccacccaccggcgtcggcatcgggctccacgcgctggacgtgcaaccgccggaacatgctgtacgggcactaccagcaccgcccccggcgcgacgtgccggagacggacatcatccggtccgcggtggagctgtacgaggccgggatccggttcaggaagagcgtctcggacagcctgcacgacatccggttccggcacggcgtgctgagcatgccggcggtgacggtggacgactccaccgagtacatgttcctgctcgtcatgaccgtcatgcagaccgtctacaccgtcatgcaattctaccagggcggcggcagcggcagtgacggcggatcgtcggcggcgccggcgccggcgtgatgatcgatctctgcactgcagccttttgattgcattggtctgcatgcgtgatctgtttgagcttgttttgatcgcgttcctttttcttgaggtatatcgattggttgtgtacttgtgtgtgttgattcttgtcgtggattccagttgttgatttctcctttttcggtctctttccgagtttgtttctatatttgaattaacgggttttcaaattatggaaaaaggaccatatgtgaaacacaactgtaaacagagaagatgatctgtaaggctatgtttggtttcttc

SEQ ID NO: 19953 - protein, 326 aa, Zea mays subsp. mays
  peptide (1)..(326): Ceres Seq. ID no. 12382367
MAAAAGGGRRPWVVDVEKKLGEADASVEVSRWQRHCIYRVPACIKDLKPKAYKPQVVSLGPFHHGDAELVPMEEHKRRALRHLLRRAKRPLEDFVAAVEEIAEPLESAYLDLGAEWRGGGRERFLEVMIVDGCFLLEVMRATVLDGKNTADYAPNDPIFSHHGVLYMVPYIRRDMLMLENQLPLILLEKLVAVETGKPTNGDAINRMVLRFLSPTPRLPPTGVGIGLHALDVQPPEHAVRALPAPPPARRAGDGHHPVRGGAVRGRDPVQEERLGQPARHPVPARRAEHAGGDGGRLHRVHVPARHDRHADRLHRHAILPGRRQRQ

SEQ ID NO: 19954 - protein, 255 aa, Zea mays subsp. mays
  peptide (1)..(255): Ceres Seq. ID no. 12382368
MEEHKRRALRHLLRRAKRPLEDFVAAVEEIAEPLESAYLDLGAEWRGGGRERFLEVMIVDGCFLLEVMRATVLDGKNTADYAPNDPIFSHHGVLYMVPYIRRDMLMLENQLPLILLEKLVAVETGKPTNGDAINRMVLRFLSPTPRLPPTGVGIGLHALDVQPPEHAVRALPAPPPARRAGDGHHPVRGGAVRGRDPVQEERLGQPARHPVPARRAEHAGGDGGRLHRVHVPARHDRHADRLHRHAILPGRRQRQ

SEQ ID NO: 19955 - protein, 199 aa, Zea mays subsp. mays
  peptide (1)..(199): Ceres Seq. ID no. 12382369
MIVDGCFLLEVMRATVLDGKNTADYAPNDPIFSHHGVLYMVPYIRRDMLMLENQLPLILLEKLVAVETGKPTNGDAINRMVLRFLSPTPRLPPTGVGIGLHALDVQPPEHAVRALPAPPPARRAGDGHHPVRGGAVRGRDPVQEERLGQPARHPVPARRAEHAGGDGGRLHRVHVPARHDRHADRLHRHAILPGRRQRQ

SEQ ID NO: 19956 - DNA, 446 bp, Zea mays subsp. mays
  misc_feature (1)..(446): Ceres Seq. ID no. 14305948
  misc_feature (1)..(446): Ortholog of  Ceres SEQ ID NO 12637716 as cited in SEQ ID NO 0
aggacggagatgacgcagaagcagaccctgttcaaggggcagagcaagaagaagactatccctcccaaccgccacggcaaggcgcctcatgttcgtaaaggaaagagagccgtcaagcccaccaagttcacaaaggacatggacgccgagaaggaactcaccaagttcatcaaccagtgcaacgaaataaaagctgcgaatcttgctagcaaagagggcggtgacctcaacatagtgaaggcggatggtgaggaatctaaatcaaagaaataggaagccagaaactgaaaacgagtgtgtgaaacgtgatgcgtggtaaactgttaatgcgatgtattctgctgaagaaaattcagttccgtatggctgggtagatgaacatgtttagcgcaaagtgacggtgtaactgcaaccggggtaatggcttgcaagttttgttctggccc

SEQ ID NO: 19957 - protein, 90 aa, Zea mays subsp. mays
  peptide (1)..(90): Ceres Seq. ID no. 14305949
RTEMTQKQTLFKGQSKKKTIPPNRHGKAPHVRKGKRAVKPTKFTKDMDAEKELTKFINQCNEIKAANLASKEGGDLNIVKADGEESKSKK

SEQ ID NO: 19958 - protein, 87 aa, Zea mays subsp. mays
  peptide (1)..(87): Ceres Seq. ID no. 14305950
MTQKQTLFKGQSKKKTIPPNRHGKAPHVRKGKRAVKPTKFTKDMDAEKELTKFINQCNEIKAANLASKEGGDLNIVKADGEESKSKK

SEQ ID NO: 19959 - DNA, 376 bp, Zea mays subsp. mays
  misc_feature (1)..(376): Ceres Seq. ID no. 12467650
  misc_feature (1)..(376): Ortholog of  Ceres SEQ ID NO 14310016 as cited in SEQ ID NO 20753
caagagaagctgatatagcaatattggaagaaccagaacatctcaattggtatcatcatgggaaacgctggactgacaagttcaaccatgttgttggtgtagttcatacaaactacctggaatatatcaagagagagaagaatggagctcttcaggcctttctagttaaacacatcaacaattgggtgaccagagcatactgcgacaaggtcttacgtctttctgcagcaactcaagatttaccaaagtctattgtttgcaatgttcatggtgttaacccaaagttcctgaagattggagaagaaataactgccaatagggggagtggggagaacaccactgtgacttgttaaatctgtatgcttattcccactcc

SEQ ID NO: 19960 - protein, 116 aa, Zea mays subsp. mays
  peptide (1)..(116): Ceres Seq. ID no. 12467651
READIAILEEPEHLNWYHHGKRWTDKFNHVVGVVHTNYLEYIKREKNGALQAFLVKHINNWVTRAYCDKVLRLSAATQDLPKSIVCNVHGVNPKFLKIGEEITANRGSGENTTVTC

SEQ ID NO: 19961 - DNA, 443 bp, Zea mays subsp. mays
  misc_feature (1)..(443): Ceres Seq. ID no. 4614034
  misc_feature (1)..(443): Ortholog of  Ceres SEQ ID NO 14303557 as cited in SEQ ID NO 68595
atctgaaacaagaagctttcgcaagctggccagctagctccctaccgactagataccgaggagtgacggatcaggatgggaggggtgacctcgagtgtggcggcgaagatggccttcttcccgccgacgccgccgtcgtacgcgctggtggaggacgccggtgcgggggtcaccacgctcagcggccagccgcaccgggagaacgtcgagttgctgcgcttccgcacccgcaaagggaacacgctggcggcgatgtacgtgcgccacccggacgccgcgtccacggtgctctattcccacggcaacgccgcggacctgggccacctctaccagctcttcctgcatctgtccttcaacctccgcgttaacatcctcgggtatgactattcaggatatgggcaatcatcaggaaagccgagtgaacacaatacttatgctgacat

SEQ ID NO: 19962 - protein, 122 aa, Zea mays subsp. mays
  peptide (1)..(122): Ceres Seq. ID no. 4614035
MGGVTSSVAAKMAFFPPTPPSYALVEDAGAGVTTLSGQPHRENVELLRFRTRKGNTLAAMYVRHPDAASTVLYSHGNAADLGHLYQLFLHLSFNLRVNILGYDYSGYGQSSGKPSEHNTYAD

SEQ ID NO: 19963 - protein, 121 aa, Zea mays subsp. mays
  peptide (1)..(121): Ceres Seq. ID no. 4614036
LKQEAFASWPASSLPTRYRGVTDQDGRGDLECGGEDGLLPADAAVVRAGGGRRCGGHHAQRPAAPGERRVAALPHPQREHAGGDVRAPPGRRVHGALFPRQRRGPGPPLPALPASVLQPPR

SEQ ID NO: 19964 - protein, 111 aa, Zea mays subsp. mays
  peptide (1)..(111): Ceres Seq. ID no. 4614037
MAFFPPTPPSYALVEDAGAGVTTLSGQPHRENVELLRFRTRKGNTLAAMYVRHPDAASTVLYSHGNAADLGHLYQLFLHLSFNLRVNILGYDYSGYGQSSGKPSEHNTYAD

SEQ ID NO: 19965 - DNA, 1940 bp, Zea mays subsp. mays
  misc_feature (1)..(1940): Ceres Seq. ID no. 12435492
  misc_feature (1)..(1940): Ortholog of  Ceres SEQ ID NO 15178181 as cited in SEQ ID NO 58740
  misc_feature (1)..(1940): Ortholog of  Ceres SEQ ID NO 12614739 as cited in SEQ ID NO 68587
agtggccgtgggcgccggcggcggctaacaaaagcgccgggaagtgggcaccgaccgaagcatcccggaacagacacagattaccgcttgtatttagatcggcccagaccatctgacgacgaggaggagggcggggaggcgaggccaaatccggtcggactcggaccggcgaactcccccgacctcgctatgggcagcctccgcgtcgtcggctgggcttggaccgccgccgccgcgccggagtggggcgtgcaccgccgctgctgccgcgggacgccgctggcccgcccccgcgcggcgacgtcctcccttggcgcggggcagctccgggtcgggacggagcncgggtggctctgggattnccncggcggcggcggcgcgggggattacgccagggagatggaggtggcggtgcgcgtcgtgcaggtggcctgcaccctgtgccagcgcgtgcaggactcgctcctccgccccggccccgacgccgccggcggcgacgggcgcgtccacgccaagctcgaccgctcccccgtaaccgtcgctgattggggtgttcaagcgatagtaagctggctgctttccagttcctttcatgatgaggacatatcgatcattgccgaagaagatgatgagacactatctagtagtgacggtgtaactttgcttgaatctgttgttgaggctgtcaacggctgcctggttgaagctccaaactatgggctgagatcccctgagaaagagctcagagctcatgatgttattcaagccatacggaaatgcagctctactggaggcccgaaaggaagattttgggtgcttgatcctgtcgacggcacccttgggtttgtgagaggggaccaatatgctattgctctagccttgattgaagatggagaagttatacttggtgttcttgggtgcccaaattatccaatgaaaaaggagtggctcaattaccatcaaaagtactataggttgatgtctaaggttgctcctcctccattggggtcctggcataaaggttgtgtgatgtatgcccagaaaggatgtggccaagcttggatgcaaccactggttcacgacttcggtaagcttaattggcaccacccaagggagattcaagtatcatccatcagtgatccaatctcagctacgttctgtgaaccagttgagaaagctaactcaagccattccttcacagcaggacttgctcaaagtgtaggattaaggaatcaacctctgcgcgtgtacagcatggtgaaatatgctgcaatagcacgaggcgatgctgaaatcttcatgaaatttgcaagagctggatacaaagagaagatatgggatcatgctgcaggggtggttatcattcaggaggctggtggagtggtcacagatgctggtggccgcccattggacttctcaaggggtgtttacctggaaggtttggatcgaggcataatagcttgttccggagcattgcttcatcaaagaattttaaatgctgttgatgcgagctggaactcatcaacactatgaaccaaacaataaggtcttaggagagaatggcctcatgttggtcatagcatggtaaattggaaaactgatttaagtattcattgtggtgctgttgtgactatggggtaacaccgtaacagtgcagcatataggatagtaatagattgtctgctcatataaacaagaagtcgtctcttgaggctgacaaattgctggcttttgttcaacgatgccatatgtaattttgtataggtgtctgttgatgaaaagcatgtgtgcatgcttttgtttttactaattgacatgtttcttttcaacttgtgcctgtcaatcgtcaggtgtattggttaagacagtgcagcaccatttgctgacaatcataatgttaaaaccttcaactgattcatcaaatgagttattgtccgcct

SEQ ID NO: 19966 - protein, 510 aa, Zea mays subsp. mays
  peptide (1)..(510): Ceres Seq. ID no. 12435493
  misc_feature (115)..(115): Xaa is any aa, unknown or other
  misc_feature (121)..(121): Xaa is any aa, unknown or other
  misc_feature (122)..(122): Xaa is any aa, unknown or other
SGRGRRRRLTKAPGSGHRPKHPGTDTDYRLYLDRPRPSDDEEEGGEARPNPVGLGPANSPDLAMGSLRVVGWAWTAAAAPEWGVHRRCCRGTPLARPRAATSSLGAGQLRVGTEXGWLWDXXGGGGAGDYAREMEVAVRVVQVACTLCQRVQDSLLRPGPDAAGGDGRVHAKLDRSPVTVADWGVQAIVSWLLSSSFHDEDISIIAEEDDETLSSSDGVTLLESVVEAVNGCLVEAPNYGLRSPEKELRAHDVIQAIRKCSSTGGPKGRFWVLDPVDGTLGFVRGDQYAIALALIEDGEVILGVLGCPNYPMKKEWLNYHQKYYRLMSKVAPPPLGSWHKGCVMYAQKGCGQAWMQPLVHDFGKLNWHHPREIQVSSISDPISATFCEPVEKANSSHSFTAGLAQSVGLRNQPLRVYSMVKYAAIARGDAEIFMKFARAGYKEKIWDHAAGVVIIQEAGGVVTDAGGRPLDFSRGVYLEGLDRGIIACSGALLHQRILNAVDASWNSSTL

SEQ ID NO: 19967 - protein, 447 aa, Zea mays subsp. mays
  peptide (1)..(447): Ceres Seq. ID no. 12435494
  misc_feature (52)..(52): Xaa is any aa, unknown or other
  misc_feature (58)..(58): Xaa is any aa, unknown or other
  misc_feature (59)..(59): Xaa is any aa, unknown or other
MGSLRVVGWAWTAAAAPEWGVHRRCCRGTPLARPRAATSSLGAGQLRVGTEXGWLWDXXGGGGAGDYAREMEVAVRVVQVACTLCQRVQDSLLRPGPDAAGGDGRVHAKLDRSPVTVADWGVQAIVSWLLSSSFHDEDISIIAEEDDETLSSSDGVTLLESVVEAVNGCLVEAPNYGLRSPEKELRAHDVIQAIRKCSSTGGPKGRFWVLDPVDGTLGFVRGDQYAIALALIEDGEVILGVLGCPNYPMKKEWLNYHQKYYRLMSKVAPPPLGSWHKGCVMYAQKGCGQAWMQPLVHDFGKLNWHHPREIQVSSISDPISATFCEPVEKANSSHSFTAGLAQSVGLRNQPLRVYSMVKYAAIARGDAEIFMKFARAGYKEKIWDHAAGVVIIQEAGGVVTDAGGRPLDFSRGVYLEGLDRGIIACSGALLHQRILNAVDASWNSSTL

SEQ ID NO: 19968 - protein, 377 aa, Zea mays subsp. mays
  peptide (1)..(377): Ceres Seq. ID no. 12435495
MEVAVRVVQVACTLCQRVQDSLLRPGPDAAGGDGRVHAKLDRSPVTVADWGVQAIVSWLLSSSFHDEDISIIAEEDDETLSSSDGVTLLESVVEAVNGCLVEAPNYGLRSPEKELRAHDVIQAIRKCSSTGGPKGRFWVLDPVDGTLGFVRGDQYAIALALIEDGEVILGVLGCPNYPMKKEWLNYHQKYYRLMSKVAPPPLGSWHKGCVMYAQKGCGQAWMQPLVHDFGKLNWHHPREIQVSSISDPISATFCEPVEKANSSHSFTAGLAQSVGLRNQPLRVYSMVKYAAIARGDAEIFMKFARAGYKEKIWDHAAGVVIIQEAGGVVTDAGGRPLDFSRGVYLEGLDRGIIACSGALLHQRILNAVDASWNSSTL

SEQ ID NO: 19969 - DNA, 1467 bp, Zea mays subsp. mays; identical to SEQ ID NO: 2977
  misc_feature (1)..(1467): Ceres Seq. ID no. 12378238
  misc_feature (1)..(1467): Ortholog of  Ceres SEQ ID NO 13592961 as cited in SEQ ID NO 20522
  misc_feature (1)..(1467): Ortholog of  Ceres SEQ ID NO 12583469 as cited in SEQ ID NO 51031
  misc_feature (1)..(1467): Ortholog of  Ceres SEQ ID NO 13597389 as cited in SEQ ID NO 63426
  misc_feature (1)..(1467): Ortholog of  Ceres SEQ ID NO 14303071 as cited in SEQ ID NO 67114
  misc_feature (1)..(1467): Ortholog of  Ceres SEQ ID NO 13595998 as cited in SEQ ID NO 68161

SEQ ID NO: 19970 - protein, 377 aa, Zea mays subsp. mays; identical to SEQ ID NO: 2978
  peptide (1)..(377): Ceres Seq. ID no. 12378239

SEQ ID NO: 19971 - protein, 315 aa, Zea mays subsp. mays; identical to SEQ ID NO: 2979
  peptide (1)..(315): Ceres Seq. ID no. 12378240

SEQ ID NO: 19972 - protein, 267 aa, Zea mays subsp. mays; identical to SEQ ID NO: 2980
  peptide (1)..(267): Ceres Seq. ID no. 12378241

SEQ ID NO: 19973 - DNA, 377 bp, Zea mays subsp. mays
  misc_feature (1)..(377): Ceres Seq. ID no. 13573995
  misc_feature (1)..(377): Ortholog of  Ceres SEQ ID NO 15169072 as cited in SEQ ID NO 53955
  misc_feature (1)..(377): Ortholog of  Ceres SEQ ID NO 13659394 as cited in SEQ ID NO 67049
catcgattttcaaatcgctcagggtagtcagtggatgactatgatacaggcccttgcttcaaggcctgggaggcgaccatacctaaggatcactggcatagatgactcgaattctgctcatgcccgaggtggtggactggatatggttggacagaggttgcacagaatggcccagtcatgtggtctgcccttcgagttcaatgctgtgccagcagctagtcatgaggttgtgtttgaagatctttgtctaagatctggggaggccatcgttgtcaattttgcttatcagctgcatcatactcctgatgagagcgtgggcatagaaaaccatcgtgatagaatactgagaatggtcaagagcctctctcctaaggtgg

SEQ ID NO: 19974 - protein, 125 aa, Zea mays subsp. mays
  peptide (1)..(125): Ceres Seq. ID no. 13573996
IDFQIAQGSQWMTMIQALASRPGRRPYLRITGIDDSNSAHARGGGLDMVGQRLHRMAQSCGLPFEFNAVPAASHEVVFEDLCLRSGEAIVVNFAYQLHHTPDESVGIENHRDRILRMVKSLSPKV

SEQ ID NO: 19975 - protein, 114 aa, Zea mays subsp. mays
  peptide (1)..(114): Ceres Seq. ID no. 13573997
MTMIQALASRPGRRPYLRITGIDDSNSAHARGGGLDMVGQRLHRMAQSCGLPFEFNAVPAASHEVVFEDLCLRSGEAIVVNFAYQLHHTPDESVGIENHRDRILRMVKSLSPKV

SEQ ID NO: 19976 - protein, 112 aa, Zea mays subsp. mays
  peptide (1)..(112): Ceres Seq. ID no. 13573998
MIQALASRPGRRPYLRITGIDDSNSAHARGGGLDMVGQRLHRMAQSCGLPFEFNAVPAASHEVVFEDLCLRSGEAIVVNFAYQLHHTPDESVGIENHRDRILRMVKSLSPKV

SEQ ID NO: 19977 - DNA, 1841 bp, Zea mays subsp. mays
  misc_feature (1)..(1841): Ceres Seq. ID no. 12384305
  misc_feature (1)..(1841): Ortholog of  Ceres SEQ ID NO 13663419 as cited in SEQ ID NO 66561
ctctcgcgctaccgctctcttgaaggaagtctccgtccccgcttctgattcactcccccacatcgccatatgtcgccggaggccggaccaatcatgcggcccgccgaccagctactcctcccgttcctcctcctggccgttgcctccgtcgctgccgccggcggctcgtgggagaatggatatgggagcatcctccgcctcccctcctcgtctccgcgccggttcccccgctccgcggccgtcgacctgatccacgcgctcaacctccaccccgccgacgcgtcccctcccctctccaccgccggcgtagagggcgccctcgcccccgcggggaccctcgtcgagaggcccatccgcatcgcgtccttcgcgaacggaggcgccgccacgtcggtggaggacctcggccaccacgcggggtattaccgcctcgccaacacccacgacgccaggatgttctacttcttcttcgagtcgaggggccacaaggacgaccccgtggtgatctggctcacgggcgggcccggctgcagcagcgagctcgcgctcttctacgagaacggccccttcaacatagcggacaacttgtcgctcgtctggaatgattttggttgggacaaggcatcaaatcttatctatgtcgaccagcccactggaactgggtttagttacagctcggattcgcgtgacactcgccacaacgaagctactattagcaatgatctatatgatttcctgcaggccttttttgctgagcacccaaagtatgctaaaaatgatttcttcataactggggaatcatatgctgggcattacattcctgcctttgcaagtcgtgtgcaccagggaaacaagaacaatgagggcattcacattaacttgaagggttttgctattggcaacggactaacagatccagcaatacagtacaaggcataccctgattacgcattggatatgggattaattacaaaaacacaatttaacaggatcaataaaatagttccaacttgtgaattcgcggtcaagctttgtggtacttctggaactgtatcttgccttgctgcgtactttgtctgcaatacaatattcagtgccatcaggacaatcataggcaataaaaattattacgacatcaggaaaccatgcatcggaagcctatgctatgatttctctaatttggagaaatttctcaacctcaaatctgtcagagagagcctaggggttggagatatagagtttgtttcatgcagcccaactgtctatgaggccatgctattagattggatgaggaaccttgaagttggaatccctgaactccttgagagcgacatcaaagtgttgatttatgctggagagtatgacctcatatgtaactggcttgggaactcaaggtgggtaaactctatggaatggtctggaaaggaagcttttgtgtcctcatccgagaagcccttcacagtcgacgggaaagaagctggcgttctaaagagccacggtcctttgagtttcttgaaggttcacgatgctggtcacatggtacctatggatcaaccgaaggctgctctggagatgctgaagaggtggacttctggaaacctttcggagccatcttcaagctcccagaggcttgattttacaatgtaacaaaacacacatgctgctcatgacatttcgagcatgtacctctggatgtttgtaggctcagaaaaggtcctggtcttaggctctgaaaacctcatctggcgaccatacgttatttaccttgtatgggcgctccgcttgctggtgagacacggtgttacgagttacgactcgatgaacatgtaataaagcttttc

SEQ ID NO: 19978 - protein, 525 aa, Zea mays subsp. mays
  peptide (1)..(525): Ceres Seq. ID no. 12384306
MSPEAGPIMRPADQLLLPFLLLAVASVAAAGGSWENGYGSILRLPSSSPRRFPRSAAVDLIHALNLHPADASPPLSTAGVEGALAPAGTLVERPIRIASFANGGAATSVEDLGHHAGYYRLANTHDARMFYFFFESRGHKDDPVVIWLTGGPGCSSELALFYENGPFNIADNLSLVWNDFGWDKASNLIYVDQPTGTGFSYSSDSRDTRHNEATISNDLYDFLQAFFAEHPKYAKNDFFITGESYAGHYIPAFASRVHQGNKNNEGIHINLKGFAIGNGLTDPAIQYKAYPDYALDMGLITKTQFNRINKIVPTCEFAVKLCGTSGTVSCLAAYFVCNTIFSAIRTIIGNKNYYDIRKPCIGSLCYDFSNLEKFLNLKSVRESLGVGDIEFVSCSPTVYEAMLLDWMRNLEVGIPELLESDIKVLIYAGEYDLICNWLGNSRWVNSMEWSGKEAFVSSSEKPFTVDGKEAGVLKSHGPLSFLKVHDAGHMVPMDQPKAALEMLKRWTSGNLSEPSSSSQRLDFTM

SEQ ID NO: 19979 - protein, 517 aa, Zea mays subsp. mays
  peptide (1)..(517): Ceres Seq. ID no. 12384307
MRPADQLLLPFLLLAVASVAAAGGSWENGYGSILRLPSSSPRRFPRSAAVDLIHALNLHPADASPPLSTAGVEGALAPAGTLVERPIRIASFANGGAATSVEDLGHHAGYYRLANTHDARMFYFFFESRGHKDDPVVIWLTGGPGCSSELALFYENGPFNIADNLSLVWNDFGWDKASNLIYVDQPTGTGFSYSSDSRDTRHNEATISNDLYDFLQAFFAEHPKYAKNDFFITGESYAGHYIPAFASRVHQGNKNNEGIHINLKGFAIGNGLTDPAIQYKAYPDYALDMGLITKTQFNRINKIVPTCEFAVKLCGTSGTVSCLAAYFVCNTIFSAIRTIIGNKNYYDIRKPCIGSLCYDFSNLEKFLNLKSVRESLGVGDIEFVSCSPTVYEAMLLDWMRNLEVGIPELLESDIKVLIYAGEYDLICNWLGNSRWVNSMEWSGKEAFVSSSEKPFTVDGKEAGVLKSHGPLSFLKVHDAGHMVPMDQPKAALEMLKRWTSGNLSEPSSSSQRLDFTM

SEQ ID NO: 19980 - protein, 397 aa, Zea mays subsp. mays
  peptide (1)..(397): Ceres Seq. ID no. 12384308
MFYFFFESRGHKDDPVVIWLTGGPGCSSELALFYENGPFNIADNLSLVWNDFGWDKASNLIYVDQPTGTGFSYSSDSRDTRHNEATISNDLYDFLQAFFAEHPKYAKNDFFITGESYAGHYIPAFASRVHQGNKNNEGIHINLKGFAIGNGLTDPAIQYKAYPDYALDMGLITKTQFNRINKIVPTCEFAVKLCGTSGTVSCLAAYFVCNTIFSAIRTIIGNKNYYDIRKPCIGSLCYDFSNLEKFLNLKSVRESLGVGDIEFVSCSPTVYEAMLLDWMRNLEVGIPELLESDIKVLIYAGEYDLICNWLGNSRWVNSMEWSGKEAFVSSSEKPFTVDGKEAGVLKSHGPLSFLKVHDAGHMVPMDQPKAALEMLKRWTSGNLSEPSSSSQRLDFTM

SEQ ID NO: 19981 - DNA, 864 bp, Zea mays subsp. mays
  misc_feature (1)..(864): Ceres Seq. ID no. 12418353
  misc_feature (1)..(864): Ortholog of  Ceres SEQ ID NO 14308727 as cited in SEQ ID NO 58726
  misc_feature (1)..(864): Ortholog of  Ceres SEQ ID NO 13663517 as cited in SEQ ID NO 66850
acctctgttcagccaaagccacctccccaaacccaatcccgtcactatctcattcccctgaccgccggaacaccctaggcaatggagcccaaatccaccacccctcccccgccccccgtgatgggcgcgcccatcgcgtatcctcccccgcccggcgccgcgtaccccgccgggccgtacgtgcacgcgccggcggccgcgctctaccctcctcctcccctgccgccggcgcccccctcctcgcagcagggcgccgcggcggcgcaccagcagcagctattctgggcggagcaataccgcgagatcgaggccaccaccgacttcaagaaccacaacctgccgctcgcccgcatcaagaagatcatgaaggccgacgaggacgtgcgcatgatcgccgccgaggcgcccgtcgtcttctcccgcgcctgcgagatgttcatcctcgagctcacccaccgcggctgggcacacgccgaggagaacaagcgccgcacgctgcagaagtccgacatcgccgccgccgtcgcgcgcaccgaggtcttcgacttcctcgtcgacatcgtgccgcgggacgaggccaaggacgccgactccgccgccatgggagcagccgggatcccgcaccccgccgccggcctgcccgccgccgatcccatgggctactactacgtccagccgcagtaacgaatttgcttccttatcatggtttcgcttccatgcagcctttgcgggtttttagtaaactattattattactgagagtgccctgttgttacccatgctctgttgttgccacccaataactcgatgacctgatgatcatctgatgtgcctcccgttccgtaacaagtgattccatttctg

SEQ ID NO: 19982 - protein, 266 aa, Zea mays subsp. mays
  peptide (1)..(266): Ceres Seq. ID no. 12418354
LCSAKATSPNPIPSLSHSPDRRNTLGNGAQIHHPSPAPRDGRAHRVSSPARRRVPRRAVRARAGGRALPSSSPAAGAPLLAAGRRGGAPAAAILGGAIPRDRGHHRLQEPQPAARPHQEDHEGRRGRAHDRRRGARRLLPRLRDVHPRAHPPRLGTRRGEQAPHAAEVRHRRRRRAHRGLRLPRRHRAAGRGQGRRLRRHGSSRDPAPRRRPARRRSHGLLLRPAAVTNLLPYHGFASMQPLRVFSKLLLLLRVPCCYPCSVVATQ

SEQ ID NO: 19983 - protein, 200 aa, Zea mays subsp. mays
  peptide (1)..(200): Ceres Seq. ID no. 12418355
MEPKSTTPPPPPVMGAPIAYPPPPGAAYPAGPYVHAPAAALYPPPPLPPAPPSSQQGAAAAHQQQLFWAEQYREIEATTDFKNHNLPLARIKKIMKADEDVRMIAAEAPVVFSRACEMFILELTHRGWAHAEENKRRTLQKSDIAAAVARTEVFDFLVDIVPRDEAKDADSAAMGAAGIPHPAAGLPAADPMGYYYVQPQ

SEQ ID NO: 19984 - protein, 187 aa, Zea mays subsp. mays
  peptide (1)..(187): Ceres Seq. ID no. 12418356
MGAPIAYPPPPGAAYPAGPYVHAPAAALYPPPPLPPAPPSSQQGAAAAHQQQLFWAEQYREIEATTDFKNHNLPLARIKKIMKADEDVRMIAAEAPVVFSRACEMFILELTHRGWAHAEENKRRTLQKSDIAAAVARTEVFDFLVDIVPRDEAKDADSAAMGAAGIPHPAAGLPAADPMGYYYVQPQ

SEQ ID NO: 19985 - DNA, 400 bp, Zea mays subsp. mays
  misc_feature (1)..(400): Ceres Seq. ID no. 2731917
  misc_feature (1)..(400): Ortholog of  Ceres SEQ ID NO 15175775 as cited in SEQ ID NO 57075
gacctcgccgccttcatcgccgactgcatatacgaccaggacaaggccaacaaggtgctgcccattggcgggccggggaaggcgctcacgccgctggagcagggggagatgctgtttcggctgctcgggcgcgagcccaagttcatcaaggtgcccatacagatcatggacgccgttatctgggtgctcgatggattggccaagctgttcccggggttggaggacgccgccgagttcggcaagattggcaggtactatgcctcggagagcatgctgttgctggacccggagaccggggagtacagcgacgagaagacgcccagctacggcaaggacacgctcgagcagttcttccaaagagtgataagggaagggatggcggggcargagcttggcgagc

SEQ ID NO: 19986 - protein, 133 aa, Zea mays subsp. mays
  peptide (1)..(133): Ceres Seq. ID no. 2731918
  misc_feature (129)..(129): Xaa is any aa, unknown or other
DLAAFIADCIYDQDKANKVLPIGGPGKALTPLEQGEMLFRLLGREPKFIKVPIQIMDAVIWVLDGLAKLFPGLEDAAEFGKIGRYYASESMLLLDPETGEYSDEKTPSYGKDTLEQFFQRVIREGMAGXELGE

SEQ ID NO: 19987 - protein, 132 aa, Zea mays subsp. mays
  peptide (1)..(132): Ceres Seq. ID no. 2731919
  misc_feature (129)..(129): Xaa is any aa, unknown or other
PRRLHRRLHIRPGQGQQGAAHWRAGEGAHAAGAGGDAVSAARARAQVHQGAHTDHGRRYLGARWIGQAVPGVGGRRRVRQDWQVLCLGEHAVAGPGDRGVQRREDAQLRQGHARAVLPKSDKGRDGGAXAWR

SEQ ID NO: 19988 - protein, 120 aa, Zea mays subsp. mays
  peptide (1)..(120): Ceres Seq. ID no. 2731920
TSPPSSPTAYTTRTRPTRCCPLAGRGRRSRRWSRGRCCFGCSGASPSSSRCPYRSWTPLSGCSMDWPSCSRGWRTPPSSARLAGTMPRRACCCWTRRPGSTATRRRPATARTRSSSSSKE

SEQ ID NO: 19989 - DNA, 1828 bp, Zea mays subsp. mays
  misc_feature (1)..(1828): Ceres Seq. ID no. 13495214
  misc_feature (1)..(1828): Ortholog of  Ceres SEQ ID NO 14308041 as cited in SEQ ID NO 62601
  misc_feature (1)..(1828): Ortholog of  Ceres SEQ ID NO 14307995 as cited in SEQ ID NO 63970
  misc_feature (1)..(1828): Ortholog of  Ceres SEQ ID NO 14308007 as cited in SEQ ID NO 65760
  misc_feature (1)..(1828): Ortholog of  Ceres SEQ ID NO 15169585 as cited in SEQ ID NO 66076
  misc_feature (1)..(1828): Ortholog of  Ceres SEQ ID NO 13502874 as cited in SEQ ID NO 66298
gcacgagaccattacctagaacatcctaatcgaaaaaaaccggagcggcggcaccatttcgttaccatggagaacctggcagggcagcagttcgtttatgaggtgacgagtctacgagcattgtttctgctgctcctcctccctcccttcatcttcctcatcatgcgcaacgcgcgagcaacaacactaatgttcgataccaagaggacaaggggccaccggcagcctgcagatcggcagcagagcctcccgccgtcgcctccggcagtgcctgtcctcggccacctgcacctcgtcggctctctcccgcacgtctccctccgcagcctcgccaggacgcttggcgcggacctcatgctgctccgcctgggctccacgccggtgctggtcgtgtcgtcgtccagcgccgccgaggccgtgctgcgcacgcacgaccacgtgttcgcgtcgcggccgcacgccctggtctccgaggtcgtcctgtacggtccgtccgacgtcgggttcgcgccgcacggcgactgctggcggcccggggcggaagctcatcaccacgcaccttctcagcgtcaacagggtgcagtcgttccgccacgcccgggaagaagaggtgagcgtggtgatgggccggatcgccgaggcggcggccgctggtgcggcggtggacgtgggcgagctgctcggctcgttcacgaacgacctagcgtgccgcgccgtgatgggcaagtccttccggagcgagggtcgcaacaagctgttccgggagcttgtcctcgacaccaccaagctgctggtcggcttcaacgtcgaggacttcttccccttcctggctcgcttcggcgtgctcagcaagctggtccgcgccaagtccgagagactgaggaggaggtgggacgagctactcgataggctgatcgaggatcgtgagagcaagtatgaggcggcggcggcgagtgatctcaaggtcaaggacgatgatgacgataacttcatacatgtcttgctctccgttcaacaggagtacggccatattaccagggagcaaatgaaagctctcctgcaggacgtgtttatcggggggatagactccacatcttcgctgctcgagttcaccatggctgagctcatgcggaaaccacgagtgatgaacaagctccaagccgaggtaaggagcagcacgcccgaggggcatgatggagtcgtcggcgaagatagcctggagcacatggcctacctgagggccgtgacaaaagagtccctccggatccataacgtgacgccgctcctggccccgcacctgtccatggatagctgcaccatcgatggctacacggtccccgccggggtgcaggtcctgatcaactcttgggccatcggcagggacacgcgctactggggcgacgacgctgaggagttcgtccctgagaggttcatggacggcggcagcgccgttcatgtcagcttcaaggggagtgacttcgagttcctgccattcgggtctggacgaaggatgtgcgccggggtgaacttcgcgatggccacggtagagctaatgttggcgaacctcgtgcatcgttttgactgggatttaccaccggggcaggagggtcgcgacattgatgtgtcgcaggtgttcggactagtagtccgccggaaaaagaaacttctcttggttccaaaattacgtgtatactagcatccccctccccgcacccaagatatactgggctgttgcatatatgtatgtactgcaataaaggttgcctatatgtaagcttacgacattacttgtactgggtatatgatgcaataatgttattagaaattt

SEQ ID NO: 19990 - protein, 357 aa, Zea mays subsp. mays
  peptide (1)..(357): Ceres Seq. ID no. 13495215
MGRIAEAAAAGAAVDVGELLGSFTNDLACRAVMGKSFRSEGRNKLFRELVLDTTKLLVGFNVEDFFPFLARFGVLSKLVRAKSERLRRRWDELLDRLIEDRESKYEAAAASDLKVKDDDDDNFIHVLLSVQQEYGHITREQMKALLQDVFIGGIDSTSSLLEFTMAELMRKPRVMNKLQAEVRSSTPEGHDGVVGEDSLEHMAYLRAVTKESLRIHNVTPLLAPHLSMDSCTIDGYTVPAGVQVLINSWAIGRDTRYWGDDAEEFVPERFMDGGSAVHVSFKGSDFEFLPFGSGRRMCAGVNFAMATVELMLANLVHRFDWDLPPGQEGRDIDVSQVFGLVVRRKKKLLLVPKLRVY

SEQ ID NO: 19991 - protein, 325 aa, Zea mays subsp. mays
  peptide (1)..(325): Ceres Seq. ID no. 13495216
MGKSFRSEGRNKLFRELVLDTTKLLVGFNVEDFFPFLARFGVLSKLVRAKSERLRRRWDELLDRLIEDRESKYEAAAASDLKVKDDDDDNFIHVLLSVQQEYGHITREQMKALLQDVFIGGIDSTSSLLEFTMAELMRKPRVMNKLQAEVRSSTPEGHDGVVGEDSLEHMAYLRAVTKESLRIHNVTPLLAPHLSMDSCTIDGYTVPAGVQVLINSWAIGRDTRYWGDDAEEFVPERFMDGGSAVHVSFKGSDFEFLPFGSGRRMCAGVNFAMATVELMLANLVHRFDWDLPPGQEGRDIDVSQVFGLVVRRKKKLLLVPKLRVY

SEQ ID NO: 19992 - protein, 302 aa, Zea mays subsp. mays
  peptide (1)..(302): Ceres Seq. ID no. 13495217
ARDHYLEHPNRKKPERRHHFVTMENLAGQQFVYEVTSLRALFLLLLLPPFIFLIMRNARATTLMFDTKRTRGHRQPADRQQSLPPSPPAVPVLGHLHLVGSLPHVSLRSLARTLGADLMLLRLGSTPVLVVSSSSAAEAVLRTHDHVFASRPHALVSEVVLYGPSDVGFAPHGDCWRPGAEAHHHAPSQRQQGAVVPPRPGRRGERGDGPDRRGGGRWCGGGRGRAARLVHERPSVPRRDGQVLPERGSQQAVPGACPRHHQAAGRLQRRGLLPLPGSLRRAQQAGPRQVRETEEEVGRATR

SEQ ID NO: 19993 - DNA, 508 bp, Zea mays subsp. mays
  misc_feature (1)..(508): Ceres Seq. ID no. 12378052
  misc_feature (1)..(508): Ortholog of  Ceres SEQ ID NO 14316546 as cited in SEQ ID NO 60020
atcgtttctgctttgcaagtcaatcaaactgagccagtgaagaagtttgagcccagatctaaactgtggtctgatactttgagccgaggtctagtcaatctggacatttctggaccaaaagcgaatcctcatgctgatattggagttgactttgattcaatcaatcgcaaggagaaaaggcaggaaaagaaaatcaaccaagcacctgtggtgtctacagtcaccatgggcaaggccatgggagctggttccggcattggtcgggctggtgtaggtgcaatggcacctcctcctaaccaaatgggtgccgggaggggtatgggtcctggtgccggtgccggttatggtggtggaatgggaatgaaccggccaatgggcatggggatgggaatgaatcaacaacagatgaggatggggatgaaccaacaaccgatgggaatggggatggggatgaaccaacaaccgatgggaggaatgaacatggggatggggatgaaccannggatgc

SEQ ID NO: 19994 - protein, 169 aa, Zea mays subsp. mays
  peptide (1)..(169): Ceres Seq. ID no. 12378053
  misc_feature (167)..(167): Xaa is any aa, unknown or other
  misc_feature (168)..(168): Xaa is any aa, unknown or other
IVSALQVNQTEPVKKFEPRSKLWSDTLSRGLVNLDISGPKANPHADIGVDFDSINRKEKRQEKKINQAPVVSTVTMGKAMGAGSGIGRAGVGAMAPPPNQMGAGRGMGPGAGAGYGGGMGMNRPMGMGMGMNQQQMRMGMNQQPMGMGMGMNQQPMGGMNMGMGMNXXM

SEQ ID NO: 19995 - protein, 94 aa, Zea mays subsp. mays
  peptide (1)..(94): Ceres Seq. ID no. 12378054
  misc_feature (92)..(92): Xaa is any aa, unknown or other
  misc_feature (93)..(93): Xaa is any aa, unknown or other
MGKAMGAGSGIGRAGVGAMAPPPNQMGAGRGMGPGAGAGYGGGMGMNRPMGMGMGMNQQQMRMGMNQQPMGMGMGMNQQPMGGMNMGMGMNXXM

SEQ ID NO: 19996 - protein, 90 aa, Zea mays subsp. mays
  peptide (1)..(90): Ceres Seq. ID no. 12378055
  misc_feature (88)..(88): Xaa is any aa, unknown or other
  misc_feature (89)..(89): Xaa is any aa, unknown or other
MGAGSGIGRAGVGAMAPPPNQMGAGRGMGPGAGAGYGGGMGMNRPMGMGMGMNQQQMRMGMNQQPMGMGMGMNQQPMGGMNMGMGMNXXM

SEQ ID NO: 19997 - DNA, 433 bp, Zea mays subsp. mays
  misc_feature (1)..(433): Ceres Seq. ID no. 13635227
  misc_feature (1)..(433): Ortholog of  Ceres SEQ ID NO 15226273 as cited in SEQ ID NO 64934
  misc_feature (1)..(433): Ortholog of  Ceres SEQ ID NO 12617639 as cited in SEQ ID NO 65219
gcttcactcgcgtccgccccgccgccgcctttcgtcccagcccctaaaccattctccattcctctcatcagtttagcacaatggcactggctaataagcttggtggtctgctcaagaaagccacaagttcaaatctgtctgtctaccaagcaatcagatgcatgtcatccaagctctttgttggagggatttcttatcaaactgatgatcacagtctcagggacgagtttgccaaatatgggcaagtcattgaagctaggattatcattgaccgtgaatctgggaggtctagaggttttggctttgtaacttacacgtcttctgaggaggcttcagctgccattactgccttggatggaaagactctcgatggacggagcatacgtgttaatcatgctaacgagaagacaggtggctttcgtggcggcggtgg

SEQ ID NO: 19998 - protein, 117 aa, Zea mays subsp. mays
  peptide (1)..(117): Ceres Seq. ID no. 13635228
MALANKLGGLLKKATSSNLSVYQAIRCMSSKLFVGGISYQTDDHSLRDEFAKYGQVIEARIIIDRESGRSRGFGFVTYTSSEEASAAITALDGKTLDGRSIRVNHANEKTGGFRGGG

SEQ ID NO: 19999 - protein, 102 aa, Zea mays subsp. mays
  peptide (1)..(102): Ceres Seq. ID no. 13635229
ASLASAPPPPFVPAPKPFSIPLISLAQWHWLISLVVCSRKPQVQICLSTKQSDACHPSSLLEGFLIKLMITVSGTSLPNMGKSLKLGLSLTVNLGGLEVLAL

SEQ ID NO: 20000 - protein, 90 aa, Zea mays subsp. mays
  peptide (1)..(90): Ceres Seq. ID no. 13635230
MSSKLFVGGISYQTDDHSLRDEFAKYGQVIEARIIIDRESGRSRGFGFVTYTSSEEASAAITALDGKTLDGRSIRVNHANEKTGGFRGGG

SEQ ID NO: 20001 - DNA, 1919 bp, Zea mays subsp. mays
  misc_feature (1)..(1919): Ceres Seq. ID no. 13493088
  misc_feature (1)..(1919): Ortholog of  Ceres SEQ ID NO 13595414 as cited in SEQ ID NO 56539
  misc_feature (1)..(1919): Ortholog of  Ceres SEQ ID NO 14314396 as cited in SEQ ID NO 60048
atgtacacattgcccgtccgtgccaccacatccagcatcgtcgccagcctcgccacccccgcgccgtcctcctcctccggctccggccgccccaggctcaggctcatccggaacgcccccgtcttcgccgcccccgccaccgtctgtaaacgggacggcgggcagctgaggagtcaaacgagagagatcgagagagaaagaaagggagggcatccaccagccggcgggcataagaggggaggagagagaggccagagaagaggaggagaagaagaagaagatgagcagctgcctctgccttccgaaaaaaaaggaggggccagcgaaggagaagccgtccacagatacccccacctcgtcactccttcagaaccagaagccctccaacctccacctcctccctccaaggcttcctccaagggcatggaccccaccgtcgagcgcttgaagagcgggttccagaagttcaagaccgaggtctatgacaagaagccggagctgttcgagcctctcaagtccggccagagccccaggtacatggtgttcgcctgctccgactcccgcgtgtgcccgtcggtgacactgggactgcagcccggcgaggcattcaccgtccgcaacatcgcttccatggtcccaccctacgacaagatcaagtacgccggcacagggtccgccatcgagtacgccgtgtgcgcgctcaaggtgcaggtcatcgtggtcattggccacagctgctgcggtggcatcagggcgctcctctccctcaaggacggcgcgcccgacaacttcaccttcgtggaggactgggtcaggatcggcagccctgccaagaacaaggtgaagaaagagcacgcgtccgtgccgttcgatgaccagtgctccatcctggagaaggaggccgtgaacgtgtcgctccagaacctcaagagctaccccttcgtcaaggaagggctggccggcgggacgctcaagctggttggcgcccactcacacttcgtcaaagggcagttcgtcacatgggagcctccccaggacgccatcgagcgcttgacgagcggcttccagcagttcaaggtcaatgtctatgacaagaagccggagcttttcgggcctctcaagtccggccaggcccccaagtacatggtgttcgcctgctccgactcccgtgtgtgcccgtcggtgaccctgggcctgcagccgggcgaggccttcaccgttcgcaacatcgccgccatggtcccaggctacgacaagaccaagtacaccggcatcgggtccgccatcgagtacgctgtgtgcgccctcaaggtggaggtcctcgtggtcattggccatagctgctgcggtggcatcagggcgctcctctcactccaggacggcgcagcctacaccttccacttcgtcgaggactgggttaagatcggcttcattgccaagatgaaggtaaagaaagagcacgcctcggtgccgttcgatgaccagtgctccattctcgagaaggaggccgtgaacgtgtccctggagaacctcaagacctaccccttcgtcaaggaagggcttgcaaatgggaccctcaagctgatcggcgcccactacgactttgtctcaggagagttcctcacatggaaaaagtgaaaaactagggctaaggcaattctaccggcccgccgactctgcatcatcataatatatatactataactatactactagctacctaccgatagtcacccgagcaatgtgaatgcgtcgagtactatctgttttctgcatctacatatatataccggatcaacaatcgcccaatgtgaatgtaataagcaatatcattttctaccacttttcattcctaacgctgaggctttttatgtactatatcttatatgatgaataataatatgaccgccttgtgatct

SEQ ID NO: 20002 - protein, 545 aa, Zea mays subsp. mays
  peptide (1)..(545): Ceres Seq. ID no. 13493089
MYTLPVRATTSSIVASLATPAPSSSSGSGRPRLRLIRNAPVFAAPATVCKRDGGQLRSQTREIERERKGGHPPAGGHKRGGERGQRRGGEEEEDEQLPLPSEKKGGASEGEAVHRYPHLVTPSEPEALQPPPPPSKASSKGMDPTVERLKSGFQKFKTEVYDKKPELFEPLKSGQSPRYMVFACSDSRVCPSVTLGLQPGEAFTVRNIASMVPPYDKIKYAGTGSAIEYAVCALKVQVIVVIGHSCCGGIRALLSLKDGAPDNFTFVEDWVRIGSPAKNKVKKEHASVPFDDQCSILEKEAVNVSLQNLKSYPFVKEGLAGGTLKLVGAHSHFVKGQFVTWEPPQDAIERLTSGFQQFKVNVYDKKPELFGPLKSGQAPKYMVFACSDSRVCPSVTLGLQPGEAFTVRNIAAMVPGYDKTKYTGIGSAIEYAVCALKVEVLVVIGHSCCGGIRALLSLQDGAAYTFHFVEDWVKIGFIAKMKVKKEHASVPFDDQCSILEKEAVNVSLENLKTYPFVKEGLANGTLKLIGAHYDFVSGEFLTWKK

SEQ ID NO: 20003 - protein, 404 aa, Zea mays subsp. mays
  peptide (1)..(404): Ceres Seq. ID no. 13493090
MDPTVERLKSGFQKFKTEVYDKKPELFEPLKSGQSPRYMVFACSDSRVCPSVTLGLQPGEAFTVRNIASMVPPYDKIKYAGTGSAIEYAVCALKVQVIVVIGHSCCGGIRALLSLKDGAPDNFTFVEDWVRIGSPAKNKVKKEHASVPFDDQCSILEKEAVNVSLQNLKSYPFVKEGLAGGTLKLVGAHSHFVKGQFVTWEPPQDAIERLTSGFQQFKVNVYDKKPELFGPLKSGQAPKYMVFACSDSRVCPSVTLGLQPGEAFTVRNIAAMVPGYDKTKYTGIGSAIEYAVCALKVEVLVVIGHSCCGGIRALLSLQDGAAYTFHFVEDWVKIGFIAKMKVKKEHASVPFDDQCSILEKEAVNVSLENLKTYPFVKEGLANGTLKLIGAHYDFVSGEFLTWKK

SEQ ID NO: 20004 - protein, 366 aa, Zea mays subsp. mays
  peptide (1)..(366): Ceres Seq. ID no. 13493091
MVFACSDSRVCPSVTLGLQPGEAFTVRNIASMVPPYDKIKYAGTGSAIEYAVCALKVQVIVVIGHSCCGGIRALLSLKDGAPDNFTFVEDWVRIGSPAKNKVKKEHASVPFDDQCSILEKEAVNVSLQNLKSYPFVKEGLAGGTLKLVGAHSHFVKGQFVTWEPPQDAIERLTSGFQQFKVNVYDKKPELFGPLKSGQAPKYMVFACSDSRVCPSVTLGLQPGEAFTVRNIAAMVPGYDKTKYTGIGSAIEYAVCALKVEVLVVIGHSCCGGIRALLSLQDGAAYTFHFVEDWVKIGFIAKMKVKKEHASVPFDDQCSILEKEAVNVSLENLKTYPFVKEGLANGTLKLIGAHYDFVSGEFLTWKK

SEQ ID NO: 20005 - DNA, 724 bp, Zea mays subsp. mays
  misc_feature (1)..(724): Ceres Seq. ID no. 12378048
  misc_feature (1)..(724): Ortholog of  Ceres SEQ ID NO 13594430 as cited in SEQ ID NO 60181
ccccagctgccggctgttcggtgcccagagatcgccgcacgatctcctcggcggcggcgccgttgcggatgtggtgctgtggaggaagaaggaggtggccaccgggacgctggcggccgtggtggcctcatgggcgctcttctactgcgtgcccggctacactctgctctccttcctggcccaggtgctcatgatcctgctcaccgtcctcttcgtctgggccaaggctgcgcagctgctcaacagggcacctccgcctatcccattgatgaaaatttctgacgagtcaatgagtgaagcagcagaaatggttggtagcttcatcaacaaggtgctcaaggatttcgaaaacattgcacttgggaaggataacagcctcttctacaaggtggcttttgtgctgttgctggcctccatagttggacgactgaccgatcttatcactttagtatatacaagtgctattattgctctcacggtccctgcattgctggagaaatccgaagaacacattgccagattnttcaagaaaacttcgatatatgttcaggcatttggcagagcatgcaaagagtataaatgtaagatgacgaatatgatatcggaaacgaagaaactgcgttgatgtcaatgtgttttcactagcaaattttgacttgtgagattgcttcttcggaagcgaaatagttgtgacttttggcatcaatcacaatcgtgatcttac

SEQ ID NO: 20006 - protein, 207 aa, Zea mays subsp. mays
  peptide (1)..(207): Ceres Seq. ID no. 12378049
  misc_feature (174)..(174): Xaa is any aa, unknown or other
PSCRLFGAQRSPHDLLGGGAVADVVLWRKKEVATGTLAAVVASWALFYCVPGYTLLSFLAQVLMILLTVLFVWAKAAQLLNRAPPPIPLMKISDESMSEAAEMVGSFINKVLKDFENIALGKDNSLFYKVAFVLLLASIVGRLTDLITLVYTSAIIALTVPALLEKSEEHIARXFKKTSIYVQAFGRACKEYKCKMTNMISETKKLR

SEQ ID NO: 20007 - protein, 144 aa, Zea mays subsp. mays
  peptide (1)..(144): Ceres Seq. ID no. 12378050
  misc_feature (111)..(111): Xaa is any aa, unknown or other
MILLTVLFVWAKAAQLLNRAPPPIPLMKISDESMSEAAEMVGSFINKVLKDFENIALGKDNSLFYKVAFVLLLASIVGRLTDLITLVYTSAIIALTVPALLEKSEEHIARXFKKTSIYVQAFGRACKEYKCKMTNMISETKKLR

SEQ ID NO: 20008 - protein, 118 aa, Zea mays subsp. mays
  peptide (1)..(118): Ceres Seq. ID no. 12378051
  misc_feature (85)..(85): Xaa is any aa, unknown or other
MKISDESMSEAAEMVGSFINKVLKDFENIALGKDNSLFYKVAFVLLLASIVGRLTDLITLVYTSAIIALTVPALLEKSEEHIARXFKKTSIYVQAFGRACKEYKCKMTNMISETKKLR

SEQ ID NO: 20009 - DNA, 1453 bp, Zea mays subsp. mays
  misc_feature (1)..(1453): Ceres Seq. ID no. 12381732
  misc_feature (1)..(1453): Ortholog of  Ceres SEQ ID NO 15174842 as cited in SEQ ID NO 53054
  misc_feature (1)..(1453): Ortholog of  Ceres SEQ ID NO 13596470 as cited in SEQ ID NO 62158
  misc_feature (1)..(1453): Ortholog of  Ceres SEQ ID NO 12578315 as cited in SEQ ID NO 62451
  misc_feature (1)..(1453): Ortholog of  Ceres SEQ ID NO 12615907 as cited in SEQ ID NO 62860
  misc_feature (1)..(1453): Ortholog of  Ceres SEQ ID NO 12617090 as cited in SEQ ID NO 64005
  misc_feature (1)..(1453): Ortholog of  Ceres SEQ ID NO 13597233 as cited in SEQ ID NO 64370
  misc_feature (1)..(1453): Ortholog of  Ceres SEQ ID NO 13584577 as cited in SEQ ID NO 65298
  misc_feature (1)..(1453): Ortholog of  Ceres SEQ ID NO 13600370 as cited in SEQ ID NO 0
  misc_feature (1)..(1453): Ortholog of  Ceres SEQ ID NO 14309162 as cited in SEQ ID NO 0
  misc_feature (1)..(1453): Ortholog of  Ceres SEQ ID NO 15226354 as cited in SEQ ID NO 0
gcacgagaccattacctagaacatcctaatcgaaaaattactgcacttgctctccggctccgggcagccacgagtatcagccccggcgagcggcggcgatgcagaacctgctgtccggcgcgtcccacgagacgctcccggacagcttcatcttcccggccgagcagcgcccgccggcgtcggcagccgccgtcgcgctccccgtcatcgacctgtccgggccccgcgacgaggtccggcgagccgttcttgaagctggcaaggagctaggcttcttccaggtggtgaaccacggcgtgccggagcaggtggtgcgggacatggaggcgtgctgcgaggagttcttccgcctccccgcggaggacaaggcggccttctactcggaggacacaagcaagcccaaccgcctcttcaccagcaccacctacggcaccggcggcgagcgctactggcgggactgcctccgcctggcctgcggcttccccgtcgccgccgacgccagggacgcctggcccgacaagcccgacggcctcagggaggcggcggagaggttcgtcgcgtcgacgaggcgcctgaacctggagctgctgcggctgctgtgcgagggcgtgggcctccgcgcggactacttcgagggggacctcagcgccggcgacgtggtcgtgaatgtcaaccactacccgccgtgcccggacccggcgcgcacgctgggcctgccgccgcactgcgaccgcaacctcatcacgctgctgctccagggcagcgtcgccggcctccaggtgtcctaccgcggcgactggatccgcgtccagcccgtgcccggcgccttcgtcgtcaactttggccaccagctcgagatcgccacgaacgggctgctgaagagcatcgagcaccgcgcggtggccagcgcggcggtgccgcgcacctcggtggcgacgttcatcatgcccaccgacgactgccttgtcgcccccgccgcggagctcgccggcggcggagacaagccgccgccgcggtaccgcgccgtcacgttccgggatttcatgaaggtgtacaagaccgtcggcgcgcgcagggagagcgtcgagaaggccttcaagatctgatggacgcgtatacatgctcgacatgcgttctgctcggcagagatctggtagttgttatctgcactgaataaaaggatgggagaaaaaacagaaaacgtcgcaagcagttcgcggcacaaactctctgtctctttcgttccaatttgcaactgtgtgtgtgagccgatgatagtgagtagagagcttcgttcccaactccggtgagtgccagaagagccaacaagtcctgcacgaacaccagtcgtcaccggagagcttcctgccggtgtcggcaaggatgcaaaggtgccaagagaatcgctttgtgtgtgaccttgtgccccgaaataaagggattgttcttgttt

SEQ ID NO: 20010 - protein, 335 aa, Zea mays subsp. mays
  peptide (1)..(335): Ceres Seq. ID no. 12381733
MQNLLSGASHETLPDSFIFPAEQRPPASAAAVALPVIDLSGPRDEVRRAVLEAGKELGFFQVVNHGVPEQVVRDMEACCEEFFRLPAEDKAAFYSEDTSKPNRLFTSTTYGTGGERYWRDCLRLACGFPVAADARDAWPDKPDGLREAAERFVASTRRLNLELLRLLCEGVGLRADYFEGDLSAGDVVVNVNHYPPCPDPARTLGLPPHCDRNLITLLLQGSVAGLQVSYRGDWIRVQPVPGAFVVNFGHQLEIATNGLLKSIEHRAVASAAVPRTSVATFIMPTDDCLVAPAAELAGGGDKPPPRYRAVTFRDFMKVYKTVGARRESVEKAFKI

SEQ ID NO: 20011 - protein, 261 aa, Zea mays subsp. mays
  peptide (1)..(261): Ceres Seq. ID no. 12381734
MEACCEEFFRLPAEDKAAFYSEDTSKPNRLFTSTTYGTGGERYWRDCLRLACGFPVAADARDAWPDKPDGLREAAERFVASTRRLNLELLRLLCEGVGLRADYFEGDLSAGDVVVNVNHYPPCPDPARTLGLPPHCDRNLITLLLQGSVAGLQVSYRGDWIRVQPVPGAFVVNFGHQLEIATNGLLKSIEHRAVASAAVPRTSVATFIMPTDDCLVAPAAELAGGGDKPPPRYRAVTFRDFMKVYKTVGARRESVEKAFKI

SEQ ID NO: 20012 - DNA, 1093 bp, Zea mays subsp. mays
  misc_feature (1)..(1093): Ceres Seq. ID no. 12383116
  misc_feature (1)..(1093): Ortholog of  Ceres SEQ ID NO 13594719 as cited in SEQ ID NO 51740
aaaactaggaatgagttcgctcgctaaaattggccggatgtgagcgctcccgttcgttcctctctcgcaaaatcaaccgccttccacggctcctccatctcgtcgccactgtgagaagctccatcgtcgtgcatcaactcagcaagattttgaggagagaagaacaagaattttgcagcaagactttgacagaagcaaaatacttcacgctattggagagctacgaaaagagtttatgagaccaccatctacatcaactctagctaaaattgcagggaatccaagatgggatccttactttaagtgttgtattggtgcaataaatggcacacatgtgcaagcatatgttcctaaacacatggaggcttcctttcacggtagaaagagttatgctactcaaaatgtcatggcagcagtatattttaatcttcgattcacatttgtcttggtcggttgggaggagacaactcatgatgcactagtcttacatgatgctttagaaagagaaaatggtattcgtgtgcctgaaggcaagttctacctagtcgatgccggatatggagccaaacttggatttatgccccttttcgtggtgtacaataccacttgaacgagcggggaaataatccagtgcaaaatgagaaaaaattattcaatcataggcattcatctctaagagtttcagtagagtgagcatttggttcattgaaaagaagatttaaaattcttgatgatgctacaccgttcttccccttctctacacaagtagaaattgtggttgcttgttgtattattcacaattgggttatacaagatggacgtgatgactttatcattcctgagaatgaggaattgcctaccattaatcatcacgtatcttcgcatggacaagcaatagagcatgatattatgattaactttaggcaggaacttgccaatgctatgtgggaagactatcatgcaaacactatttgattgctatgtattttccaatgtctctatcatttgtatggacatgtagaatttatttgtatggacatgtatcttttatttgtatggacatgtgtattttattcgtatggacatatatctt

SEQ ID NO: 20013 - protein, 124 aa, Zea mays subsp. mays
  peptide (1)..(124): Ceres Seq. ID no. 12383117
MRPPSTSTLAKIAGNPRWDPYFKCCIGAINGTHVQAYVPKHMEASFHGRKSYATQNVMAAVYFNLRFTFVLVGWEETTHDALVLHDALERENGIRVPEGKFYLVDAGYGAKLGFMPLFVVYNTT

SEQ ID NO: 20014 - protein, 83 aa, Zea mays subsp. mays
  peptide (1)..(83): Ceres Seq. ID no. 12383118
MEASFHGRKSYATQNVMAAVYFNLRFTFVLVGWEETTHDALVLHDALERENGIRVPEGKFYLVDAGYGAKLGFMPLFVVYNTT

SEQ ID NO: 20015 - protein, 67 aa, Zea mays subsp. mays
  peptide (1)..(67): Ceres Seq. ID no. 12383119
MAAVYFNLRFTFVLVGWEETTHDALVLHDALERENGIRVPEGKFYLVDAGYGAKLGFMPLFVVYNTT

SEQ ID NO: 20016 - DNA, 1513 bp, Zea mays subsp. mays
  misc_feature (1)..(1513): Ceres Seq. ID no. 13580212
  misc_feature (1)..(1513): Ortholog of  Ceres SEQ ID NO 14311596 as cited in SEQ ID NO 51728
  misc_feature (1)..(1513): Ortholog of  Ceres SEQ ID NO 14307004 as cited in SEQ ID NO 59551
  misc_feature (1)..(1513): Ortholog of  Ceres SEQ ID NO 15177031 as cited in SEQ ID NO 60171
  misc_feature (1)..(1513): Ortholog of  Ceres SEQ ID NO 13661504 as cited in SEQ ID NO 61294
  misc_feature (1)..(1513): Ortholog of  Ceres SEQ ID NO 12617197 as cited in SEQ ID NO 63406
  misc_feature (1)..(1513): Ortholog of  Ceres SEQ ID NO 13597804 as cited in SEQ ID NO 64182
  misc_feature (1)..(1513): Ortholog of  Ceres SEQ ID NO 15179788 as cited in SEQ ID NO 64818
  misc_feature (1)..(1513): Ortholog of  Ceres SEQ ID NO 14302768 as cited in SEQ ID NO 64889
  misc_feature (1)..(1513): Ortholog of  Ceres SEQ ID NO 14301622 as cited in SEQ ID NO 65156
  misc_feature (1)..(1513): Ortholog of  Ceres SEQ ID NO 13598565 as cited in SEQ ID NO 65250
  misc_feature (1)..(1513): Ortholog of  Ceres SEQ ID NO 13598597 as cited in SEQ ID NO 65496
  misc_feature (1)..(1513): Ortholog of  Ceres SEQ ID NO 13596284 as cited in SEQ ID NO 68273
  misc_feature (1)..(1513): Ortholog of  Ceres SEQ ID NO 13596227 as cited in SEQ ID NO 68750
  misc_feature (1)..(1513): Ortholog of  Ceres SEQ ID NO 14308995 as cited in SEQ ID NO 0
  misc_feature (1)..(1513): Ortholog of  Ceres SEQ ID NO 15178902 as cited in SEQ ID NO 0
  misc_feature (1)..(1513): Ortholog of  Ceres SEQ ID NO 15179068 as cited in SEQ ID NO 0
aggatgaatcggaagagagaatcctaccaaacctagctaccaactcgatcgtcgtcatcacgctcgaccgcacaactgcaccaaggggggaggagacctaaaaactactacatcttttagctacacatctagctaaagatcgagaggggtaaataaggacgagcgggcgcgagctagaagagcagctgcaggtactaccatcatcgtcgtcgtcgtcgccaggatgaccgtcgtcgacgccgtcgtctcctccaccgatgccggcgcccctgctgccgccgccaccgcggtaccggcggggaacgggcagaccgtgtgcgtgaccggcgcggccgggtacatcgcctcgtggttggtgaagctgctgctcgagaagggatacactgtgaagggcaccgtcaggaacccagatgacccgaagaacgcgcacctcaaggcgctggacggcgccgccgagcggctgatcctctgcaaggccgatctgctggactacgacgccatctgccgcgccgtgcagggctgccagggcgtcttccacaccgcctcccccgtcaccgacgacccggagcaaatggtggagccggcggtgcgcggcaccgagtacgtgatcaacgcggcggcggaggccggcacggtgcggcgggtggtgttcacgtcgtccatcggcgccgtgaccatggaccccaagcgcgggcccgacgtcgtggtcgacgagtcgtgctggagcgacctcgagttctgcgagaaaaccaggaactggtactgctacggcaaggcggtggcggagcacgcggcgtgggagacggcccggcggcggggcgtggacctggtggtggtgaaccccgtgctggtggtgggccccctgctgcaggcgacggtgaacgccagcatcgcgcacatcctcaagtacctggacggctcggcccgcaccttcgccaacgccgtgcaggcgtacgtggacgtgcgcgacgtggccgacgcgcacctccgcgtcttcgagagcccccgcgcgtccggccgccacctctgcgccgagcgcgtcctccaccgcgaggacgtcgtccgcatcctcgccaagctcttccccgagtaccccgtcccagccaggtgctccgacgaggtgaatccgcggaagcagccgtacaagttctccaaccagaagctccgggacctggggctgcagttccggccggtcagccagtcgctttacgacacggtgaagaacctccaggagaagggacacctgccggtgctcggagagcggacgacgacggaggccgccgacaaggatgcccccacggccgagatgcagcagggagggatcgccatccgtgcctgagagggcgatgccacacatgaacacaaagcaatgttcatactgctgccctgcacctgctgtgtaaacaggcctgtgtttgttctggctgatagtgatgtaccctaagacttgtaacgtcatgttcgttcttgtgaactatagcgagtgaataaaattggttaatgttggatgttc

SEQ ID NO: 20017 - protein, 371 aa, Zea mays subsp. mays
  peptide (1)..(371): Ceres Seq. ID no. 13580213
MTVVDAVVSSTDAGAPAAAATAVPAGNGQTVCVTGAAGYIASWLVKLLLEKGYTVKGTVRNPDDPKNAHLKALDGAAERLILCKADLLDYDAICRAVQGCQGVFHTASPVTDDPEQMVEPAVRGTEYVINAAAEAGTVRRVVFTSSIGAVTMDPKRGPDVVVDESCWSDLEFCEKTRNWYCYGKAVAEHAAWETARRRGVDLVVVNPVLVVGPLLQATVNASIAHILKYLDGSARTFANAVQAYVDVRDVADAHLRVFESPRASGRHLCAERVLHREDVVRILAKLFPEYPVPARCSDEVNPRKQPYKFSNQKLRDLGLQFRPVSQSLYDTVKNLQEKGHLPVLGERTTTEAADKDAPTAEMQQGGIAIRA

SEQ ID NO: 20018 - protein, 255 aa, Zea mays subsp. mays
  peptide (1)..(255): Ceres Seq. ID no. 13580214
MVEPAVRGTEYVINAAAEAGTVRRVVFTSSIGAVTMDPKRGPDVVVDESCWSDLEFCEKTRNWYCYGKAVAEHAAWETARRRGVDLVVVNPVLVVGPLLQATVNASIAHILKYLDGSARTFANAVQAYVDVRDVADAHLRVFESPRASGRHLCAERVLHREDVVRILAKLFPEYPVPARCSDEVNPRKQPYKFSNQKLRDLGLQFRPVSQSLYDTVKNLQEKGHLPVLGERTTTEAADKDAPTAEMQQGGIAIRA

SEQ ID NO: 20019 - protein, 220 aa, Zea mays subsp. mays
  peptide (1)..(220): Ceres Seq. ID no. 13580215
MDPKRGPDVVVDESCWSDLEFCEKTRNWYCYGKAVAEHAAWETARRRGVDLVVVNPVLVVGPLLQATVNASIAHILKYLDGSARTFANAVQAYVDVRDVADAHLRVFESPRASGRHLCAERVLHREDVVRILAKLFPEYPVPARCSDEVNPRKQPYKFSNQKLRDLGLQFRPVSQSLYDTVKNLQEKGHLPVLGERTTTEAADKDAPTAEMQQGGIAIRA

SEQ ID NO: 20020 - DNA, 1294 bp, Zea mays subsp. mays; identical to SEQ ID NO: 15951
  misc_feature (1)..(1294): Ceres Seq. ID no. 13494804
  misc_feature (1)..(1294): Ortholog of  Ceres SEQ ID NO 14314585 as cited in SEQ ID NO 59345

SEQ ID NO: 20021 - protein, 431 aa, Zea mays subsp. mays; identical to SEQ ID NO: 15952
  peptide (1)..(431): Ceres Seq. ID no. 13494805

SEQ ID NO: 20022 - protein, 408 aa, Zea mays subsp. mays; identical to SEQ ID NO: 15953
  peptide (1)..(408): Ceres Seq. ID no. 13494806

SEQ ID NO: 20023 - protein, 291 aa, Zea mays subsp. mays; identical to SEQ ID NO: 15954
  peptide (1)..(291): Ceres Seq. ID no. 13494807

SEQ ID NO: 20024 - DNA, 981 bp, Zea mays subsp. mays
  misc_feature (1)..(981): Ceres Seq. ID no. 14305860
  misc_feature (1)..(981): Ortholog of  Ceres SEQ ID NO 12611293 as cited in SEQ ID NO 56191
  misc_feature (1)..(981): Ortholog of  Ceres SEQ ID NO 12583682 as cited in SEQ ID NO 56297
aaaaaatagccttatagccacatcccggccagccgcagcaagtgcccagaaggccagaaccagaaccaggtagcccgtgcaacctcatatcatcccctgccacgcacctccgtccgccgcgccatggaatcgaggaggagggccgtgcccaccgtgacggcggttgcggtggcgacgctgctgctgctgctgatgtcgtcgggcgtgggcggcgacttcgcggcggaccgggcggagtgctcggagcagctggcggggctggcgacgtgcctgacgtacgtgcaggagcaggcgacggcgacggcgccgacgcccgactgctgcgcgggcctgaaggcggtgctgcagagcagccgcaagtgcctgtgcgtgctggtcaaggaccgggacgaccccaacctaggcctcaagctcaacgtcgacaaggcgctcggcctccccgccgtctgccacgcgcccgccaacatctccgactgccccaggctgctggacctgccggccggctccaaggacgcgcaggtgttcgagcagtacgcgaagcagcaggcggcggcggcggcgcagggcggcggcgcacccaccagtggacgcagcagcgcggcggcgagcacgaccgcgggcgcgcagaagagcggagcctcagccgccggtcggtggttgggagtggggagggtcggtggtgctggtggcggcgcacgcgcggtggcgccgctcgccgtgcctttcctgctcctgctcgggtagataataataataactttacgcgcgcggccaacggccggagtcccggcggtttggttggcgccgcgcgttgccgacttgtgtgcttcgggtgcgtgcgtgtgtggtggggtacttttcacactatattggaaaaagaagctattatatatctttgactgaaaaaaagtgtcgttgtataattatctttttttcgtgtccgtgtatgcaacccctcctctcatagacccatagcgccaa

SEQ ID NO: 20025 - protein, 206 aa, Zea mays subsp. mays
  peptide (1)..(206): Ceres Seq. ID no. 14305861
MESRRRAVPTVTAVAVATLLLLLMSSGVGGDFAADRAECSEQLAGLATCLTYVQEQATATAPTPDCCAGLKAVLQSSRKCLCVLVKDRDDPNLGLKLNVDKALGLPAVCHAPANISDCPRLLDLPAGSKDAQVFEQYAKQQAAAAAQGGGAPTSGRSSAAASTTAGAQKSGASAAGRWLGVGRVGGAGGGARAVAPLAVPFLLLLG

SEQ ID NO: 20026 - protein, 183 aa, Zea mays subsp. mays
  peptide (1)..(183): Ceres Seq. ID no. 14305862
MSSGVGGDFAADRAECSEQLAGLATCLTYVQEQATATAPTPDCCAGLKAVLQSSRKCLCVLVKDRDDPNLGLKLNVDKALGLPAVCHAPANISDCPRLLDLPAGSKDAQVFEQYAKQQAAAAAQGGGAPTSGRSSAAASTTAGAQKSGASAAGRWLGVGRVGGAGGGARAVAPLAVPFLLLLG

SEQ ID NO: 20027 - DNA, 464 bp, Zea mays subsp. mays
  misc_feature (1)..(464): Ceres Seq. ID no. 12634242
  misc_feature (1)..(464): Ortholog of  Ceres SEQ ID NO 14315455 as cited in SEQ ID NO 56988
agaaggcttcttcttgcgtaccttccacttccacccaacgcgactcgctctttcccgcatctggaagtcgccggctcagatccagccgggctgcggcgctggtcggatggccgagcagggcggcgcagccggggaggccgctggcagcgacccccctgcgcctgcgcctgcgactgccccggcgccagccccagcgcttgctgcggacgcggccgggcagaggtccctgccgacgccgttcctgaccaagacgtaccagctggtggacgacccggcggtggacgacgtgatctcgtggaacgaggacggctcgacgttcgtggtgtggcggccggcggagtttgcgcgcgacctcctccccaagtatttcaagcacaataacttctccagctttgtgcggcagctcaacacctacggatttaggaagatggtgcccgaccggtgggagtcgccaacgacttctt

SEQ ID NO: 20028 - protein, 154 aa, Zea mays subsp. mays
  peptide (1)..(154): Ceres Seq. ID no. 12634243
EGFFLRTFHFHPTRLALSRIWKSPAQIQPGCGAGRMAEQGGAAGEAAGSDPPAPAPATAPAPAPALAADAAGQRSLPTPFLTKTYQLVDDPAVDDVISWNEDGSTFVVWRPAEFARDLLPKYFKHNNFSSFVRQLNTYGFRKMVPDRWESPTTS

SEQ ID NO: 20029 - protein, 126 aa, Zea mays subsp. mays
  peptide (1)..(126): Ceres Seq. ID no. 12634244
RRLLLAYLPLPPNATRSFPHLEVAGSDPAGLRRWSDGRAGRRSRGGRWQRPPCACACDCPGASPSACCGRGRAEVPADAVPDQDVPAGGRPGGGRRDLVERGRLDVRGVAAGGVCARPPPQVFQAQ

SEQ ID NO: 20030 - protein, 119 aa, Zea mays subsp. mays
  peptide (1)..(119): Ceres Seq. ID no. 12634245
MAEQGGAAGEAAGSDPPAPAPATAPAPAPALAADAAGQRSLPTPFLTKTYQLVDDPAVDDVISWNEDGSTFVVWRPAEFARDLLPKYFKHNNFSSFVRQLNTYGFRKMVPDRWESPTTS

SEQ ID NO: 20031 - DNA, 1351 bp, Zea mays subsp. mays
  misc_feature (1)..(1351): Ceres Seq. ID no. 12418243
  misc_feature (1)..(1351): Ortholog of  Ceres SEQ ID NO 13595658 as cited in SEQ ID NO 59888
  misc_feature (1)..(1351): Ortholog of  Ceres SEQ ID NO 13661330 as cited in SEQ ID NO 61614
  misc_feature (1)..(1351): Ortholog of  Ceres SEQ ID NO 13596025 as cited in SEQ ID NO 62024
  misc_feature (1)..(1351): Ortholog of  Ceres SEQ ID NO 13662324 as cited in SEQ ID NO 62162
  misc_feature (1)..(1351): Ortholog of  Ceres SEQ ID NO 12625713 as cited in SEQ ID NO 64160
  misc_feature (1)..(1351): Ortholog of  Ceres SEQ ID NO 14303564 as cited in SEQ ID NO 65360
  misc_feature (1)..(1351): Ortholog of  Ceres SEQ ID NO 15170103 as cited in SEQ ID NO 66345
  misc_feature (1)..(1351): Ortholog of  Ceres SEQ ID NO 14313495 as cited in SEQ ID NO 0
aacaaaaatcacgtttccatccatcctggcgcacaagaggaagcggagagctctctctctcccgcccgcaatataatggcgagagcacacctagccctggtcagcttcttcgctgcctcaattattggtgcggcgtccaagtcgttcaccatcgccaacaactgcgagcacacggtgtggccggggatcctctcgagcgccgggtccgcgggagtggacaccacaggcttcgcgctggcgccgggggagtcgcgcgctctgagcgtgcgtcggggtggtcgggccggctgtggggccgcacgctctgctccaccgacgcggccacgggccggttcgcctgcgtgaccggcgactgcggctcgggcaggcaggactgcggcggcggcggggccgccccgccggccacgcctggcagagttcaccatggacggcagcgggggcatggacttctacgacgtgagcctggtggacgggtacaacctgccgatgctggtggcgccgcagggcgcggccgctgccgcggggggcagctgcgtgcccaccggctgcatggcggacctcaacggcgcgtgccccgccgacctgcgcgtggcggcttcgacgacgtcctccggcggcggcggcgtggcctgcaagagcgcgtgcgaggcgttcgggtcggcgcagtactgctgcaacggcgactacgggaaccccagcacctgcaagccgtcggcgtactcgcagttcttcaagaacgcgtgcccccgggcgtacagctacgcctacgacgacgccacctccaccttcacctgcgccggcgacaccgcgtacgccatcaccttctgccccagcacgaccagcgtcaaggcggccggaggtagcccgcaggagcaaggagccctgccgctgatgaacgccaccatggtgtacctcggcggcgaccaggtcggatccgccacagccgcggcccggctgccgtccggcctcctccaccacgtcgtggtcctcgccgttgtgtccctcgcgctagcaggggctctgtactgatggtgatggcgaaccccactgcacagtgacgacgcgacgccacgcgggacaacagcccacgagacaatcgtgctcctctacagaccgaaggaaaaaaaattaaggatagaaacgagaaatggacgcatcacctgcctgccggtgtggacggcggtggtcctcgcggtccagcgagactgcgagccccgacgacggtgtgattattcacccgtgccgaccgagagagacgtgtgtagtggcgatacaaatttgattgaagacattattgtgcgttttcttagatatttattaattacacgataatacacacatgtattattat

SEQ ID NO: 20032 - protein, 286 aa, Zea mays subsp. mays
  peptide (1)..(286): Ceres Seq. ID no. 12418244
QKSRFHPSWRTRGSGELSLSRPQYNGESTPSPGQLLRCLNYWCGVQVVHHRQQLRAHGVAGDPLERRVRGSGHHRLRAGAGGVARSERASGWSGRLWGRTLCSTDAATGRFACVTGDCGSGRQDCGGGGAAPPATPGRVHHGRQRGHGLLRREPGGRVQPADAGGAAGRGRCRGGQLRAHRLHGGPQRRVPRRPARGGFDDVLRRRRRGLQERVRGVRVGAVLLQRRLREPQHLQAVGVLAVLQERVPPGVQLRLRRRHLHLHLRRRHRVRHHLLPQHDQRQGGRR

SEQ ID NO: 20033 - protein, 201 aa, Zea mays subsp. mays
  peptide (1)..(201): Ceres Seq. ID no. 12418245
MDGSGGMDFYDVSLVDGYNLPMLVAPQGAAAAAGGSCVPTGCMADLNGACPADLRVAASTTSSGGGGVACKSACEAFGSAQYCCNGDYGNPSTCKPSAYSQFFKNACPRAYSYAYDDATSTFTCAGDTAYAITFCPSTTSVKAAGGSPQEQGALPLMNATMVYLGGDQVGSATAAARLPSGLLHHVVVLAVVSLALAGALY

SEQ ID NO: 20034 - protein, 195 aa, Zea mays subsp. mays
  peptide (1)..(195): Ceres Seq. ID no. 12418246
MDFYDVSLVDGYNLPMLVAPQGAAAAAGGSCVPTGCMADLNGACPADLRVAASTTSSGGGGVACKSACEAFGSAQYCCNGDYGNPSTCKPSAYSQFFKNACPRAYSYAYDDATSTFTCAGDTAYAITFCPSTTSVKAAGGSPQEQGALPLMNATMVYLGGDQVGSATAAARLPSGLLHHVVVLAVVSLALAGALY

SEQ ID NO: 20035 - DNA, 419 bp, Zea mays subsp. mays
  misc_feature (1)..(419): Ceres Seq. ID no. 4614060
  misc_feature (1)..(419): Ortholog of  Ceres SEQ ID NO 15177304 as cited in SEQ ID NO 52668
cggaccacacggtccacacagcccaacaaaggagcgcggcggcccctccttccsttcctcccacttctctcgcgcggcgctcgcttacctcgcctcgcattccgttcgagcaggggagcggcagtgagaagggagggaattaaggcaagatgttcatcgagagcttccgcgtcgagagcccccacgtgcggtacggcccgacsgagatcgagtcggagtaccggtacgacacgacggagctggtgcacgaggccaaggacggcgcctcccgctgggtcgtccgccccaagtccgtcaagtacaacttccggaccagcaccgcggtccccaagctcggggtcatgcttgtggggtggggaggcaacaacgggtccacgcttacggctggggtcattgccaacagggaggggatctcatgg

SEQ ID NO: 20036 - protein, 139 aa, Zea mays subsp. mays
  peptide (1)..(139): Ceres Seq. ID no. 4614061
  misc_feature (18)..(18): Xaa is any aa, unknown or other
  misc_feature (68)..(68): Xaa is any aa, unknown or other
RTTRSTQPNKGARRPLLXFLPLLSRGARLPRLAFRSSRGAAVRREGIKARCSSRASASRAPTCGTARXRSSRSTGTTRRSWCTRPRTAPPAGSSAPSPSSTTSGPAPRSPSSGSCLWGGEATTGPRLRLGSLPTGRGSH

SEQ ID NO: 20037 - protein, 90 aa, Zea mays subsp. mays
  peptide (1)..(90): Ceres Seq. ID no. 4614062
  misc_feature (18)..(18): Xaa is any aa, unknown or other
MFIESFRVESPHVRYGPXEIESEYRYDTTELVHEAKDGASRWVVRPKSVKYNFRTSTAVPKLGVMLVGWGGNNGSTLTAGVIANREGISW

SEQ ID NO: 20038 - DNA, 1860 bp, Zea mays subsp. mays
  misc_feature (1)..(1860): Ceres Seq. ID no. 12391528
  misc_feature (1)..(1860): Ortholog of  Ceres SEQ ID NO 15169199 as cited in SEQ ID NO 55297
  misc_feature (1)..(1860): Ortholog of  Ceres SEQ ID NO 15175690 as cited in SEQ ID NO 55466
  misc_feature (1)..(1860): Ortholog of  Ceres SEQ ID NO 15171197 as cited in SEQ ID NO 56892
  misc_feature (1)..(1860): Ortholog of  Ceres SEQ ID NO 14306381 as cited in SEQ ID NO 58812
acttctcattcctcacttccgtcctcgcgcaccaccccctccatccgttccggatggtgccttcgaaatcccgtccggcgccctagcgtagctcgggctcggccaggctccgggcccgccgcgccgttccgcagtccagctccacctccagatcttttcttgagtttaaggaagatgcttgcctttatttagaaggccctttttggtacgtcagcagtgttctttcctataggagtaaatgccattccgtagcatcgtgcgtgatgtaagggatggtttcgggagcttgtctaggaggggatttgaggtcaggtttctgagtcatcgcagagggaaatctcatggtgctgtccatgagctgcacgacccagtgcttgtggtacagagtagctgctgggctagcttgcctcctgaattacttcgagatgtgattgagaggttggagaccagtgaggatacatggccttctaggaaacatgtagttgcttgtgcagctgtctgcagaacatggagagagatgtgtagagagattgtcaagagcccagagttttctggaaaaatcacttttcctgtttccttgaagcagcctgggcctcgagatggaactattcagtgttttattaagagggataaatctacccaaatctacagtctgtaccttagttttagctctgccgtgcctgtcgaaaatggcaaattccttctatccgcaaaaaggaactgccgtgcaacatatacagaatatataatatcaataaattctggtgatacatctaggtgtacaagtaacaacacatacattgggaaattaaggtcaaatttccttggcacaaaatttgtaatatacgatactcatccgccatacaatggaactagtcaaacagtggcagggaaaacaagtcagagattctactccaagaagggatcaaccaaggtttcttgcaggtggtacagtattgcacaaatctcatacgagctgaatgtcttgggaactcgaggcccaaggcggatgaactgtgtaatgcactccatcccagcttcatgccttgaggctggtggcagtgtcccttgccagccggacagcattgcagcccactctgttggcggatcattcagcagtgtgtccttgtcaaagtcatcgactatggaccactctatgcatttcaccagttcccggctctctgatgccataacaggagatggcattgtgaacagaggccaggcattgaatgatgctgacgatgaagagtgcaaggacatgcctttgatcctccgcaacaaggccccaaggtggcacgagcagcttcagtgctggtgcctcaacttccggggccgggtgactgtcgcctcggtcaagaacttccagctagtcgcggcgacacagcctgccgccggagccctgaccccatcacaggcagccccgcagccagctccgcctcctccgccggaccaagagaaggtcatactgcagtttgggaaggtcggcaaggacatcttcaccatggactactgctacccgctgtcagccttccaggccttcgccatctgcctgagcagcttcgacaccaagttggcctgcgaataaatcctacctacaattctggtacctaccaaataatcaaaaacactgattgtcgtggtgttcgtccaagaaccgagtttagctgagacgccattgggcaccatgtgctggtgccttgttaactcagaaacgcgtgggggctgaatctgtttcagcagcttccttgtgataatctgtagctgctgcttcgctgctgttgtatcctatgctttcatttctttccggttccgctgtagcttcttaccccccggtgacattagttcggtacccgtatctgc

SEQ ID NO: 20039 - protein, 448 aa, Zea mays subsp. mays
  peptide (1)..(448): Ceres Seq. ID no. 12391529
MPFRSIVRDVRDGFGSLSRRGFEVRFLSHRRGKSHGAVHELHDPVLVVQSSCWASLPPELLRDVIERLETSEDTWPSRKHVVACAAVCRTWREMCREIVKSPEFSGKITFPVSLKQPGPRDGTIQCFIKRDKSTQIYSLYLSFSSAVPVENGKFLLSAKRNCRATYTEYIISINSGDTSRCTSNNTYIGKLRSNFLGTKFVIYDTHPPYNGTSQTVAGKTSQRFYSKKGSTKVSCRWYSIAQISYELNVLGTRGPRRMNCVMHSIPASCLEAGGSVPCQPDSIAAHSVGGSFSSVSLSKSSTMDHSMHFTSSRLSDAITGDGIVNRGQALNDADDEECKDMPLILRNKAPRWHEQLQCWCLNFRGRVTVASVKNFQLVAATQPAAGALTPSQAAPQPAPPPPPDQEKVILQFGKVGKDIFTMDYCYPLSAFQAFAICLSSFDTKLACE

SEQ ID NO: 20040 - protein, 355 aa, Zea mays subsp. mays
  peptide (1)..(355): Ceres Seq. ID no. 12391530
MCREIVKSPEFSGKITFPVSLKQPGPRDGTIQCFIKRDKSTQIYSLYLSFSSAVPVENGKFLLSAKRNCRATYTEYIISINSGDTSRCTSNNTYIGKLRSNFLGTKFVIYDTHPPYNGTSQTVAGKTSQRFYSKKGSTKVSCRWYSIAQISYELNVLGTRGPRRMNCVMHSIPASCLEAGGSVPCQPDSIAAHSVGGSFSSVSLSKSSTMDHSMHFTSSRLSDAITGDGIVNRGQALNDADDEECKDMPLILRNKAPRWHEQLQCWCLNFRGRVTVASVKNFQLVAATQPAAGALTPSQAAPQPAPPPPPDQEKVILQFGKVGKDIFTMDYCYPLSAFQAFAICLSSFDTKLACE

SEQ ID NO: 20041 - DNA, 1233 bp, Zea mays subsp. mays
  misc_feature (1)..(1233): Ceres Seq. ID no. 12383372
  misc_feature (1)..(1233): Ortholog of  Ceres SEQ ID NO 13654431 as cited in SEQ ID NO 67761
acccgcacacccaccatcagcacgctcccggactctgatggcgctgagccccacgcccacggccgttgctgcaccgccgccggagccgggccccgagcccgcgccgtccgctgagctgccgctgccggacgccatcgcggccgcgctgccgccggacccgtacgagcagctggaggtggcgcgcaagatcacggccgtggccgtggcgtcccgggcctcgcgcctcgagctggaggccgcgcggctacggcagaggctggccgacagggaccgcctcgccgccgagctcgccgacagggccgccaagctcgagcaggcgctccgcgacgccgacgcgcggntccgcagcgcactcgacgacaacgccaagctggccaaggagcgggactcgctcgcgcagacgtccaagaagctggccagggacctcgccaagctggaaaccttcaagcggcacctgatgcagtcgctgggcgatgataattcccaaactcatcatcaggaaacagtagacataagaacctacgagcaatcggtggcaaaagcgaattcctggaaagacgggctagagaagaacagccatcctgtatcctctctatccgacgagtccgtcgaagccgacagcgtaaatcaggaagtgacgacgaggccatttgagcagaaactgaccatcacgcacatcactccacgcctcacctcggatcctgcgccgaagctgagaaccgccgcgacatccccgagaaggtactccacggcggtgtcgcccaaactggcgtccggcgccacctcgccgcgattggagggccacatggcgatgtcgccatggctaccctcgagcaagatgtcctctgcagccaactcgccacctcgtggacagtctatctcaggacgcggtacaagagtagatggcaaggagttctttcgtcaagcaagacaccgcctgtcatacgaacaatttgcggcttttctttccaatatcaaggagctcaacgcccataggcaatctcgagaggagaccctgaggaaggcggacgagatcttcggtgcagaaaacatggacctcttcaggtcgttccaagggctgcttagccgcagcctatcgtagtaaaaaggaaaagaagcttgcccattctatcaattactactccttgttgcggttgttcatgattcatatggacagggccgacagcaggtatacgctttgtgtataataaataaaaaaacgacgtggaccgt

SEQ ID NO: 20042 - protein, 366 aa, Zea mays subsp. mays
  peptide (1)..(366): Ceres Seq. ID no. 12383373
  misc_feature (114)..(114): Xaa is any aa, unknown or other
PAHPPSARSRTLMALSPTPTAVAAPPPEPGPEPAPSAELPLPDAIAAALPPDPYEQLEVARKITAVAVASRASRLELEAARLRQRLADRDRLAAELADRAAKLEQALRDADARXRSALDDNAKLAKERDSLAQTSKKLARDLAKLETFKRHLMQSLGDDNSQTHHQETVDIRTYEQSVAKANSWKDGLEKNSHPVSSLSDESVEADSVNQEVTTRPFEQKLTITHITPRLTSDPAPKLRTAATSPRRYSTAVSPKLASGATSPRLEGHMAMSPWLPSSKMSSAANSPPRGQSISGRGTRVDGKEFFRQARHRLSYEQFAAFLSNIKELNAHRQSREETLRKADEIFGAENMDLFRSFQGLLSRSLS

SEQ ID NO: 20043 - protein, 354 aa, Zea mays subsp. mays
  peptide (1)..(354): Ceres Seq. ID no. 12383374
  misc_feature (102)..(102): Xaa is any aa, unknown or other
MALSPTPTAVAAPPPEPGPEPAPSAELPLPDAIAAALPPDPYEQLEVARKITAVAVASRASRLELEAARLRQRLADRDRLAAELADRAAKLEQALRDADARXRSALDDNAKLAKERDSLAQTSKKLARDLAKLETFKRHLMQSLGDDNSQTHHQETVDIRTYEQSVAKANSWKDGLEKNSHPVSSLSDESVEADSVNQEVTTRPFEQKLTITHITPRLTSDPAPKLRTAATSPRRYSTAVSPKLASGATSPRLEGHMAMSPWLPSSKMSSAANSPPRGQSISGRGTRVDGKEFFRQARHRLSYEQFAAFLSNIKELNAHRQSREETLRKADEIFGAENMDLFRSFQGLLSRSLS

SEQ ID NO: 20044 - protein, 214 aa, Zea mays subsp. mays
  peptide (1)..(214): Ceres Seq. ID no. 12383375
MQSLGDDNSQTHHQETVDIRTYEQSVAKANSWKDGLEKNSHPVSSLSDESVEADSVNQEVTTRPFEQKLTITHITPRLTSDPAPKLRTAATSPRRYSTAVSPKLASGATSPRLEGHMAMSPWLPSSKMSSAANSPPRGQSISGRGTRVDGKEFFRQARHRLSYEQFAAFLSNIKELNAHRQSREETLRKADEIFGAENMDLFRSFQGLLSRSLS

SEQ ID NO: 20045 - DNA, 1909 bp, Zea mays subsp. mays
  misc_feature (1)..(1909): Ceres Seq. ID no. 12435641
  misc_feature (1)..(1909): Ortholog of  Ceres SEQ ID NO 14314755 as cited in SEQ ID NO 59919
  misc_feature (1)..(1909): Ortholog of  Ceres SEQ ID NO 13596180 as cited in SEQ ID NO 67941
atgcatcgggaacccttacacaggtagataccacaaccctgtgcagagttcttgcattctcgtcaaggtgacaggaacgacataggaaatggaggccaccctgtgcccaaagccccatttcgtggtcatcccatggccagccaccagccacatgatccccatcgtggacatcggctgcctcctcgccgcgcacggcgccgcggtcacgatcatcaccacgccctccagctcgcaactcgtccagagccgcgtggaccgcgccgggcaaggctcagcgggggtcacggtcaccgcgatcccgttcccgggcgcggaggccggcctgccggacggctgcgagaggacggaccacatcccctcccctgacctcgtgcccaacttcttcgtcgccaccgcgcggttcggcgaggccgtggcgcggcactgccgccgcctgcccacggccacggcggcgcacccccggccgagctgcgtcgtcgccgggatgtgccacacgtgggcgcacggcgtggcgcgcgagctcggcgccccctgcttcatcttccacggcttctgcgcgttcgctctgctgtgctgcgagtacctcaacacgcacaggccgcacgaggcggtcgggtcgccggacgagctcttcgacctccccgccctgccgccgttcgagttcaggttcgccaggaggcagctgccgatccacttccagccgtcttcctccatcccggaggaccgccaccgggagctccggaagttcgagctggccgtggacggcatcgtcgtgaacagcttcgaggagctggagcacggctcggtttcgcgcctcgcggcggccacgggcaaggccgtgctctccgtcggccccgtctcgctgtgcggcgccgccgcacctcctagcctcctcgactcgcgggccaactcggacgatgccaggctgtgcatggcgtggctggacgccaagagagccgactccgttctctacgtcagcttcggcagcgccgggcgcatgcctccagcgcagctgatacagctcgggctggcgctcgtgtcgtgcccctggcctgtcctttgggtcatcaagggcgcagacacgttgcccgatgacgtcaacgagtggttgcagcgcaacaccgatggaagcggcctcccggagagccagtgtcttgcgcttcgcgggtgggcgccgcaggtcgccatcctggagcacccggccgtcggcggctttctgacgcactgcgggtggggctcgacgctggagagcgtcgccgcgggcgtgcccatggccacctggccgttctccgccgagcagttcctgaacgagaagttgatcgtccacgtgcttggcatcggattgtctgtcggcgtgacgaagcccacggagagcgtgctgaccggtgccaaagacggcggtggcaaggcggacgcagatgtgggaatggaacaggtgaagcaagccttggatatgctcatggatggaggggcggatggggaggcaaggaagacgaaagctaaggaactgaaggccaaatcaaagactgctctggagcatggaggatcgtcatatatgaacctggagaagctgatacagtttggtgcttgaaaatggagtggtcgtggactcgtggtctgtttcggcacccaaacttagtttatttctccctaataaaggttaataaactaggactgcaagcaaaacgtggtacatgtaggtttcaggaacgctgcaggccgggcaaactttgtccaggattgcgagtggacaggacaggagcagaggaaaaacggcaacagaagcgacaaaatgaagagtaacaaagagccgttggattgaagatcaatgactcatgtgcgttgcctaagaattagacatatagtcatatgagcgtcttctctatgatacctgaggtttcttcgattc

SEQ ID NO: 20046 - protein, 500 aa, Zea mays subsp. mays
  peptide (1)..(500): Ceres Seq. ID no. 12435642
MEATLCPKPHFVVIPWPATSHMIPIVDIGCLLAAHGAAVTIITTPSSSQLVQSRVDRAGQGSAGVTVTAIPFPGAEAGLPDGCERTDHIPSPDLVPNFFVATARFGEAVARHCRRLPTATAAHPRPSCVVAGMCHTWAHGVARELGAPCFIFHGFCAFALLCCEYLNTHRPHEAVGSPDELFDLPALPPFEFRFARRQLPIHFQPSSSIPEDRHRELRKFELAVDGIVVNSFEELEHGSVSRLAAATGKAVLSVGPVSLCGAAAPPSLLDSRANSDDARLCMAWLDAKRADSVLYVSFGSAGRMPPAQLIQLGLALVSCPWPVLWVIKGADTLPDDVNEWLQRNTDGSGLPESQCLALRGWAPQVAILEHPAVGGFLTHCGWGSTLESVAAGVPMATWPFSAEQFLNEKLIVHVLGIGLSVGVTKPTESVLTGAKDGGGKADADVGMEQVKQALDMLMDGGADGEARKTKAKELKAKSKTALEHGGSSYMNLEKLIQFGA

SEQ ID NO: 20047 - protein, 479 aa, Zea mays subsp. mays
  peptide (1)..(479): Ceres Seq. ID no. 12435643
MIPIVDIGCLLAAHGAAVTIITTPSSSQLVQSRVDRAGQGSAGVTVTAIPFPGAEAGLPDGCERTDHIPSPDLVPNFFVATARFGEAVARHCRRLPTATAAHPRPSCVVAGMCHTWAHGVARELGAPCFIFHGFCAFALLCCEYLNTHRPHEAVGSPDELFDLPALPPFEFRFARRQLPIHFQPSSSIPEDRHRELRKFELAVDGIVVNSFEELEHGSVSRLAAATGKAVLSVGPVSLCGAAAPPSLLDSRANSDDARLCMAWLDAKRADSVLYVSFGSAGRMPPAQLIQLGLALVSCPWPVLWVIKGADTLPDDVNEWLQRNTDGSGLPESQCLALRGWAPQVAILEHPAVGGFLTHCGWGSTLESVAAGVPMATWPFSAEQFLNEKLIVHVLGIGLSVGVTKPTESVLTGAKDGGGKADADVGMEQVKQALDMLMDGGADGEARKTKAKELKAKSKTALEHGGSSYMNLEKLIQFGA

SEQ ID NO: 20048 - protein, 368 aa, Zea mays subsp. mays
  peptide (1)..(368): Ceres Seq. ID no. 12435644
MCHTWAHGVARELGAPCFIFHGFCAFALLCCEYLNTHRPHEAVGSPDELFDLPALPPFEFRFARRQLPIHFQPSSSIPEDRHRELRKFELAVDGIVVNSFEELEHGSVSRLAAATGKAVLSVGPVSLCGAAAPPSLLDSRANSDDARLCMAWLDAKRADSVLYVSFGSAGRMPPAQLIQLGLALVSCPWPVLWVIKGADTLPDDVNEWLQRNTDGSGLPESQCLALRGWAPQVAILEHPAVGGFLTHCGWGSTLESVAAGVPMATWPFSAEQFLNEKLIVHVLGIGLSVGVTKPTESVLTGAKDGGGKADADVGMEQVKQALDMLMDGGADGEARKTKAKELKAKSKTALEHGGSSYMNLEKLIQFGA

SEQ ID NO: 20049 - DNA, 989 bp, Zea mays subsp. mays; identical to SEQ ID NO: 18479
  misc_feature (1)..(989): Ceres Seq. ID no. 12378246
  misc_feature (1)..(989): Ortholog of  Ceres SEQ ID NO 14304457 as cited in SEQ ID NO 53555

SEQ ID NO: 20050 - protein, 319 aa, Zea mays subsp. mays; identical to SEQ ID NO: 18480
  peptide (1)..(319): Ceres Seq. ID no. 12378247

SEQ ID NO: 20051 - protein, 245 aa, Zea mays subsp. mays; identical to SEQ ID NO: 18481
  peptide (1)..(245): Ceres Seq. ID no. 12378248

SEQ ID NO: 20052 - DNA, 1101 bp, Zea mays subsp. mays
  misc_feature (1)..(1101): Ceres Seq. ID no. 13600500
  misc_feature (1)..(1101): Ortholog of  Ceres SEQ ID NO 15226449 as cited in SEQ ID NO 58879
  misc_feature (1)..(1101): Ortholog of  Ceres SEQ ID NO 13597146 as cited in SEQ ID NO 63311
tggattgactggtttgcagacgtggaaatacccaattcctcagggtgaaatacatcatgtcatgaaccctgatccttatcgggggactttcgggtctgatgctgcagcttatgctaaggaagtcgaagaacacataacttatggaagttcaggaagggttgcaggcttcattgcagaaacattccaaggtgtgggaggtgctgttgaactagctcctggatacctaaagttagcttatgacattgtgcgcaaggctggtggcgtttgtattgctgatgaagtccagagtggttttggccgtactggcagtcattactggggattccagacacaaggtgtcattcctgacatagtcaccatggcaaagggaattggcaatggcctaccattgggggcagttgtgacaactcctgagattgcaagtgtgttagctcaaaaaatccaatttaacacatttggtggaaatccagtttgttctgctggtgggttagctgtgcttaaggttcttgacaaggagaaacgccaggcacattgtgctgatgttggatctcacttgttggagcgtctaaaatcgcttcaggagaagcacgaaatcataggtgatgttagaggaaggggactgatgcttggggtggaactcgttacgggcagaaaggagaagacccctgccaagtcagaaaccattgaactgtttgagaagctcagagatctcggggtactagttggaaagggcggtctgcatcgtaacgtcttcagaataaaaccaccgatgtgcttttcgaaggacgatgcagacttcttggtggactccatggactacgcaatgtcaaggctctgaaggaacatgctctgagttgacaatgtgtctgcgtggaaacaacacttcctgcaaccgcaagatgcatggcctgaaatgaaactgaaaggcagatgatttaatgggcatgctccccgggtggtatgttggtgttatggtgaagtttaatagtccccctcccccgaataaattgatgaaaggggacagaacgtcttgcccagcttgtgaactgtttgtagaagaactgcagttaataaatagaatagcgagcaagcaagcgtgat

SEQ ID NO: 20053 - protein, 278 aa, Zea mays subsp. mays
  peptide (1)..(278): Ceres Seq. ID no. 13600501
GLTGLQTWKYPIPQGEIHHVMNPDPYRGTFGSDAAAYAKEVEEHITYGSSGRVAGFIAETFQGVGGAVELAPGYLKLAYDIVRKAGGVCIADEVQSGFGRTGSHYWGFQTQGVIPDIVTMAKGIGNGLPLGAVVTTPEIASVLAQKIQFNTFGGNPVCSAGGLAVLKVLDKEKRQAHCADVGSHLLERLKSLQEKHEIIGDVRGRGLMLGVELVTGRKEKTPAKSETIELFEKLRDLGVLVGKGGLHRNVFRIKPPMCFSKDDADFLVDSMDYAMSRL

SEQ ID NO: 20054 - protein, 258 aa, Zea mays subsp. mays
  peptide (1)..(258): Ceres Seq. ID no. 13600502
MNPDPYRGTFGSDAAAYAKEVEEHITYGSSGRVAGFIAETFQGVGGAVELAPGYLKLAYDIVRKAGGVCIADEVQSGFGRTGSHYWGFQTQGVIPDIVTMAKGIGNGLPLGAVVTTPEIASVLAQKIQFNTFGGNPVCSAGGLAVLKVLDKEKRQAHCADVGSHLLERLKSLQEKHEIIGDVRGRGLMLGVELVTGRKEKTPAKSETIELFEKLRDLGVLVGKGGLHRNVFRIKPPMCFSKDDADFLVDSMDYAMSRL

SEQ ID NO: 20055 - protein, 159 aa, Zea mays subsp. mays
  peptide (1)..(159): Ceres Seq. ID no. 13600503
MAKGIGNGLPLGAVVTTPEIASVLAQKIQFNTFGGNPVCSAGGLAVLKVLDKEKRQAHCADVGSHLLERLKSLQEKHEIIGDVRGRGLMLGVELVTGRKEKTPAKSETIELFEKLRDLGVLVGKGGLHRNVFRIKPPMCFSKDDADFLVDSMDYAMSRL

SEQ ID NO: 20056 - DNA, 497 bp, Zea mays subsp. mays
  misc_feature (1)..(497): Ceres Seq. ID no. 12589112
  misc_feature (1)..(497): Ortholog of  Ceres SEQ ID NO 13593410 as cited in SEQ ID NO 20366
gaaaaatccccagcccaaaatgaacgccaccaccgccgtggctgcgaggcgcctcctcctcccgctccgcgcccagccgccagcaccgcggggcgcagcgccggcctcggcgcacccctggtgtcgatccgttccgcggagacgacgagtccgtgccgccccggcgcgcgcgtcgctggaccgcgccgcggtcctcctcgacaccgcggccgcggtggccaacggcgggacaggttactcgcaggcgagctactacacgtctctgggactcttcgttctctccgttccggggctgtggtccctcatcaagcgctccgtcaagtccaagattgtgcaaaagacatttgtgaaagacgatggacagtcgatggcgccaaatcaggtggctggagagatcctgtcgttcttcactcgcaataacttcaccgtctcagaccgcggtgaggtcatcacattcgagggcacaatgataccaaacagaggccaggcggcgctgc

SEQ ID NO: 20057 - protein, 165 aa, Zea mays subsp. mays
  peptide (1)..(165): Ceres Seq. ID no. 13586476
KNPQPKMNATTAVAARRLLLPLRAQPPAPRGAAPASAHPWCRSVPRRRRVRAAPARASLDRAAVLLDTAAAVANGGTGYSQASYYTSLGLFVLSVPGLWSLIKRSVKSKIVQKTFVKDDGQSMAPNQVAGEILSFFTRNNFTVSDRGEVITFEGTMIPNRGQAAL

SEQ ID NO: 20058 - protein, 159 aa, Zea mays subsp. mays
  peptide (1)..(159): Ceres Seq. ID no. 13586477
MNATTAVAARRLLLPLRAQPPAPRGAAPASAHPWCRSVPRRRRVRAAPARASLDRAAVLLDTAAAVANGGTGYSQASYYTSLGLFVLSVPGLWSLIKRSVKSKIVQKTFVKDDGQSMAPNQVAGEILSFFTRNNFTVSDRGEVITFEGTMIPNRGQAAL

SEQ ID NO: 20059 - protein, 139 aa, Zea mays subsp. mays
  peptide (1)..(139): Ceres Seq. ID no. 13586478
EKSPAQNERHHRRGCEAPPPPAPRPAASTAGRSAGLGAPLVSIRSAETTSPCRPGARVAGPRRGPPRHRGRGGQRRDRLLAGELLHVSGTLRSLRSGAVVPHQALRQVQDCAKDICERRWTVDGAKSGGWRDPVVLHSQ

SEQ ID NO: 20060 - DNA, 1826 bp, Zea mays subsp. mays
  misc_feature (1)..(1826): Ceres Seq. ID no. 12387680
  misc_feature (1)..(1826): Ortholog of  Ceres SEQ ID NO 13646221 as cited in SEQ ID NO 20310
  misc_feature (1)..(1826): Ortholog of  Ceres SEQ ID NO 14311423 as cited in SEQ ID NO 53911
  misc_feature (1)..(1826): Ortholog of  Ceres SEQ ID NO 14315261 as cited in SEQ ID NO 58451
gcacgagaccattacctagaacatcctaatcgaaaagtactgtacatcgacatgcgacatcttgcttggcctatctgatctttaatgtcgccgcgcacagagaggagatccggtctcatgaagtggctctgcagattcctcaaggggccgaagcccggcgaaccgagccgccggcggccccaggtggcggccggagaaggggagggcgcgctttggcaccaacgaccagctagaccaaagatcgatccacctaggaacgagaatgaggaactagtggaccgtgccattgccgagcctcttgcagaggctgtcaaaccgcccagagagaaaacccataggggagaagacagcaacgacgacgaagatctcacaagagccgtacaggacagtctgaatatgaacccttacacgccttacaacccctatccaccctctcaagcccaacctatagggcacagggtatgcggaggctgcaagcatgagatagggcgtggccattacttgagctgcatgggcatttactggcaccctcagtgcttccgctgcaggtcctgcggtcaccttatccgtgagaccgagttcaccttgctgggtacggattcgtaccacaagctgtgctacaaggagctgcatcatccaaagtgcgacgtctgccttcagtttgtaaggcctcgtgtcctcggaaaacctgaggcgatctgcactgcagactgtgataaactgcatcccaacgaacgggagtggcttgatagagtacagagcccacccgttctggggccagaagtattgcccttcgcatgagcgcgacaggacgccacgttgctgcagctgtgagaaaatggaggtacagccaaggaacacgaagtacatgtcgctgggagacggacgcggcctgtgcatggaatgcctgggatctgcagtgatggacacgagcgagtgccagcctctgtaccattctatcagatactactacgaggggatggacatgagactggaccagcagatacccgtgctcttggttgagcggcaagcgctcaacgaagccatggaaggggagagtaaaggcccacaccacatgcctgagactaggggcctatgtctgtccgaggagcggactgtgagcagtatacttaggaggcccagaattggtggaaaccggttactaggcatgagaactcggccacagaagctgacgaggagatgtgaagttactgcaatacttgtcctgtatggcctccccaggctactgacaggttccatcctcgcccatgagctgatgcacgggtggctgcgcctcaaaggttaccgaaacctaaacgcggaggtggaagaaggcatatgccaggtcatgtcttacttgtggctggaatcagagattcttccgtcatcctcgaggcacgcgcagccttcatcatcgtcctcctcctcatcctatccagcaacatcatccgagaaaggtggaatatctcataccgggaagaagctgggcgagttcttcatgcaccagattgccaatgacacgtcgacggcctatggtgacgggttcagaactgcgtacgctgccgtcaacaagtatggccttcgccaaacactgagccatatacgcctaacaggaggcttccctgtataataagagtgacaaaaaagacacaaaatgtccatgcatgatcatatcgatatcaaaaggttatatacatattgggatgaagttcgctatggaagcatagtgattcagtttcggtgaccttgagttttcaaagaggtcatgtgtaagaacactgatttaggggtggaggtatgccgcttccggcatatgatttcctctc

SEQ ID NO: 20061 - protein, 263 aa, Zea mays subsp. mays
  peptide (1)..(263): Ceres Seq. ID no. 12387681
MEVQPRNTKYMSLGDGRGLCMECLGSAVMDTSECQPLYHSIRYYYEGMDMRLDQQIPVLLVERQALNEAMEGESKGPHHMPETRGLCLSEERTVSSILRRPRIGGNRLLGMRTRPQKLTRRCEVTAILVLYGLPRLLTGSILAHELMHGWLRLKGYRNLNAEVEEGICQVMSYLWLESEILPSSSRHAQPSSSSSSSSYPATSSEKGGISHTGKKLGEFFMHQIANDTSTAYGDGFRTAYAAVNKYGLRQTLSHIRLTGGFPV

SEQ ID NO: 20062 - protein, 253 aa, Zea mays subsp. mays
  peptide (1)..(253): Ceres Seq. ID no. 12387682
MSLGDGRGLCMECLGSAVMDTSECQPLYHSIRYYYEGMDMRLDQQIPVLLVERQALNEAMEGESKGPHHMPETRGLCLSEERTVSSILRRPRIGGNRLLGMRTRPQKLTRRCEVTAILVLYGLPRLLTGSILAHELMHGWLRLKGYRNLNAEVEEGICQVMSYLWLESEILPSSSRHAQPSSSSSSSSYPATSSEKGGISHTGKKLGEFFMHQIANDTSTAYGDGFRTAYAAVNKYGLRQTLSHIRLTGGFPV

SEQ ID NO: 20063 - protein, 243 aa, Zea mays subsp. mays
  peptide (1)..(243): Ceres Seq. ID no. 12387683
MECLGSAVMDTSECQPLYHSIRYYYEGMDMRLDQQIPVLLVERQALNEAMEGESKGPHHMPETRGLCLSEERTVSSILRRPRIGGNRLLGMRTRPQKLTRRCEVTAILVLYGLPRLLTGSILAHELMHGWLRLKGYRNLNAEVEEGICQVMSYLWLESEILPSSSRHAQPSSSSSSSSYPATSSEKGGISHTGKKLGEFFMHQIANDTSTAYGDGFRTAYAAVNKYGLRQTLSHIRLTGGFPV

SEQ ID NO: 20064 - DNA, 1863 bp, Zea mays subsp. mays
  misc_feature (1)..(1863): Ceres Seq. ID no. 12383411
  misc_feature (1)..(1863): Ortholog of  Ceres SEQ ID NO 13599900 as cited in SEQ ID NO 531
  misc_feature (1)..(1863): Ortholog of  Ceres SEQ ID NO 13659971 as cited in SEQ ID NO 67565
  misc_feature (1)..(1863): Ortholog of  Ceres SEQ ID NO 13500385 as cited in SEQ ID NO 67583
gcacgagaccattacctagaacatcctaatcgaaaagcatcgccgcatctttccaccttccctcccctccactcccgcaatctcgtctccgccgtccgccgccgcgccgtagcaaggtaacagagatcacaacaagttaaagcctcaaggaatgctgaaagatgtgctttcctagaagatatttctgttgcgacatcaaggaccttgctgctccccgagggctgctgatctgctcaactcttgatgacctgatctgcatcgattctacaacgttcagactgcgccacgaccaagccataagagtactgttcaccgtcatggatcatgacatgggggaggaaggctaactctttgcccagtcccacctgattggcgccagcagtgtgatttatactttttgcagagagagaagatatggagtcgacaggaaagattttgatggagcggtatgaggtggggaggctactggggaaaggcacatttggcaaggtgcactacgcaaagaatcttgagtccaacgagagtgttgccattaagatgatggacaaggacaaagtgctcaaggccgggctttcggagcagataaggcgggagatcacaacgatgcggttggtggctcataagaacattgttgagcttcatgaggtcatggcgacgcggaacaacatctactttgtcatggagtatgtgaaaggcggagagctctttgacaagattggcaagagtggcaagctcacagaggccgctgcacacaagtacttccagcagctcattggtgcggtggattactgccacagccgaggtgtgtatcaccgggacttgaagcctgagaaccttctgttggatgagaatgagaacctcaaggtctcagattttggactgagtgcactttcagaatcccaagggggcaagatggcttactccacaccacctgtgggactccagcatatgtagctccagaggtgatcagcaagacaggctatgatggggcaaagtcagacatctggtcctgtggtgttgttctatttgtactagttgctggttatcttcctttccgggccccaaacatgatggagatgtatcgcaagatacagaatggtgatttcaggtgccctagttggttttcacacaaactcaagaagctcttgtacaagatcctcgaccccagcccagacacaagaatttcagtgcagaagataaaagagtctacctggtttcgaaaaggccctgtggagacccgtacagtaaaggagaaaattctgagtgagaatgacaccacaaatgctgctccagccgttgctatgaggcgcaagaagaatgttcatgaagacgtgaagcccccgactgtcacaagcttaaacgcctttgaaattatatctttctccacaggattggacctctctggcctatttatcagaaaggagtgtaagaaggagacgcggttcacttctgataagggtgccgtgtccatcatctcgaagcttgaagatgttgcaaaagcactgaatctcagggtaaggaagaaggacaatggtgttgtcaagattcaggggaggaaggtggggaggaagggtgtcctggagttcgacactgaaatatttgagatcacggcatcctaccacctcatcgagatgaaacaaacgggcggtgattcacttgagtacaagaaactgttggaagaggacatccggccagcactgaaggacatagtctgggcctggcatggagatgaccagcaacaaaagtagtagctttggatctctcttttttgttccataaaattgttagatctttcacttcagattgattttgttcgacatgtgcgtgttcttcttactagttacattctttctgtttctgtgg

SEQ ID NO: 20065 - protein, 226 aa, Zea mays subsp. mays
  peptide (1)..(226): Ceres Seq. ID no. 12383412
MMEMYRKIQNGDFRCPSWFSHKLKKLLYKILDPSPDTRISVQKIKESTWFRKGPVETRTVKEKILSENDTTNAAPAVAMRRKKNVHEDVKPPTVTSLNAFEIISFSTGLDLSGLFIRKECKKETRFTSDKGAVSIISKLEDVAKALNLRVRKKDNGVVKIQGRKVGRKGVLEFDTEIFEITASYHLIEMKQTGGDSLEYKKLLEEDIRPALKDIVWAWHGDDQQQK

SEQ ID NO: 20066 - protein, 225 aa, Zea mays subsp. mays
  peptide (1)..(225): Ceres Seq. ID no. 12383413
MEMYRKIQNGDFRCPSWFSHKLKKLLYKILDPSPDTRISVQKIKESTWFRKGPVETRTVKEKILSENDTTNAAPAVAMRRKKNVHEDVKPPTVTSLNAFEIISFSTGLDLSGLFIRKECKKETRFTSDKGAVSIISKLEDVAKALNLRVRKKDNGVVKIQGRKVGRKGVLEFDTEIFEITASYHLIEMKQTGGDSLEYKKLLEEDIRPALKDIVWAWHGDDQQQK

SEQ ID NO: 20067 - protein, 223 aa, Zea mays subsp. mays
  peptide (1)..(223): Ceres Seq. ID no. 12383414
MYRKIQNGDFRCPSWFSHKLKKLLYKILDPSPDTRISVQKIKESTWFRKGPVETRTVKEKILSENDTTNAAPAVAMRRKKNVHEDVKPPTVTSLNAFEIISFSTGLDLSGLFIRKECKKETRFTSDKGAVSIISKLEDVAKALNLRVRKKDNGVVKIQGRKVGRKGVLEFDTEIFEITASYHLIEMKQTGGDSLEYKKLLEEDIRPALKDIVWAWHGDDQQQK

SEQ ID NO: 20068 - DNA, 1240 bp, Zea mays subsp. mays
  misc_feature (1)..(1240): Ceres Seq. ID no. 12418860
  misc_feature (1)..(1240): Ortholog of  Ceres SEQ ID NO 12609394 as cited in SEQ ID NO 52095
gcacgagaccattacctagaacatcctaatcaaaaactcttaccgccagccccacatcacggagcatcccccttaataacagcaaactaccacacccatgtccacctccgtctccgccgccgccgttgccgctctcgtcccacccctcaccggccgccggtcgccgccggcatctcgcgtaccgcagatttgccgcagaagaatcagatccaaaccccgtatcttctcttcttccccctccttccccattgtccccgccgctgccatggccaccggcggcgccgcccccaccgcctccgatgccgggtccaagaagaagttgctcatcttcgactccgaggaggatctcgcggtttctcttgcgaagtacactgcggagctgtcggagaagttcgcggccgagaggggtgccttcaccgccgtgctctctggcggatccctcatcgaggcactcaggaagctgacggagccgccgtacctggattcagtggactggagcaagtggcacgtcttctgggtggatgagagggtcgtgcccaaggaccatgtggatagcaactacaagctcgcctatgatgggtttctctccaaggtgccgattcctcctggacaagtttatgctataaacgatgcgttgtcagctgaaggagcggcagacgactacgaagcgtgcctgaagcagcttgtcaagaacggtgtgatttctatgtcagcggcgactggatttcccaggtttgatctccagcttctgggaatgggacctgatggccacattgcgtctctcttccctggccaccctcttgttaacgagaaagagaggtgggtcacatacattaaggattctccaaagccacctccagagagaattacattcacgtttccagtaatcaactcatccgcatacgttgcgatggtggtgactggagctggaaaggcggcagcggtgcagaaggcgctctcagacaagcaaacctcgtcagacctgctgcctgttgagatggctgtgctacaagatggagagttcacctggttcactgataaggcagcggtgtccttgctgcagaacaagtagagtctccatggtaaccttggctcggctcgaagccattttagctcataaaataaaagatccatgggcctgcgtgcatagctgcattcgtcctccaggatttcgtgtaacggagactcgatccttttatgtgtattgttcggagtaatgttcaaaaactctattgtctcc

SEQ ID NO: 20069 - protein, 324 aa, Zea mays subsp. mays
  peptide (1)..(324): Ceres Seq. ID no. 12418861
MSTSVSAAAVAALVPPLTGRRSPPASRVPQICRRRIRSKPRIFSSSPSFPIVPAAAMATGGAAPTASDAGSKKKLLIFDSEEDLAVSLAKYTAELSEKFAAERGAFTAVLSGGSLIEALRKLTEPPYLDSVDWSKWHVFWVDERVVPKDHVDSNYKLAYDGFLSKVPIPPGQVYAINDALSAEGAADDYEACLKQLVKNGVISMSAATGFPRFDLQLLGMGPDGHIASLFPGHPLVNEKERWVTYIKDSPKPPPERITFTFPVINSSAYVAMVVTGAGKAAAVQKALSDKQTSSDLLPVEMAVLQDGEFTWFTDKAAVSLLQNK

SEQ ID NO: 20070 - protein, 268 aa, Zea mays subsp. mays
  peptide (1)..(268): Ceres Seq. ID no. 12418862
MATGGAAPTASDAGSKKKLLIFDSEEDLAVSLAKYTAELSEKFAAERGAFTAVLSGGSLIEALRKLTEPPYLDSVDWSKWHVFWVDERVVPKDHVDSNYKLAYDGFLSKVPIPPGQVYAINDALSAEGAADDYEACLKQLVKNGVISMSAATGFPRFDLQLLGMGPDGHIASLFPGHPLVNEKERWVTYIKDSPKPPPERITFTFPVINSSAYVAMVVTGAGKAAAVQKALSDKQTSSDLLPVEMAVLQDGEFTWFTDKAAVSLLQNK

SEQ ID NO: 20071 - protein, 174 aa, Zea mays subsp. mays
  peptide (1)..(174): Ceres Seq. ID no. 12418863
ARDHYLEHPNQKLLPPAPHHGASPLITANYHTHVHLRLRRRRCRSRPTPHRPPVAAGISRTADLPQKNQIQTPYLLFFPLLPHCPRRCHGHRRRRPHRLRCRVQEEVAHLRLRGGSRGFSCEVHCGAVGEVRGREGCLHRRALWRIPHRGTQEADGAAVPGFSGLEQVARLLGG

SEQ ID NO: 20072 - DNA, 481 bp, Zea mays subsp. mays
  misc_feature (1)..(481): Ceres Seq. ID no. 2790117
  misc_feature (1)..(481): Ortholog of  Ceres SEQ ID NO 15226238 as cited in SEQ ID NO 68840
aaggagcgtggggaggaagacttggctagccactagcactaggtgtgagagtttgagtcgtggtggtgtataaagcagtcgtcaagcacaagctcctcctctccctcgtctcgcctgagcagccaagcccatccatcgttccacccacctccgcgatacgatggccgtccctcctgcccgcctcgccgcgtcctcgctcccgctgctcctcgtctggctccagctccagctgctcctcgcgtccgcctgcgaccgctgcgtgcgccactccaaggccgcctactacacctccgcgctcaccctcgcgggcggctcctgtgggtacggcaccgacgccgcctccttgagcgccgggttcctcgccgccgccgccagccccgcgctgtaccgcgccggcgtcggctgcggcgcctgcttccaggtgcggtgcaaggacaagaagctgtgcgccgcggcgggcgccagggtggtggtcacggac

SEQ ID NO: 20073 - protein, 107 aa, Zea mays subsp. mays
  peptide (1)..(107): Ceres Seq. ID no. 2790118
MAVPPARLAASSLPLLLVWLQLQLLLASACDRCVRHSKAAYYTSALTLAGGSCGYGTDAASLSAGFLAAAASPALYRAGVGCGACFQVRCKDKKLCAAAGARVVVTD

SEQ ID NO: 20074 - DNA, 1342 bp, Zea mays subsp. mays
  misc_feature (1)..(1342): Ceres Seq. ID no. 15180493
  misc_feature (1)..(1342): Ortholog of  Ceres SEQ ID NO 14304034 as cited in SEQ ID NO 53878
  misc_feature (1)..(1342): Ortholog of  Ceres SEQ ID NO 15171520 as cited in SEQ ID NO 60477
gtccttgccatggccatccccaccgcccccgccctcctcttcccctccgttctccctaactcattcccccgccggacaccctggcgacacctcgtccggcggaaaccgcgtcacctccgcgcgggccgcccacgcctgcaggcgccggcgccggctcctcccccggtggcggaggtcgcggcggagcgggacgacacgcctccgctcaggctgctcgagccgccgcaggaggacgaccccttcccgcccgagatggagcccgcggaccctgatttctaccggataggatatgcgcggatgatgcgcgcctatgggatcgagttcctcgaaggccccgacgggatgggcgtctacgcttcccgggacgtggagccacttcgcagagctagagtgattatggagattccgttggagctgatgctgactataactcaaaagaaaccttggatgtttttccctgacattattccactaggccatcctatatttgatgttatcgagtcaacagatccagagacagattgggatctaagattagcatgtcttcttctatatgcatttgatatagaagacaacttttggcagttatattctgattttttgccaagtgctgatgaatgcactagtttgctgctggcaccaaaggaagatctaatggaactagaagatgaagatcttgcttcacaaatgttaaaacaccaggaacgagcaattgacttttggcaaaagcattgggacaaaccaattcctctaaagctgaaacgccttgcacgtgaccatgagagatttctctgggcactgagtatagtacagtctcgttctgtcaacttgaagttgagaatgggagccttcatccaagatgcaaatgtgctagctccttatgctgatatgttgaaccactcacccaatgctaattgcttcctgcattggcgttttaaagatcgtatgcttgaagttatgattaaggctggacaagctatcaagaaaggagacgagatgacgatagattatatgagtggcgtcaacagcaaatttgtggaaagatatgggttctcatcaccaacgaatccttgggagctcataaatttctcgagtcctgcaacaattcacatggattccttcttatcggtcttcaatatcgctggcttgcatgatgagctgtaccacaattctgcattgacctcagtagtagaaaccgactttgtggacggagcagtcgtagcagcagccagagcattgccgacatggtcagatggtgatgttcctgcaattcctagtgtggagagaaaatctgctcaggcactgcaagaggagtgccgccaaatgttggattcattcccaa

SEQ ID NO: 20075 - protein, 447 aa, Zea mays subsp. mays
  peptide (1)..(447): Ceres Seq. ID no. 15180494
VLAMAIPTAPALLFPSVLPNSFPRRTPWRHLVRRKPRHLRAGRPRLQAPAPAPPPVAEVAAERDDTPPLRLLEPPQEDDPFPPEMEPADPDFYRIGYARMMRAYGIEFLEGPDGMGVYASRDVEPLRRARVIMEIPLELMLTITQKKPWMFFPDIIPLGHPIFDVIESTDPETDWDLRLACLLLYAFDIEDNFWQLYSDFLPSADECTSLLLAPKEDLMELEDEDLASQMLKHQERAIDFWQKHWDKPIPLKLKRLARDHERFLWALSIVQSRSVNLKLRMGAFIQDANVLAPYADMLNHSPNANCFLHWRFKDRMLEVMIKAGQAIKKGDEMTIDYMSGVNSKFVERYGFSSPTNPWELINFSSPATIHMDSFLSVFNIAGLHDELYHNSALTSVVETDFVDGAVVAAARALPTWSDGDVPAIPSVERKSAQALQEECRQMLDSFP

SEQ ID NO: 20076 - protein, 444 aa, Zea mays subsp. mays
  peptide (1)..(444): Ceres Seq. ID no. 15180495
MAIPTAPALLFPSVLPNSFPRRTPWRHLVRRKPRHLRAGRPRLQAPAPAPPPVAEVAAERDDTPPLRLLEPPQEDDPFPPEMEPADPDFYRIGYARMMRAYGIEFLEGPDGMGVYASRDVEPLRRARVIMEIPLELMLTITQKKPWMFFPDIIPLGHPIFDVIESTDPETDWDLRLACLLLYAFDIEDNFWQLYSDFLPSADECTSLLLAPKEDLMELEDEDLASQMLKHQERAIDFWQKHWDKPIPLKLKRLARDHERFLWALSIVQSRSVNLKLRMGAFIQDANVLAPYADMLNHSPNANCFLHWRFKDRMLEVMIKAGQAIKKGDEMTIDYMSGVNSKFVERYGFSSPTNPWELINFSSPATIHMDSFLSVFNIAGLHDELYHNSALTSVVETDFVDGAVVAAARALPTWSDGDVPAIPSVERKSAQALQEECRQMLDSFP

SEQ ID NO: 20077 - protein, 363 aa, Zea mays subsp. mays
  peptide (1)..(363): Ceres Seq. ID no. 15180496
MEPADPDFYRIGYARMMRAYGIEFLEGPDGMGVYASRDVEPLRRARVIMEIPLELMLTITQKKPWMFFPDIIPLGHPIFDVIESTDPETDWDLRLACLLLYAFDIEDNFWQLYSDFLPSADECTSLLLAPKEDLMELEDEDLASQMLKHQERAIDFWQKHWDKPIPLKLKRLARDHERFLWALSIVQSRSVNLKLRMGAFIQDANVLAPYADMLNHSPNANCFLHWRFKDRMLEVMIKAGQAIKKGDEMTIDYMSGVNSKFVERYGFSSPTNPWELINFSSPATIHMDSFLSVFNIAGLHDELYHNSALTSVVETDFVDGAVVAAARALPTWSDGDVPAIPSVERKSAQALQEECRQMLDSFP

SEQ ID NO: 20078 - DNA, 1431 bp, Zea mays subsp. mays
  misc_feature (1)..(1431): Ceres Seq. ID no. 12419006
  misc_feature (1)..(1431): Ortholog of  Ceres SEQ ID NO 13596244 as cited in SEQ ID NO 69307
aatgaaggacacaaagaagcccacgcgggcgtcgtctcgcttaggcgggagggtcgtcggcgtggcatccatgcttctcttcgtctcgttggggttcgttctcggcgtgacctcctccaacgccatgttcatccgatactacctccctttcatgccaccgttacgctctagtgctgcgccgtcgtcttcgcctccgccgctgacgacaccactgacaccgtcgcaaacgccgccgccgccgccgccgccgccgctgccacaaaacccgcagctgcggtcggcgggcttcctttccccgagcggcgtcatgcacaacatgaccgacgaggaactgtactggcgagcgtccatggcgccgatggtccgccgcacgccggacagccgcgtgcccaaggtggctttcttgttcctggtcagggggaagctgcctctccggcctctgtgggagaagttcttcgcgggccacgaaggccggtactccatttacgtgcacgcccacccgtcctacaccggctcgccgccgacggactccccgttctacggccgctacatcccgagccagataacgaaatggggcgacgcgagcctggtggaggcggagcggcggctcctggcaaacgcgctcctggacctgggcaacgagcggttcgcgctcttctccgaggcgtgcatcccggtgtacgacttccccaccgtgcacgccttcctgacaggctccgacaccagcttcgtggactgctacgagaacggcggcagccggtcgcgctaccggcccttcttcgccacccgcaacatcacgctggcgcggtggcgcaagggcgcgcagtggttcgagatggaccgcgcgctggcgctggagtccgtcgcggacggctcctgcttcccggcgttccgcgacttctgcgtggggcggagggagtgcctcatcgacgagcactacctgccgacgctggtgagcctgctggggtggggccgccgcaacgccaaccgcacgctcacgtacgcggactggaagcggcccgtcaaccggcacccgcacacccacggcccggacgaggtgacggaggagcggatcagggagatcagggaggaaggcggcaggcggtgcttctacaacggagccaggagaggcatctgcaacctgttcgcgcgcaagttctcgccggacacgctcgagccgctgctccggctggcgcccaaggtcatggggttcgggtgacctgaccagacgatcgaccgaccggagcaggaggcagtgtaccatagcattctactattctttgcgccgtggatgatcgacccaggttgagctgggaatcacaggcagagagtcgactcgagtccaccatcaggctatcaggactcaggaggagaataagctctttcttttgcgaaccatatacacagtgtatcatgaacatcccgtttgtc

SEQ ID NO: 20079 - protein, 405 aa, Zea mays subsp. mays
  peptide (1)..(405): Ceres Seq. ID no. 12419007
MKDTKKPTRASSRLGGRVVGVASMLLFVSLGFVLGVTSSNAMFIRYYLPFMPPLRSSAAPSSSPPPLTTPLTPSQTPPPPPPPPLPQNPQLRSAGFLSPSGVMHNMTDEELYWRASMAPMVRRTPDSRVPKVAFLFLVRGKLPLRPLWEKFFAGHEGRYSIYVHAHPSYTGSPPTDSPFYGRYIPSQITKWGDASLVEAERRLLANALLDLGNERFALFSEACIPVYDFPTVHAFLTGSDTSFVDCYENGGSRSRYRPFFATRNITLARWRKGAQWFEMDRALALESVADGSCFPAFRDFCVGRRECLIDEHYLPTLVSLLGWGRRNANRTLTYADWKRPVNRHPHTHGPDEVTEERIREIREEGGRRCFYNGARRGICNLFARKFSPDTLEPLLRLAPKVMGFG

SEQ ID NO: 20080 - protein, 382 aa, Zea mays subsp. mays
  peptide (1)..(382): Ceres Seq. ID no. 12419008
MLLFVSLGFVLGVTSSNAMFIRYYLPFMPPLRSSAAPSSSPPPLTTPLTPSQTPPPPPPPPLPQNPQLRSAGFLSPSGVMHNMTDEELYWRASMAPMVRRTPDSRVPKVAFLFLVRGKLPLRPLWEKFFAGHEGRYSIYVHAHPSYTGSPPTDSPFYGRYIPSQITKWGDASLVEAERRLLANALLDLGNERFALFSEACIPVYDFPTVHAFLTGSDTSFVDCYENGGSRSRYRPFFATRNITLARWRKGAQWFEMDRALALESVADGSCFPAFRDFCVGRRECLIDEHYLPTLVSLLGWGRRNANRTLTYADWKRPVNRHPHTHGPDEVTEERIREIREEGGRRCFYNGARRGICNLFARKFSPDTLEPLLRLAPKVMGFG

SEQ ID NO: 20081 - protein, 364 aa, Zea mays subsp. mays
  peptide (1)..(364): Ceres Seq. ID no. 12419009
MFIRYYLPFMPPLRSSAAPSSSPPPLTTPLTPSQTPPPPPPPPLPQNPQLRSAGFLSPSGVMHNMTDEELYWRASMAPMVRRTPDSRVPKVAFLFLVRGKLPLRPLWEKFFAGHEGRYSIYVHAHPSYTGSPPTDSPFYGRYIPSQITKWGDASLVEAERRLLANALLDLGNERFALFSEACIPVYDFPTVHAFLTGSDTSFVDCYENGGSRSRYRPFFATRNITLARWRKGAQWFEMDRALALESVADGSCFPAFRDFCVGRRECLIDEHYLPTLVSLLGWGRRNANRTLTYADWKRPVNRHPHTHGPDEVTEERIREIREEGGRRCFYNGARRGICNLFARKFSPDTLEPLLRLAPKVMGFG

SEQ ID NO: 20082 - DNA, 1567 bp, Zea mays subsp. mays
  misc_feature (1)..(1567): Ceres Seq. ID no. 12369608
  misc_feature (1)..(1567): Ortholog of  Ceres SEQ ID NO 13600310 as cited in SEQ ID NO 5086
  misc_feature (1)..(1567): Ortholog of  Ceres SEQ ID NO 15172491 as cited in SEQ ID NO 58719
  misc_feature (1)..(1567): Ortholog of  Ceres SEQ ID NO 15180362 as cited in SEQ ID NO 0
gcacgagaccattacctagaacatcctaatcgaaaatctttataagcaagaacaagttctgcgaaaacgttactataatacaattgaagatatgaaaggaaaaataagagttttttgtcgcttgcgccctctaagcgacaaggaactttcttttgaggagaaaaatatagtttgcagtcctgatgaatttacaattgcacatccatggaaagatgagaagtcgaagcaacatatatatgatcgtgtttttgatgcaaacacaagtcaagaagaaatatttgaggatactaagtacctggtacaatcagctgttgatggatataacgtttgcatatttgcatatggtcaaactggttctggaaagactttcactatttatggttcagataacaatcctggtcttactccaagggccacatctgaactttttagggtgataaagcgcgatgggaacaaatattcattttcattgaagacatatatggtggagctttatcaagataatcttgtggacctattgttgcccagaaatgtgaagccgctaaagttagagataaaaaaagattccaagggtgttgttactgttgaaaatgcgacagttgtgagcatttcgagtattgaggaactgagggctataatttcaagaggctctgagaggaggcacactgccggaactaatatgaatgatgagagttcaaggtctcatttaattctttcagtcattattgaaagtacaaatcttcaaacccaatcatatgcaagaggcaagctaagttttgtggaccttgctggttctgagagggtgaaaaaatctggttccgcaggaaagcaactgaaagaagcacaaagtataaacaaatctctttctgctttggctgatgttattggtgctttatcttctgatggacaacatataccttaccggaaccataagttaacaatgcttatgagtgattctctgggagggaatgcgaagaccttgatgtttgtgaatgtttcaccagcagagtctaacttggaggagacttacaactcgctgatgtatgcttcacgcgttcgatgcattgttaatgatacgagcaagcatgttgctccaaaagaaatcatgagattgaagaagttgatcgcctactggaaggagcaagcaggcaagcggagtgatgaggacgagctagaggaggtaaaggaagagaggatctcaaaagagagagcagacaatcgcctgactggctgacaacttgacacaaccactgaatgctcctggttccgttcttccattacctggagaagaggtgattgatgctgatgagcatttgcaactgccacgagttctgcgatcgctctctaacagaatgttccgatatcatctgacctgtacatacagtagctacgtattatatactatggcagcgatgcccgtttgtacaaagaggaatgtagcacacattgatagaaagggaaaaggttgtgtgactgggaggcttgatgcgccctaagcctataacagctggatcatgtctttttccccccttggagcaggtatttaaagcataatgtgagcgtcctt

SEQ ID NO: 20083 - protein, 380 aa, Zea mays subsp. mays
  peptide (1)..(380): Ceres Seq. ID no. 12369609
MKGKIRVFCRLRPLSDKELSFEEKNIVCSPDEFTIAHPWKDEKSKQHIYDRVFDANTSQEEIFEDTKYLVQSAVDGYNVCIFAYGQTGSGKTFTIYGSDNNPGLTPRATSELFRVIKRDGNKYSFSLKTYMVELYQDNLVDLLLPRNVKPLKLEIKKDSKGVVTVENATVVSISSIEELRAIISRGSERRHTAGTNMNDESSRSHLILSVIIESTNLQTQSYARGKLSFVDLAGSERVKKSGSAGKQLKEAQSINKSLSALADVIGALSSDGQHIPYRNHKLTMLMSDSLGGNAKTLMFVNVSPAESNLEETYNSLMYASRVRCIVNDTSKHVAPKEIMRLKKLIAYWKEQAGKRSDEDELEEVKEERISKERADNRLTG

SEQ ID NO: 20084 - protein, 250 aa, Zea mays subsp. mays
  peptide (1)..(250): Ceres Seq. ID no. 12369610
MVELYQDNLVDLLLPRNVKPLKLEIKKDSKGVVTVENATVVSISSIEELRAIISRGSERRHTAGTNMNDESSRSHLILSVIIESTNLQTQSYARGKLSFVDLAGSERVKKSGSAGKQLKEAQSINKSLSALADVIGALSSDGQHIPYRNHKLTMLMSDSLGGNAKTLMFVNVSPAESNLEETYNSLMYASRVRCIVNDTSKHVAPKEIMRLKKLIAYWKEQAGKRSDEDELEEVKEERISKERADNRLTG

SEQ ID NO: 20085 - DNA, 466 bp, Zea mays subsp. mays
  misc_feature (1)..(466): Ceres Seq. ID no. 11028222
  misc_feature (1)..(466): Ortholog of  Ceres SEQ ID NO 14308586 as cited in SEQ ID NO 55143
  misc_feature (1)..(466): Ortholog of  Ceres SEQ ID NO 14314308 as cited in SEQ ID NO 57259
  misc_feature (1)..(466): Ortholog of  Ceres SEQ ID NO 15226216 as cited in SEQ ID NO 62291
aaatgctaatggattgcttaaactggagagtacagaatgagattgacatcgtgttagctaaacccattctgccatctgatatatatagagttattcgggacacgttacttgttggattgacagggtactccaagcagggacaacctgtttatgcatttggtgtgggtcttagtacttttgacaaggcctcggtgaattactatgtgcaatcacacatacagatgaatgaatatcgagatcgtgttgtcctgccggctgcatcaaagaagtttgggagacagattaatacctgcttgaaggttatggatatgactggcctcaagctgtctgcactgagccaaataaagatgttgacgatgattactactgttgatgaccttaattatcctgagaaaacggaaacttattacattgtaaatgctccatatgttttttcagcgtgttggaaggttgtgaagccactctt

SEQ ID NO: 20086 - protein, 154 aa, Zea mays subsp. mays
  peptide (1)..(154): Ceres Seq. ID no. 11028223
MLMDCLNWRVQNEIDIVLAKPILPSDIYRVIRDTLLVGLTGYSKQGQPVYAFGVGLSTFDKASVNYYVQSHIQMNEYRDRVVLPAASKKFGRQINTCLKVMDMTGLKLSALSQIKMLTMITTVDDLNYPEKTETYYIVNAPYVFSACWKVVKPL

SEQ ID NO: 20087 - protein, 152 aa, Zea mays subsp. mays
  peptide (1)..(152): Ceres Seq. ID no. 11028224
MDCLNWRVQNEIDIVLAKPILPSDIYRVIRDTLLVGLTGYSKQGQPVYAFGVGLSTFDKASVNYYVQSHIQMNEYRDRVVLPAASKKFGRQINTCLKVMDMTGLKLSALSQIKMLTMITTVDDLNYPEKTETYYIVNAPYVFSACWKVVKPL

SEQ ID NO: 20088 - protein, 81 aa, Zea mays subsp. mays
  peptide (1)..(81): Ceres Seq. ID no. 11028225
MNEYRDRVVLPAASKKFGRQINTCLKVMDMTGLKLSALSQIKMLTMITTVDDLNYPEKTETYYIVNAPYVFSACWKVVKPL

SEQ ID NO: 20089 - DNA, 1596 bp, Zea mays subsp. mays
  misc_feature (1)..(1596): Ceres Seq. ID no. 12381657
  misc_feature (1)..(1596): Ortholog of  Ceres SEQ ID NO 13596807 as cited in SEQ ID NO 62275
gcacgagaccattacctagaacatcctaatcgaaaagatgagagagatctttgatgcactgaagttgttaaggatcgtggttgacatcccgttctggaaaaagaatctctgtagagaagtgtagcttcagccgctttgatgactagttcaagaaggatgtcacggggtttcacaatgcaagcggcagccgcaagtggcctactggagcttgtgtgcttcggactggcttgaggaattccgaatcaaaggggccccggcgacggctagcgtgctgcgtgccatgacgagtcgatgaggtcccagttgttgattggccttggatgacgacgttgggcaactggcacggtgatggatgcgtccatgactgcaatgagcactgaatggaggtgataacatctatggtgctgattcaactgatgcagccaagtctatggatgcagcaattgctccagccattgacatgaaactgccttgggctgctgtgatcgggaaccatgaccaagagggtacgctatcgcgtgagggtgtgatgcgtcaccttgtgggcatgaaaaacacccttgcaagcttcaatccggaaggaattgaaattgatggttacggaaattacaatttggaagtttccggggttgaagggacatccatggatgaaaaatcagtgctcaacctgtatttcctggacagcggtgactattccactgtgccgtcaatcaatggttatggttggatcaaggcttcacagcaagtctggttccaacaaacatcttcaagtctacaggcaaagtatatgaataagaacccgaaacagaaggaaccagcacctggccttgtgttcttccacattccactaccagagttcagcagttttacggcatccaatttcacaggagtaaagcaggagggtatcagctcagcatcaattaactctgggttctttgcctccatggtggaggctggagatgtgagagctgcctttgtgggacatgatcacattaatgacttctgtgggaagctcagtggtattcagctctgctatgctggtggatttggttaccatgcctatgggaaagctgggtggtcaagaagagcgagggtactgtctgtgcaacttgagaaaacagacagcggtgaatggcgaggtgtcaagtccatcaagacatggaagaggcttgatgataaacatctgagcacaattgactctgaggttctctggaacagaggctctaatgggaggcgcaggaaaaatcctgatggtagttaacttttgatgcagacaggaatggtgctccataagggatctctacatcggtgtgtattgttggatggccagtttactatagaatcagaaatgcagaagtgtgtacatgggggagaaggtctatacagacacatacacgcaggtttctgctgttgcatttttccatgttattagaaaataagtaatcaaaattcagtgccgttgtcaattattgcaggtggtctcatagactagtatatagtgtggtcaaaggaaaacgagaatgcaatgtcattgtagtccatctctcgtgtattgttaaactcggtcggaaagggaaaaactgttctcccggtatt

SEQ ID NO: 20090 - protein, 276 aa, Zea mays subsp. mays
  peptide (1)..(276): Ceres Seq. ID no. 12381658
MDAAIAPAIDMKLPWAAVIGNHDQEGTLSREGVMRHLVGMKNTLASFNPEGIEIDGYGNYNLEVSGVEGTSMDEKSVLNLYFLDSGDYSTVPSINGYGWIKASQQVWFQQTSSSLQAKYMNKNPKQKEPAPGLVFFHIPLPEFSSFTASNFTGVKQEGISSASINSGFFASMVEAGDVRAAFVGHDHINDFCGKLSGIQLCYAGGFGYHAYGKAGWSRRARVLSVQLEKTDSGEWRGVKSIKTWKRLDDKHLSTIDSEVLWNRGSNGRRRKNPDGS

SEQ ID NO: 20091 - protein, 266 aa, Zea mays subsp. mays
  peptide (1)..(266): Ceres Seq. ID no. 12381659
MKLPWAAVIGNHDQEGTLSREGVMRHLVGMKNTLASFNPEGIEIDGYGNYNLEVSGVEGTSMDEKSVLNLYFLDSGDYSTVPSINGYGWIKASQQVWFQQTSSSLQAKYMNKNPKQKEPAPGLVFFHIPLPEFSSFTASNFTGVKQEGISSASINSGFFASMVEAGDVRAAFVGHDHINDFCGKLSGIQLCYAGGFGYHAYGKAGWSRRARVLSVQLEKTDSGEWRGVKSIKTWKRLDDKHLSTIDSEVLWNRGSNGRRRKNPDGS

SEQ ID NO: 20092 - protein, 243 aa, Zea mays subsp. mays
  peptide (1)..(243): Ceres Seq. ID no. 12381660
MRHLVGMKNTLASFNPEGIEIDGYGNYNLEVSGVEGTSMDEKSVLNLYFLDSGDYSTVPSINGYGWIKASQQVWFQQTSSSLQAKYMNKNPKQKEPAPGLVFFHIPLPEFSSFTASNFTGVKQEGISSASINSGFFASMVEAGDVRAAFVGHDHINDFCGKLSGIQLCYAGGFGYHAYGKAGWSRRARVLSVQLEKTDSGEWRGVKSIKTWKRLDDKHLSTIDSEVLWNRGSNGRRRKNPDGS

SEQ ID NO: 20093 - DNA, 1213 bp, Zea mays subsp. mays
  misc_feature (1)..(1213): Ceres Seq. ID no. 12418105
  misc_feature (1)..(1213): Ortholog of  Ceres SEQ ID NO 15168537 as cited in SEQ ID NO 57100
  misc_feature (1)..(1213): Ortholog of  Ceres SEQ ID NO 15178681 as cited in SEQ ID NO 63192
  misc_feature (1)..(1213): Ortholog of  Ceres SEQ ID NO 13579918 as cited in SEQ ID NO 64644
  misc_feature (1)..(1213): Ortholog of  Ceres SEQ ID NO 13654122 as cited in SEQ ID NO 68192
gacagcctccgcgcgccgcgtcgtcgtcactgtgcagagctagctgctgcaggtttgaaagcgatggccgcgctctacgccctcgtcgcggtctcgctgctgcccgttctcgtcacggcggagtgcgactgctcggacgacgacgccacgggccgcgacaaggcgggagcgctgcggctaaagatcatcgccatcttctgcatcctggcggggggcgcggccggcgcggcggtgccggcgctggggcgcaggctccccgcgctgcgcccgggcgcgggcccgttcctcgccgtcagggccttcgcgggcggcgtcatcctcgccacggggctggtgcacatcctgcccgcggccttcgacgcgctgggctcgccgtgcctcgcggcggccggcgggccgtgggccaggttcccgttcgccgggacggtcgccatcctcgccgcggtcgccacgctcgtggtggacacggtcgccacngggtacctgcgccggaagnccgcggcggtcggcgacgagccaccgcagctcggnggggacgaccccnaggaggcctccggcggcgggcgccacggccacgcgcacggtgtcgacgacgacgacgacctcgtacgccaccgngtcgtctctcaggtgctggagctgggcgtggtggtgcactcgctgatcatcggcatgtcccctgggcgcctcgggatttccccagcacggtgcgcccgctcgtcccggcgttgacgttccaccagctcttcgagggcatcggcctcggcgggtgcatcgtncaggccaaatttcgcctcaggtcaatggtggcgatggcagtcttcttctccctgacgaccccgatcggcgtggccatcggcatcgggatatcgtcggcgtacgacgagacgagccagacggcgctggtcgtgcagggcctgttcgaggccgcggccgcggggatcctggtgtacatggcgctcgtcgacatcctccgcgaggacttcatgagcgcccgggtgcagggcagcgcgcccctgcaggccgcgctgagcgcctcgctgctgctgggagctggcttgatgtccatgctcgccatctgggcatgagtgaccagaacgtgagctggcttgatgcgcagggagtgaattgtagtagtttcgttaggttcgtgttacagtgggtcagccgcttgcccgcttttgagtgtatagaagaggaggggtttgttttg

SEQ ID NO: 20094 - protein, 361 aa, Zea mays subsp. mays
  peptide (1)..(361): Ceres Seq. ID no. 12418106
  misc_feature (159)..(159): Xaa is any aa, unknown or other
  misc_feature (165)..(165): Xaa is any aa, unknown or other
  misc_feature (177)..(177): Xaa is any aa, unknown or other
  misc_feature (181)..(181): Xaa is any aa, unknown or other
  misc_feature (206)..(206): Xaa is any aa, unknown or other
  misc_feature (259)..(259): Xaa is any aa, unknown or other
QPPRAASSSLCRASCCRFESDGRALRPRRGLAAARSRHGGVRLLGRRRHGPRQGGSAAAKDHRHLLHPGGGRGRRGGAGAGAQAPRAAPGRGPVPRRQGLRGRRHPRHGAGAHPARGLRRAGLAVPRGGRRAVGQVPVRRDGRHPRRGRHARGGHGRHXVPAPEXRGGRRRATAARXGRPXGGLRRRAPRPRARCRRRRRPRTPPXRLSGAGAGRGGALADHRHVPWAPRDFPSTVRPLVPALTFHQLFEGIGLGGCIXQAKFRLRSMVAMAVFFSLTTPIGVAIGIGISSAYDETSQTALVVQGLFEAAAAGILVYMALVDILREDFMSARVQGSAPLQAALSASLLLGAGLMSMLAIWA

SEQ ID NO: 20095 - protein, 243 aa, Zea mays subsp. mays
  peptide (1)..(243): Ceres Seq. ID no. 12418107
  misc_feature (159)..(159): Xaa is any aa, unknown or other
  misc_feature (166)..(166): Xaa is any aa, unknown or other
  misc_feature (177)..(177): Xaa is any aa, unknown or other
  misc_feature (182)..(182): Xaa is any aa, unknown or other
  misc_feature (206)..(206): Xaa is any aa, unknown or other
DSLRAPRRRHCAELAAAGLKAMAALYALVAVSLLPVLVTAECDCSDDDATGRDKAGALRLKIIAIFCILAGGAAGAAVPALGRRLPALRPGAGPFLAVRAFAGGVILATGLVHILPAAFDALGSPCLAAAGGPWARFPFAGTVAILAAVATLVVDTVAXGYLRRKXAAVGDEPPQLXGDDPXEASGGGRHGHAHGVDDDDDLVRHXVVSQVLELGVVVHSLIIGMSPGRLGISPARCARSSRR

SEQ ID NO: 20096 - protein, 222 aa, Zea mays subsp. mays
  peptide (1)..(222): Ceres Seq. ID no. 12418108
  misc_feature (138)..(138): Xaa is any aa, unknown or other
  misc_feature (145)..(145): Xaa is any aa, unknown or other
  misc_feature (156)..(156): Xaa is any aa, unknown or other
  misc_feature (161)..(161): Xaa is any aa, unknown or other
  misc_feature (185)..(185): Xaa is any aa, unknown or other
MAALYALVAVSLLPVLVTAECDCSDDDATGRDKAGALRLKIIAIFCILAGGAAGAAVPALGRRLPALRPGAGPFLAVRAFAGGVILATGLVHILPAAFDALGSPCLAAAGGPWARFPFAGTVAILAAVATLVVDTVAXGYLRRKXAAVGDEPPQLXGDDPXEASGGGRHGHAHGVDDDDDLVRHXVVSQVLELGVVVHSLIIGMSPGRLGISPARCARSSRR

SEQ ID NO: 20097 - DNA, 1404 bp, Zea mays subsp. mays
  misc_feature (1)..(1404): Ceres Seq. ID no. 12418555
  misc_feature (1)..(1404): Ortholog of  Ceres SEQ ID NO 14316165 as cited in SEQ ID NO 52560
  misc_feature (1)..(1404): Ortholog of  Ceres SEQ ID NO 13597076 as cited in SEQ ID NO 63571
gcacgagaccattacctagaacatcctaatcgaaaaacgcttttgcagctcgctcacccaagtcccaagcgcaggaggccgcggtagcgtcgacttcctgaacgatctggcggcggccgcggctcccaagttcacgaagcgggaggcgcaagcgaagcggctacctctcgccggagatgccgctggggacctctccagcggtggcggaggccgaggcatggacgtgggagaacgcagcggctggagctgccgccgggttcgccacggttgcggccctccacccgctcgacgtcgtccgcacccgcttccaagtgagcggcgggagggggtggtctgaggtgcctccgtacaggaacaccgcgcacgctgtgtacaccatcacacgatctgagggcctgagaggactttatgcaggattttatcccgcagttcttggatcaactgtttcctggggcctatatttctttttctataacagagctaaacaaaggtacttacagaggaagaatgaccagcttcatccagtccatcatctcatctcagctgcagaagcaggtgctttggtttccttgtttacaaatcccatatggctggtgaaaacaagactgcaactacaaacagctaaacaccatacttctcagtattctggtttttctgatctttgaaaactattctaagagaggagggatttcttgcactttataggggaattggacctgggcttttgctggtcacccatggtgcaatacagttcacggcctatgaggaacttcgcaaagctatgatattctttaaaagtgcacaatcaagggcagacgacacaggaggcggggagtcattgctgaattccgtcgattttgcggcacttggggctggttcaaaagtagctgctattctacttacttatccttaccaggtcatcagagcccgcttgcagcaacggcctggcactgatggtactccaaagtactcaaatagctggcatgtagtgaaggaaactgcaaagtatgaaggcgtccgtggattttacaggggcatcacgtccaatctactgaaaaaccttccagctgcgtccctcacgttcgtggtgtatgaaaatgttatcaaactattcaaagcaaccaaggagaagacgtagctactcattaaatccaggagtactgtgcatggtctgacatttctgagttcaaacgatgcctataatttccattccacgtcaagcccatattttatccatttaacatcgtatatgacaaatatgtaacagtacaggttgtgaccaacctgggtcgtggaaattttttgtacttgcattttgtagagagaaaatacacattttgtttcttcccaaagaaatatgtctttgttatataatccagccgggacgctggcgttgtagatctt

SEQ ID NO: 20098 - protein, 162 aa, Zea mays subsp. mays
  peptide (1)..(162): Ceres Seq. ID no. 12418556
MPLGTSPAVAEAEAWTWENAAAGAAAGFATVAALHPLDVVRTRFQVSGGRGWSEVPPYRNTAHAVYTITRSEGLRGLYAGFYPAVLGSTVSWGLYFFFYNRAKQRYLQRKNDQLHPVHHLISAAEAGALVSLFTNPIWLVKTRLQLQTAKHHTSQYSGFSDL

SEQ ID NO: 20099 - protein, 118 aa, Zea mays subsp. mays
  peptide (1)..(118): Ceres Seq. ID no. 12418557
MIFFKSAQSRADDTGGGESLLNSVDFAALGAGSKVAAILLTYPYQVIRARLQQRPGTDGTPKYSNSWHVVKETAKYEGVRGFYRGITSNLLKNLPAASLTFVVYENVIKLFKATKEKT

SEQ ID NO: 20100 - DNA, 453 bp, Zea mays subsp. mays
  misc_feature (1)..(453): Ceres Seq. ID no. 2733380
  misc_feature (1)..(453): Ortholog of  Ceres SEQ ID NO 14310390 as cited in SEQ ID NO 59715
atcgaacgatttgggggaggaggtgttctattacacaaaagaggcaaaaaacaaaagccgatcgcggcactcgccgccgttgaggaggaggtttccggcgctgcttccagcgccttgccgtcagcaccatgaggaagaagctggacacgcgtttccccgctcctcggattaaaaagatcatgcaaacagatgaagacgtcggcaagattgctcaagctgtacctgttctagtgtccaaagcattggagctatttctgcaagatttatgtgataggacatatgatattacaattcggaagggggtcaagactgtgggttcttcccatttgaaacaatgcatacaaacgtacaacgtctatgacttcttgagggaagtagtcagcaaagttccagacattggtccttctgatgttattgctgatgataagcttggcaaaaggaggaaagccgaag

SEQ ID NO: 20101 - protein, 108 aa, Zea mays subsp. mays
  peptide (1)..(108): Ceres Seq. ID no. 2733381
MRKKLDTRFPAPRIKKIMQTDEDVGKIAQAVPVLVSKALELFLQDLCDRTYDITIRKGVKTVGSSHLKQCIQTYNVYDFLREVVSKVPDIGPSDVIADDKLGKRRKAE

SEQ ID NO: 20102 - protein, 91 aa, Zea mays subsp. mays
  peptide (1)..(91): Ceres Seq. ID no. 2733382
MQTDEDVGKIAQAVPVLVSKALELFLQDLCDRTYDITIRKGVKTVGSSHLKQCIQTYNVYDFLREVVSKVPDIGPSDVIADDKLGKRRKAE

SEQ ID NO: 20103 - protein, 56 aa, Zea mays subsp. mays
  peptide (1)..(56): Ceres Seq. ID no. 2733383
SNDLGEEVFYYTKEAKNKSRSRHSPPLRRRFPALLPAPCRQHHEEEAGHAFPRSSD

SEQ ID NO: 20104 - DNA, 481 bp, Zea mays subsp. mays
  misc_feature (1)..(481): Ceres Seq. ID no. 2733452
  misc_feature (1)..(481): Ortholog of  Ceres SEQ ID NO 14312844 as cited in SEQ ID NO 55601
  misc_feature (1)..(481): Ortholog of  Ceres SEQ ID NO 14312866 as cited in SEQ ID NO 55630
  misc_feature (1)..(481): Ortholog of  Ceres SEQ ID NO 13597376 as cited in SEQ ID NO 64002
  misc_feature (1)..(481): Ortholog of  Ceres SEQ ID NO 13503573 as cited in SEQ ID NO 65402
ataaataagtaaatacaccatggaatgcgtcgtcgtgccggcctcgcctcgttatgctctgccgcctcctctgcctctgcctctgcccagatccacaggttgaccttcgcgacaggcacgcgttggtggacatcttctcgtcgcacaggttcgaggctgtcattcactttgctgggctcaaggctgttggggagagcgtgcacaagcccctgctttactacgacaacaacctggtcggcaccatcaccctcctggaggtgatggctgcgaatggctgcaagaagctggtgttctcgtcatctgcaactgtctatgggtggcccaaggaagtaccatgcaccgaagaattcccgctctgcgccaccaatccctatgggcggacaaagcttgtgattgaagacatctgccgcgacgtccaccgctccgacccggactggaagatcatactgctcaggtacttcaaccccgttggcgctcatcc

SEQ ID NO: 20105 - protein, 142 aa, Zea mays subsp. mays
  peptide (1)..(142): Ceres Seq. ID no. 2733453
MLCRLLCLCLCPDPQVDLRDRHALVDIFSSHRFEAVIHFAGLKAVGESVHKPLLYYDNNLVGTITLLEVMAANGCKKLVFSSSATVYGWPKEVPCTEEFPLCATNPYGRTKLVIEDICRDVHRSDPDWKIILLRYFNPVGAH

SEQ ID NO: 20106 - protein, 78 aa, Zea mays subsp. mays
  peptide (1)..(78): Ceres Seq. ID no. 2733454
MRRRAGLASLCSAASSASASAQIHRLTFATGTRWWTSSRRTGSRLSFTLLGSRLLGRACTSPCFTTTTTWSAPSPSWR

SEQ ID NO: 20107 - protein, 73 aa, Zea mays subsp. mays
  peptide (1)..(73): Ceres Seq. ID no. 2733455
MAANGCKKLVFSSSATVYGWPKEVPCTEEFPLCATNPYGRTKLVIEDICRDVHRSDPDWKIILLRYFNPVGAH

SEQ ID NO: 20108 - DNA, 1578 bp, Zea mays subsp. mays
  misc_feature (1)..(1578): Ceres Seq. ID no. 12382623
  misc_feature (1)..(1578): Ortholog of  Ceres SEQ ID NO 14315590 as cited in SEQ ID NO 52915
caaaaatggtgccatgcatggatctgctgtccggagttgttacagcatccttgatatagtacacaggctatggactccaattgatggggagtttgatgactacattatcaatccttagggtagcggttaccaatcactacacacagcagttcaggcatctgatagctcaccgctggaggtccagattagaacccagcgaatgcatgagtatgcagaacatggccttgctgctcattggctgtataaggagagcaaagttgagtacagaagtagcatgagtaagagaataagacaaagtacatcatattcatctagttcttcagaagatgaaagttctatacaggatgatatcccatcaaagtacagttcaatgaaagtggggcatccagtgctaagaattgaaggtagtcacttactagcagctgtcgtagtcagtatagataaaggaggaaaggaattgattgttgctgtaagttttagtcttgaagcttctgaagctgtagctgagctaaggtcatcttttcagttgaagcgttgggaagcctatgctaggcttcataaaaaggtttctgagaagtggtggtgtgcacctggacatggtgactggtcaacaaatctggagaggtacacactatgccaggatgggatatttcataagcaagaccaatttgggagacttttacctacatttattcaaataattgatttggcggaagaggaagaggaagagtattggatggttgtatctgccatattcgagggaaaggaaacttgcagtctaccatctgaatcgagttatgctgataaatcatcatctgaacctccaagttctactccattaagcgaccccatcaacaataaggtgcatttgctcagaaccatgcttcaatgggaggagcaagttcgccgtggcgcatctttggcagagaaaagtctcagtgcaagcacctgcacaaaggcaatcctgcgtgaggtggccataatattctggcctaatggcaagattatgagaatgagcactggtagcacagctgctgacgctgctagaagaatgggcgtcgaagggaagctgctctgggttaatggccaactagtgctgccccaaacagagctaaaggatggggatatagttgaagtgagggtatagatgcaagtaccagattccagtacaccttcctcagggttattgatcatattggttcctcagttcttgccctatcttggcaatgcatcgaacctcaattgtacagtccattggtcgaaatgaatcgaagaaagaaggattaggtcctgtgtacataagaaactgcaagtataaaagctgtctgtccagctgtgcttctccttgcccatagttacagtggtaatgtaaatttccgtaagtaaagatgtagtaatgtttagttagtggtccacatttcagcgtgaagttatgaagtgcagtagcgctgcaagttttttttatatatatgtccaaagtagatgtctcatgctgcctaaaaaaatgtccatgtcccgtaatttggcaagccaagattgccagaaaactcatggaggatatggcaaccattttcaact

SEQ ID NO: 20109 - protein, 315 aa, Zea mays subsp. mays
  peptide (1)..(315): Ceres Seq. ID no. 12382624
MHEYAEHGLAAHWLYKESKVEYRSSMSKRIRQSTSYSSSSSEDESSIQDDIPSKYSSMKVGHPVLRIEGSHLLAAVVVSIDKGGKELIVAVSFSLEASEAVAELRSSFQLKRWEAYARLHKKVSEKWWCAPGHGDWSTNLERYTLCQDGIFHKQDQFGRLLPTFIQIIDLAEEEEEEYWMVVSAIFEGKETCSLPSESSYADKSSSEPPSSTPLSDPINNKVHLLRTMLQWEEQVRRGASLAEKSLSASTCTKAILREVAIIFWPNGKIMRMSTGSTAADAARRMGVEGKLLWVNGQLVLPQTELKDGDIVEVRV

SEQ ID NO: 20110 - protein, 290 aa, Zea mays subsp. mays
  peptide (1)..(290): Ceres Seq. ID no. 12382625
MSKRIRQSTSYSSSSSEDESSIQDDIPSKYSSMKVGHPVLRIEGSHLLAAVVVSIDKGGKELIVAVSFSLEASEAVAELRSSFQLKRWEAYARLHKKVSEKWWCAPGHGDWSTNLERYTLCQDGIFHKQDQFGRLLPTFIQIIDLAEEEEEEYWMVVSAIFEGKETCSLPSESSYADKSSSEPPSSTPLSDPINNKVHLLRTMLQWEEQVRRGASLAEKSLSASTCTKAILREVAIIFWPNGKIMRMSTGSTAADAARRMGVEGKLLWVNGQLVLPQTELKDGDIVEVRV

SEQ ID NO: 20111 - protein, 258 aa, Zea mays subsp. mays
  peptide (1)..(258): Ceres Seq. ID no. 12382626
MKVGHPVLRIEGSHLLAAVVVSIDKGGKELIVAVSFSLEASEAVAELRSSFQLKRWEAYARLHKKVSEKWWCAPGHGDWSTNLERYTLCQDGIFHKQDQFGRLLPTFIQIIDLAEEEEEEYWMVVSAIFEGKETCSLPSESSYADKSSSEPPSSTPLSDPINNKVHLLRTMLQWEEQVRRGASLAEKSLSASTCTKAILREVAIIFWPNGKIMRMSTGSTAADAARRMGVEGKLLWVNGQLVLPQTELKDGDIVEVRV

SEQ ID NO: 20112 - DNA, 439 bp, Zea mays subsp. mays
  misc_feature (1)..(439): Ceres Seq. ID no. 4377636
  misc_feature (1)..(439): Ortholog of  Ceres SEQ ID NO 15172878 as cited in SEQ ID NO 51924
  misc_feature (1)..(439): Ortholog of  Ceres SEQ ID NO 13662000 as cited in SEQ ID NO 61553
gagtacgagcggctactcccggcggcggcggcgatgagcgcggtgaacatcaccaacgtggcggtgctggataaccccaccgccttcctcaatcccttccagtttgagatctcctacgagtgcctcgtgcccctcgacgacgatctggagtggaagcttatatatgttggatcagctgaagatgaaaactacgatcaacagcttgagagcgtgcttgttggccctgtcaatgttgggacctaccgttttgtccttcaggctgacccaccggatccctcaaagatccgtgaggaagacataattggtgtgactgtgctgctattgacatgctcttacatgggccaggagttcatgagagtaggcyactacgtgaacaacgattattatgatgaacaattgaragaagaacctccascaaargtgctaattgaccgggtgc

SEQ ID NO: 20113 - protein, 146 aa, Zea mays subsp. mays
  peptide (1)..(146): Ceres Seq. ID no. 4377637
  misc_feature (122)..(122): Xaa is any aa, unknown or other
  misc_feature (134)..(134): Xaa is any aa, unknown or other
  misc_feature (139)..(139): Xaa is any aa, unknown or other
  misc_feature (140)..(140): Xaa is any aa, unknown or other
EYERLLPAAAAMSAVNITNVAVLDNPTAFLNPFQFEISYECLVPLDDDLEWKLIYVGSAEDENYDQQLESVLVGPVNVGTYRFVLQADPPDPSKIREEDIIGVTVLLLTCSYMGQEFMRVGXYVNNDYYDEQLXEEPPXXVLIDRV

SEQ ID NO: 20114 - protein, 135 aa, Zea mays subsp. mays
  peptide (1)..(135): Ceres Seq. ID no. 4377638
  misc_feature (111)..(111): Xaa is any aa, unknown or other
  misc_feature (123)..(123): Xaa is any aa, unknown or other
  misc_feature (128)..(128): Xaa is any aa, unknown or other
  misc_feature (129)..(129): Xaa is any aa, unknown or other
MSAVNITNVAVLDNPTAFLNPFQFEISYECLVPLDDDLEWKLIYVGSAEDENYDQQLESVLVGPVNVGTYRFVLQADPPDPSKIREEDIIGVTVLLLTCSYMGQEFMRVGXYVNNDYYDEQLXEEPPXXVLIDRV

SEQ ID NO: 20115 - DNA, 2974 bp, Zea mays subsp. mays; identical to SEQ ID NO: 13737
  misc_feature (1)..(2974): Ceres Seq. ID no. 13569654
  misc_feature (1)..(2974): Ortholog of  Ceres SEQ ID NO 13596198 as cited in SEQ ID NO 68488

SEQ ID NO: 20116 - protein, 542 aa, Zea mays subsp. mays; identical to SEQ ID NO: 13738
  peptide (1)..(542): Ceres Seq. ID no. 13569655

SEQ ID NO: 20117 - protein, 502 aa, Zea mays subsp. mays; identical to SEQ ID NO: 13739
  peptide (1)..(502): Ceres Seq. ID no. 13569656

SEQ ID NO: 20118 - protein, 460 aa, Zea mays subsp. mays; identical to SEQ ID NO: 13740
  peptide (1)..(460): Ceres Seq. ID no. 13569657

SEQ ID NO: 20119 - DNA, 2039 bp, Zea mays subsp. mays
  misc_feature (1)..(2039): Ceres Seq. ID no. 13503133
  misc_feature (1)..(2039): Ortholog of  Ceres SEQ ID NO 13596921 as cited in SEQ ID NO 62368
gcccacgcagcaatctggtcttctggaaatctccatcaatccgattccgaacggcagaaaattttcccttcccccggccaccaaccaaccaaacccgagcaaccagcctgagccacctcccatgcgccgcgccgcagcctgaggaggaggaggaggacgcggtggtctggagagggatggagggcgcgtcctcgctgccgcccttcctgagcaagacgtacgagatggtggacgacccggccacggacgccgtggtggcgtggacgccgctggggaccagcttcgtcgtcgcgaaccaggccgagttctggagggatctgctccccaagtacttcaagcacaacaacttctccagcttcgtgcggcaactgaacacctacgtaagcccccaccgcacagcacgatcattcattttcttcgccccatctccctctctgtccacctgtggttttgatcaatcggggtgcgtggcggcgtgctactgtcagctatgctgttgcccctttgcaaaaaaactccacaagttggcatttggggggcgaatcttgttagccttgtagtagaacaattgtttagggtatcgtcttcggtcgaatgaactgtttccttgttatagcatagcgtgttgacaacttggtggcgataactttaaattacatgtgtccactatatatctagtatatatgctcaattatcttgttgagatgtttttccttttctaaatccaactagagttagtgtaccttttgacaaatgaagtgctgctaacggtaaacactgttgaattggcatctttgttgacacccaaattaaatccaatagaaaccataatgatttcggatggttacttttgatttatgagccttgatgggtcaaatttctgtgatgttgtgttaatcgttttcctgcttcttcttatgtagggctttaagaaaattgatcctgaacaatgggagtttgcaaatgatgatttcattaggggacaacagcaccgactgaaaaatatacacaggcgtaagcctatattcagccattcatcgcatactcagggttctggaccattaccagataccgaaaggagggattatgaggaggaaatcgaaaggcttaagtgtgacaatgcagctctgacctcagagcttgaaaagaatgcacagaagaaacttgttacagagaaacgaatgcaggatctagaagataagttgatctttttggaggatcggcagaagaatctgatggcgtatgtcagggatattgtacaggcaccaggatctttctctagctttgtgcagcaacctgatcatcacggaaagaaaaggagactaccagtacctatctctctctaccaagattctaatgctaaggggaaccaggttgtgcatgggagcttcatcaccaacccaccagcttgcagggaatcatttgacaagacggaatcttcattgaactcgttggagaatttccttcgggaagcgagtgaagcgttcaatatttcatatgatgatggcctccctggcccttcatctgctgtcgttatcacagagctccattcgtccggagaaagtgatccccatgtgccatcacctgtctcaagaatgcatacatcttcggctggtgcgggagattcgctctcttcccgcgatttaacagagtcaactagctgcgctgagagccctcgcctccctcagatccaaccctgtacagattcacgaactaaggtgtctgagatcgatgtcaatcgggagcctgctgtcacagaaactggtccgacaagggaccaacctgccgaggagcctccccacgtagcagctggggtgaacgatggcttctggcagcagttcctcaccgagcagcccggtcctgatgtacaccaggaggcccaatcagaaaggagagatggcgatgatgataagggcgatcagacgaggataggggaccgagaaaatttttggtgggggaagaagaatgttgagcagatgagagagaagctggggcgtctcacctcggtggagaaaacctgactgtatttcttgtagctg

SEQ ID NO: 20120 - protein, 279 aa, Zea mays subsp. mays
  peptide (1)..(279): Ceres Seq. ID no. 13503134
MQDLEDKLIFLEDRQKNLMAYVRDIVQAPGSFSSFVQQPDHHGKKRRLPVPISLYQDSNAKGNQVVHGSFITNPPACRESFDKTESSLNSLENFLREASEAFNISYDDGLPGPSSAVVITELHSSGESDPHVPSPVSRMHTSSAGAGDSLSSRDLTESTSCAESPRLPQIQPCTDSRTKVSEIDVNREPAVTETGPTRDQPAEEPPHVAAGVNDGFWQQFLTEQPGPDVHQEAQSERRDGDDDKGDQTRIGDRENFWWGKKNVEQMREKLGRLTSVEKT

SEQ ID NO: 20121 - protein, 261 aa, Zea mays subsp. mays
  peptide (1)..(261): Ceres Seq. ID no. 13503135
MAYVRDIVQAPGSFSSFVQQPDHHGKKRRLPVPISLYQDSNAKGNQVVHGSFITNPPACRESFDKTESSLNSLENFLREASEAFNISYDDGLPGPSSAVVITELHSSGESDPHVPSPVSRMHTSSAGAGDSLSSRDLTESTSCAESPRLPQIQPCTDSRTKVSEIDVNREPAVTETGPTRDQPAEEPPHVAAGVNDGFWQQFLTEQPGPDVHQEAQSERRDGDDDKGDQTRIGDRENFWWGKKNVEQMREKLGRLTSVEKT

SEQ ID NO: 20122 - protein, 185 aa, Zea mays subsp. mays
  peptide (1)..(185): Ceres Seq. ID no. 13503136
PRSNLVFWKSPSIRFRTAENFPFPRPPTNQTRATSLSHLPCAAPQPEEEEEDAVVWRGMEGASSLPPFLSKTYEMVDDPATDAVVAWTPLGTSFVVANQAEFWRDLLPKYFKHNNFSSFVRQLNTYVSPHRTARSFIFFAPSPSLSTCGFDQSGCVAACYCQLCCCPFAKKLHKLAFGGRILLAL

SEQ ID NO: 20123 - DNA, 1757 bp, Zea mays subsp. mays
  misc_feature (1)..(1757): Ceres Seq. ID no. 12435555
  misc_feature (1)..(1757): Ortholog of  Ceres SEQ ID NO 14307843 as cited in SEQ ID NO 20508
  misc_feature (1)..(1757): Ortholog of  Ceres SEQ ID NO 15170811 as cited in SEQ ID NO 52649
  misc_feature (1)..(1757): Ortholog of  Ceres SEQ ID NO 13638331 as cited in SEQ ID NO 58047
gtccgccgcctcctctctccgcacaggctcaccaaacgacgaacactctccctcgacccgtgaccgtgagcaagcgggtggcgacggcgcgcggccggccatggtgagcgagagcaaccgcggcggtgcggaccggacgacggcggcgggggaggagcgcgggcagctgctgttcgacgtgccggagatcaggttcaccaagctcttcatcaacggatccttcgtcgacgccgtctcagagccggacgttcgagacgagggacccgcgcacggggggcgtcatcgccagcgtggcagaagctgacaaagaagacgtggacttggcagtgagggcagccagggccgctttcgaccacggcgagtggccacgcatgtctggatccgaacgggggcggatcatggcgaggctggccgacctggtggaggagcgcgcggacgagctggcggccctggagagcctggacgccggcaagcacccggccgtgacccgggcggtggacgtcggcaacgccgccggcagcctgcgctacttcgccggcgcggccgacaagatccacggcgagacgctcaagatgccgggccagttccagggccacaccctgcgcgagccgctcggcgtcgccggcgtcatcatcccctggaacttcccgtccaccatgttcgccgtcaaggtggcgccggcgctggccgcacggctgcgccctggtcgtcaagcccgccgagcagacgccgctcagcgccctgtacctcgcgcagctcgccaagcaggcaggggtcccagacggcgtgatcaacgtcgtgccaggcttcggncngacggcaggagccgcgctggcntctcacatggacgttgacatggtgagtttcaccggatccacggaggtcgggcgccttataatgaaggcctccncggagagcaacnngnagcccgtntacctggagctgggcggcaagtccccgctcatcgtnttnnacgacgccgacctcgacatgnccgtggagctnnccgtcggcgccagcttctttaacaagggagaggcctgcgtcgccgcgagccgcgtctacgtgcaggaacgcgtctacgacaggttcgaggagaggttgccggagaggatgaggagctgggtcgtgggcgacccgttcagcgaccctagcgccgaccagggcccgcaggtggacaaggctcagtatgagagggttctgagctacattgaccatggcnagcgagaaggggccactcttctgactggaggaaggccatgcggtccggaagggaaaggctactacattgagcccacagttttcaccaacgtcaaggaggacatgatcatagcgaaggaggagatcttcggacccgtcatgtgcctgatgaagttcaagacggtggaggaggcgatcgcgagggcgaacgacacgcggtacgggctgggggcgggggtggtgacgcgggacctggacgtggcgaaccgggtggtgaggtcggtgcgcgccggggtggtgtgggtgaactgctacttcgccatgggcagcgactgccccttcggcggccgcaanatgagcggcttcggcaaggacgagggcatgcacgcgctcgacaagtacctggccgtcaagtccgtcgtcaccccgctccgcgcctcgccctggatctgattctctttaatttctggtgtcagtcacccacccncaacacatatacagcagtggtcaaaagatatttatttattgataataaagtagctagctatattgtgcgg

SEQ ID NO: 20124 - protein, 269 aa, Zea mays subsp. mays
  peptide (1)..(269): Ceres Seq. ID no. 12435556
  misc_feature (23)..(23): Xaa is any aa, unknown or other
  misc_feature (27)..(27): Xaa is any aa, unknown or other
  misc_feature (28)..(28): Xaa is any aa, unknown or other
  misc_feature (30)..(30): Xaa is any aa, unknown or other
  misc_feature (42)..(42): Xaa is any aa, unknown or other
  misc_feature (43)..(43): Xaa is any aa, unknown or other
  misc_feature (44)..(44): Xaa is any aa, unknown or other
  misc_feature (51)..(51): Xaa is any aa, unknown or other
  misc_feature (54)..(54): Xaa is any aa, unknown or other
  misc_feature (55)..(55): Xaa is any aa, unknown or other
  misc_feature (127)..(127): Xaa is any aa, unknown or other
  misc_feature (237)..(237): Xaa is any aa, unknown or other
MDVDMVSFTGSTEVGRLIMKASXESNXXPXYLELGGKSPLIXXXDADLDMXVEXXVGASFFNKGEACVAASRVYVQERVYDRFEERLPERMRSWVVGDPFSDPSADQGPQVDKAQYERVLSYIDHGXREGATLLTGGRPCGPEGKGYYIEPTVFTNVKEDMIIAKEEIFGPVMCLMKFKTVEEAIARANDTRYGLGAGVVTRDLDVANRVVRSVRAGVVWVNCYFAMGSDCPFGGRXMSGFGKDEGMHALDKYLAVKSVVTPLRASPWI

SEQ ID NO: 20125 - protein, 265 aa, Zea mays subsp. mays
  peptide (1)..(265): Ceres Seq. ID no. 12435557
  misc_feature (19)..(19): Xaa is any aa, unknown or other
  misc_feature (23)..(23): Xaa is any aa, unknown or other
  misc_feature (24)..(24): Xaa is any aa, unknown or other
  misc_feature (26)..(26): Xaa is any aa, unknown or other
  misc_feature (38)..(38): Xaa is any aa, unknown or other
  misc_feature (39)..(39): Xaa is any aa, unknown or other
  misc_feature (40)..(40): Xaa is any aa, unknown or other
  misc_feature (47)..(47): Xaa is any aa, unknown or other
  misc_feature (50)..(50): Xaa is any aa, unknown or other
  misc_feature (51)..(51): Xaa is any aa, unknown or other
  misc_feature (123)..(123): Xaa is any aa, unknown or other
  misc_feature (233)..(233): Xaa is any aa, unknown or other
MVSFTGSTEVGRLIMKASXESNXXPXYLELGGKSPLIXXXDADLDMXVEXXVGASFFNKGEACVAASRVYVQERVYDRFEERLPERMRSWVVGDPFSDPSADQGPQVDKAQYERVLSYIDHGXREGATLLTGGRPCGPEGKGYYIEPTVFTNVKEDMIIAKEEIFGPVMCLMKFKTVEEAIARANDTRYGLGAGVVTRDLDVANRVVRSVRAGVVWVNCYFAMGSDCPFGGRXMSGFGKDEGMHALDKYLAVKSVVTPLRASPWI

SEQ ID NO: 20126 - protein, 251 aa, Zea mays subsp. mays
  peptide (1)..(251): Ceres Seq. ID no. 12435558
  misc_feature (5)..(5): Xaa is any aa, unknown or other
  misc_feature (9)..(9): Xaa is any aa, unknown or other
  misc_feature (10)..(10): Xaa is any aa, unknown or other
  misc_feature (12)..(12): Xaa is any aa, unknown or other
  misc_feature (24)..(24): Xaa is any aa, unknown or other
  misc_feature (25)..(25): Xaa is any aa, unknown or other
  misc_feature (26)..(26): Xaa is any aa, unknown or other
  misc_feature (33)..(33): Xaa is any aa, unknown or other
  misc_feature (36)..(36): Xaa is any aa, unknown or other
  misc_feature (37)..(37): Xaa is any aa, unknown or other
  misc_feature (109)..(109): Xaa is any aa, unknown or other
  misc_feature (219)..(219): Xaa is any aa, unknown or other
MKASXESNXXPXYLELGGKSPLIXXXDADLDMXVEXXVGASFFNKGEACVAASRVYVQERVYDRFEERLPERMRSWVVGDPFSDPSADQGPQVDKAQYERVLSYIDHGXREGATLLTGGRPCGPEGKGYYIEPTVFTNVKEDMIIAKEEIFGPVMCLMKFKTVEEAIARANDTRYGLGAGVVTRDLDVANRVVRSVRAGVVWVNCYFAMGSDCPFGGRXMSGFGKDEGMHALDKYLAVKSVVTPLRASPWI

SEQ ID NO: 20127 - DNA, 1787 bp, Zea mays subsp. mays; identical to SEQ ID NO: 17627
  misc_feature (1)..(1787): Ceres Seq. ID no. 13498188
  misc_feature (1)..(1787): Ortholog of  Ceres SEQ ID NO 15176016 as cited in SEQ ID NO 56593
  misc_feature (1)..(1787): Ortholog of  Ceres SEQ ID NO 13660260 as cited in SEQ ID NO 67494

SEQ ID NO: 20128 - protein, 437 aa, Zea mays subsp. mays; identical to SEQ ID NO: 17628
  peptide (1)..(437): Ceres Seq. ID no. 13498189

SEQ ID NO: 20129 - protein, 388 aa, Zea mays subsp. mays; identical to SEQ ID NO: 17629
  peptide (1)..(388): Ceres Seq. ID no. 13498190

SEQ ID NO: 20130 - protein, 386 aa, Zea mays subsp. mays; identical to SEQ ID NO: 17630
  peptide (1)..(386): Ceres Seq. ID no. 13498191

SEQ ID NO: 20131 - DNA, 613 bp, Zea mays subsp. mays
  misc_feature (1)..(613): Ceres Seq. ID no. 12637951
  misc_feature (1)..(613): Ortholog of  Ceres SEQ ID NO 15179416 as cited in SEQ ID NO 0
atccattccccacagtcattggagtcttctcttcggcctcccgctaaccgccatccgatccaccagaccaccacaccgagccccgagcccactaactcccaatccatcgcatcgccatccctgctgccatggctgtgcctccgcggtgggcgaacctcaacatcgacctggtgacggagatcatgaaccgcgtcccgtgcgcaatcgaccgcacgcggatggccgccgtctgtcaggcgtggctcgcggcggtcgcgcgggcagagcgtctgacatttcagctcccgtcgctccttttcccgcccgcggacgcgaatgacgtctactgctacctcagcggttgccgcgaacacaacatgttggccgggccccgctacttcggatcgtacgacgacggctggttcttcgtcgcctacggccacacttgcgggcatcggctgctcaacatccgcaccggagattcccacgcgctacccgacatcctcgtggatcacgtcgctcacgaaatacacagcatggtcatcctcgccgccgccatctcgtgcccgcctgagttcgcgccatgcgccgcgggcatcgtcagctaccagccggagctcgacgcgccgcgccg

SEQ ID NO: 20132 - protein, 161 aa, Zea mays subsp. mays
  peptide (1)..(161): Ceres Seq. ID no. 13624451
MAVPPRWANLNIDLVTEIMNRVPCAIDRTRMAAVCQAWLAAVARAERLTFQLPSLLFPPADANDVYCYLSGCREHNMLAGPRYFGSYDDGWFFVAYGHTCGHRLLNIRTGDSHALPDILVDHVAHEIHSMVILAAAISCPPEFAPCAAGIVSYQPELDAPR

SEQ ID NO: 20133 - protein, 143 aa, Zea mays subsp. mays
  peptide (1)..(143): Ceres Seq. ID no. 13624452
MNRVPCAIDRTRMAAVCQAWLAAVARAERLTFQLPSLLFPPADANDVYCYLSGCREHNMLAGPRYFGSYDDGWFFVAYGHTCGHRLLNIRTGDSHALPDILVDHVAHEIHSMVILAAAISCPPEFAPCAAGIVSYQPELDAPR

SEQ ID NO: 20134 - protein, 131 aa, Zea mays subsp. mays
  peptide (1)..(131): Ceres Seq. ID no. 13624453
MAAVCQAWLAAVARAERLTFQLPSLLFPPADANDVYCYLSGCREHNMLAGPRYFGSYDDGWFFVAYGHTCGHRLLNIRTGDSHALPDILVDHVAHEIHSMVILAAAISCPPEFAPCAAGIVSYQPELDAPR

SEQ ID NO: 20135 - DNA, 1499 bp, Zea mays subsp. mays
  misc_feature (1)..(1499): Ceres Seq. ID no. 13622663
  misc_feature (1)..(1499): Ortholog of  Ceres SEQ ID NO 12611293 as cited in SEQ ID NO 56191
gcgatctcagctcccaaccaaccttcatcaatccagtaccatcggaagcgtacatgcatacataccatacgtccataccatacggccggaccacgcccagcaaccaatcaataatactcctagtccgccaccagtcgctccgcctcggcgccatcgcacggaaagcttgctgttgctggcgacctcgcggcggggcgccggagcagccatgcctataaaatccgggcgagagcacccacccattcgtaccctatcagccgcctcccctgcctccggtcctctcccgcctctctctctctcttgcacacacacgacgtcgtacgcggcagctagcagcacgcacgatcgatcgccacagcgtacgtactagcacagaggacgacgaccgacgccatggcggcctccttccgcgcggcggcgtggcagcggcggcggcgacggcgctggtgatggtggcggcggtgctggcggtgtcgtgggccggcgtggcccgcgcggacttcgcccaggaccgcgccatgtgcgcggaccggctgatggggctggcgacgtgcctgacgttcgtgcaggacaaggcgacggcgcgcgcgccgacgcccgactgctgcgcggggctcaagcaggtggtggccgccagcaagctgtgcatgtgcgtgctggtcaaggaccgcgacgagccggcgctggggttcaagatcaacgtcacccgcgccatggacctgccctcgctctgcagcaaccccgccaccttctccgactgccccaagatcctgggcatgtcgcccgacgcccccgaggcggagatcttcaaggagtacgcgaagaagcacgagagcaacaacggcaccaccattcctgccgctgcaaccggcgccgccgcggcgaccgggaagagcacgagcgcggcgccgacggcggacggcgccgggaggcagcccggcacggtcttcttctacgtcgtgtcggcgctgctcgtctccgtcgcggtcctgctgtgctgatggcttaacggccggccgcggcagcgcatgcattcatggccggccggccggcagggagatggaggtgctactgcacgctgcacgactggaaggaagcccggagacacaattcaagtctttgagatgagcaaactaaaggacacgagtactcttttttttttctctttcctgtagcctttttgtgtgtgtgtggcgtgttgtggggagtttgtgagacgtcggcttgtgctagtgctgacggtgcaccagcgacgcagctctgtacttcccagctgttgggctgtggccttccagcctggggattttaatgtggtggcccgggactgccgacctgtctgtctgaatctgatgattctgacccattatgttggcacttggcacattgtatgtttggtttctttggttttagttctcgtcttcttgcttttttttatttaaagtaatttctgtaagcaacatgatgcatgtaactagaaggacctttgtttgtatacgctc

SEQ ID NO: 20136 - protein, 183 aa, Zea mays subsp. mays
  peptide (1)..(183): Ceres Seq. ID no. 13622664
MVAAVLAVSWAGVARADFAQDRAMCADRLMGLATCLTFVQDKATARAPTPDCCAGLKQVVAASKLCMCVLVKDRDEPALGFKINVTRAMDLPSLCSNPATFSDCPKILGMSPDAPEAEIFKEYAKKHESNNGTTIPAAATGAAAATGKSTSAAPTADGAGRQPGTVFFYVVSALLVSVAVLLC

SEQ ID NO: 20137 - protein, 160 aa, Zea mays subsp. mays
  peptide (1)..(160): Ceres Seq. ID no. 13622665
MCADRLMGLATCLTFVQDKATARAPTPDCCAGLKQVVAASKLCMCVLVKDRDEPALGFKINVTRAMDLPSLCSNPATFSDCPKILGMSPDAPEAEIFKEYAKKHESNNGTTIPAAATGAAAATGKSTSAAPTADGAGRQPGTVFFYVVSALLVSVAVLLC

SEQ ID NO: 20138 - protein, 154 aa, Zea mays subsp. mays
  peptide (1)..(154): Ceres Seq. ID no. 13622666
MGLATCLTFVQDKATARAPTPDCCAGLKQVVAASKLCMCVLVKDRDEPALGFKINVTRAMDLPSLCSNPATFSDCPKILGMSPDAPEAEIFKEYAKKHESNNGTTIPAAATGAAAATGKSTSAAPTADGAGRQPGTVFFYVVSALLVSVAVLLC

SEQ ID NO: 20139 - DNA, 1463 bp, Zea mays subsp. mays
  misc_feature (1)..(1463): Ceres Seq. ID no. 12454872
  misc_feature (1)..(1463): Ortholog of  Ceres SEQ ID NO 14315418 as cited in SEQ ID NO 57506
aggtgcagtcagtcagtcaggcagagaaacgtgcggaggtggaagccacaacgggagcgcctaccctcgcagtccgcccctcgacctcggagccgcagcccgcgaggagcgttcacaatcacaccggccaccgcggaccctagcgctttagccttatccgtccgagcgcgcgcccgatgcagacggaggcgcgcgtgggcgtcgtcgtcgacggcggcgccgccgtgggccggtgccaggagcagcgccacatcggcacggcggcgcacctcgccgccggaggcttcgcgggcgccgtcagcaagacgtgcaccgcccccctcgcgcggctcaccatcctcttccaggtagctggtatgcattcagatgttgcgactctaaggaagtgtagcatatggcatgaggcttcacgaatttttcgagaagaagggattgaagccttttggaaaggaaatctagtgacaattgtacatcgcttgccttattctgccatcagcttctattcgtatgagcgctacaaaaatcttctccaaacggttcctggcctggatagagactcaaataatgttggtgttgtacgtttgcttggtggtggtttggcgggaataactgctgcatctttaacttacccgttggatgttgttcgtactcgcttggcgacgcagaaaaccactaggtattacaagggcatcttccatgcggtgtccacaatttgtagagacgagggtgtcaaaggattgtataaaggccttggggccacgttattgggagttggacctagtatagcaatcagcttttctgtctatgaatcactaaggtcttattggcaaatggaaaggccccatgattcaactgcagttgttagcttgttttctgggagtctatctggtattgcatcatctacagccacatttccccttgatcttgtaaagcgacggatgcaacttcaaggagcagctgggacagcgtccgtccagaaatcaaccatatctggaactgtccgtgatatcttgcagagagaaggtctccgtggcttctacagaggtatcgcccctgagtacctcaaggtcgttcctagtgttggaatcgccttcatgacatacgagacactgaagggcttgctctccagcattgacatagacgatgagagctgaggtttcccattatacgaagaggttaaacttcaccggattttttggccataggttaccatcagaatgtatgtaagtgcatcagagtggttacacgaacggcattgtggcagttttgtagttgacggtaggtcaaagcttacctgaggtgtacaactagtcttgtgttgtaccataggctaaacagagcaaataagcgcttcatgatggagtcttcatcttgtgttcctttgtacattatgctccatcaaggaagagcaaaaaaaaaaaaaaaagaagaagaagaaggtgaaagtcaatgattttataggt

SEQ ID NO: 20140 - protein, 325 aa, Zea mays subsp. mays
  peptide (1)..(325): Ceres Seq. ID no. 12454873
MQTEARVGVVVDGGAAVGRCQEQRHIGTAAHLAAGGFAGAVSKTCTAPLARLTILFQVAGMHSDVATLRKCSIWHEASRIFREEGIEAFWKGNLVTIVHRLPYSAISFYSYERYKNLLQTVPGLDRDSNNVGVVRLLGGGLAGITAASLTYPLDVVRTRLATQKTTRYYKGIFHAVSTICRDEGVKGLYKGLGATLLGVGPSIAISFSVYESLRSYWQMERPHDSTAVVSLFSGSLSGIASSTATFPLDLVKRRMQLQGAAGTASVQKSTISGTVRDILQREGLRGFYRGIAPEYLKVVPSVGIAFMTYETLKGLLSSIDIDDES

SEQ ID NO: 20141 - protein, 265 aa, Zea mays subsp. mays
  peptide (1)..(265): Ceres Seq. ID no. 12454874
MHSDVATLRKCSIWHEASRIFREEGIEAFWKGNLVTIVHRLPYSAISFYSYERYKNLLQTVPGLDRDSNNVGVVRLLGGGLAGITAASLTYPLDVVRTRLATQKTTRYYKGIFHAVSTICRDEGVKGLYKGLGATLLGVGPSIAISFSVYESLRSYWQMERPHDSTAVVSLFSGSLSGIASSTATFPLDLVKRRMQLQGAAGTASVQKSTISGTVRDILQREGLRGFYRGIAPEYLKVVPSVGIAFMTYETLKGLLSSIDIDDES

SEQ ID NO: 20142 - DNA, 2116 bp, Zea mays subsp. mays; identical to SEQ ID NO: 18260
  misc_feature (1)..(2116): Ceres Seq. ID no. 13566658
  misc_feature (1)..(2116): Ortholog of  Ceres SEQ ID NO 14313167 as cited in SEQ ID NO 54354

SEQ ID NO: 20143 - protein, 592 aa, Zea mays subsp. mays; identical to SEQ ID NO: 18261
  peptide (1)..(592): Ceres Seq. ID no. 13566659
  misc_feature (489)..(489): Xaa is any aa, unknown or other

SEQ ID NO: 20144 - protein, 535 aa, Zea mays subsp. mays; identical to SEQ ID NO: 18262
  peptide (1)..(535): Ceres Seq. ID no. 13566660
  misc_feature (432)..(432): Xaa is any aa, unknown or other

SEQ ID NO: 20145 - protein, 463 aa, Zea mays subsp. mays; identical to SEQ ID NO: 18263
  peptide (1)..(463): Ceres Seq. ID no. 13566661
  misc_feature (360)..(360): Xaa is any aa, unknown or other

SEQ ID NO: 20146 - DNA, 1402 bp, Zea mays subsp. mays; identical to SEQ ID NO: 11933
  misc_feature (1)..(1402): Ceres Seq. ID no. 13492514
  misc_feature (1)..(1402): Ortholog of  Ceres SEQ ID NO 14310443 as cited in SEQ ID NO 54695
  misc_feature (1)..(1402): Ortholog of  Ceres SEQ ID NO 13596354 as cited in SEQ ID NO 68027

SEQ ID NO: 20147 - protein, 243 aa, Zea mays subsp. mays; identical to SEQ ID NO: 11934
  peptide (1)..(243): Ceres Seq. ID no. 13492515

SEQ ID NO: 20148 - protein, 242 aa, Zea mays subsp. mays; identical to SEQ ID NO: 11935
  peptide (1)..(242): Ceres Seq. ID no. 13492516

SEQ ID NO: 20149 - protein, 240 aa, Zea mays subsp. mays; identical to SEQ ID NO: 11936
  peptide (1)..(240): Ceres Seq. ID no. 13492517

SEQ ID NO: 20150 - DNA, 845 bp, Zea mays subsp. mays
  misc_feature (1)..(845): Ceres Seq. ID no. 12418375
  misc_feature (1)..(845): Ortholog of  Ceres SEQ ID NO 15172961 as cited in SEQ ID NO 51757
  misc_feature (1)..(845): Ortholog of  Ceres SEQ ID NO 13660855 as cited in SEQ ID NO 67670
gaagaagccgcgtgcgttatcctttgagcagtttgggcgctgagcaagtccagtgagagagggagagcggcgagaggatggctgggatggcatcgctgcagggcgccatggcgtcgctctccatctccgcgctaggcgcggcgacggcgagcagcagcagcttctggggcaaccggctcgccacctactccgcgccgcagcctggggtaaggtttatggtcaagatatgcccaattgaaatgagacttaagagatgggagcgaaagaagtgtaaaccaaacagtcttcctgtgctgcacaagatgcatgttaggatcggggacacggtacaggttattgcaggccgtgagaaaggaaaggttggagaagtcacacgccaaaaggtggatttagaaaaccttcgcttagccaagctgacaaatttcaagggccacgtaatgagatgcagctagtagcatttctgcttagacagtctagtagtctgaagaaactatttctgattgctcccaaggaggatcaccctcaaggactgcgcaaggttcagtcagatatgctgcctgattttcttaaaaaagaaatatcgcatctggaaagaccttcagcaaatacccagatatttttcggcgagcctgatgctcagacccacccgttgcattcggaggtctttgtcaggttttagcttgaaatgagcaaatgctgttgtagcccaattcctgctcatatagatttagatttctcgttagataacggacatggggaaaaaagtatctgcaaggcatacagagtttgatatatgtttcctcttttgcaattcatattactaaagaagtcctgcatagcagtcg

SEQ ID NO: 20151 - protein, 124 aa, Zea mays subsp. mays
  peptide (1)..(124): Ceres Seq. ID no. 12418376
MAGMASLQGAMASLSISALGAATASSSSFWGNRLATYSAPQPGVRFMVKICPIEMRLKRWERKKCKPNSLPVLHKMHVRIGDTVQVIAGREKGKVGEVTRQKVDLENLRLAKLTNFKGHVMRCS

SEQ ID NO: 20152 - protein, 121 aa, Zea mays subsp. mays
  peptide (1)..(121): Ceres Seq. ID no. 12418377
MASLQGAMASLSISALGAATASSSSFWGNRLATYSAPQPGVRFMVKICPIEMRLKRWERKKCKPNSLPVLHKMHVRIGDTVQVIAGREKGKVGEVTRQKVDLENLRLAKLTNFKGHVMRCS

SEQ ID NO: 20153 - protein, 114 aa, Zea mays subsp. mays
  peptide (1)..(114): Ceres Seq. ID no. 12418378
MASLSISALGAATASSSSFWGNRLATYSAPQPGVRFMVKICPIEMRLKRWERKKCKPNSLPVLHKMHVRIGDTVQVIAGREKGKVGEVTRQKVDLENLRLAKLTNFKGHVMRCS

SEQ ID NO: 20154 - DNA, 1023 bp, Zea mays subsp. mays
  misc_feature (1)..(1023): Ceres Seq. ID no. 12378098
  misc_feature (1)..(1023): Ortholog of  Ceres SEQ ID NO 13597570 as cited in SEQ ID NO 64673
acaaccacaggcaacgcaacccccaaacccaaaaccctaccacggcgcccatggcttcgccgccgcctcctcctgcccggcaccccacctccgcagcaaccgccgctgcggcgggcaatggccacgacacctccgcagcaaccgccgctgcggcgggaaatagccacgccacctccgcttcgccggtggacgccctcttcctccagaacctcatgacccgcgtccagctccgcccgcccttcctcgacaccaactcattcctcacccaggaccttgacgacttcctcctcaacgagttcgccgcgctatccgccgctgcaggggcgtcggatgatgacgaagacgtggaggatgaggatggtgggctcgctggcggggagggctccggggaggcgaggcggcggcggatgctggcgagggaggaggcgaagctggagaaggagattgtgcggatggtgctggccggggaggccgaggacaagctcaagcccaattcgggccagtccgtggctgtcggcgaccaccacctctgcgtcggtttccacgacgatgccagcggggagtatcgcatctgggaatggcatggccacgtcatgctgttcgacgacgaggaaggatactccgcagagtacatttatggcaaccacttcgagccgctcgctgctgccacagccagggccaagaagaaggagaaggagatgagagagaaggaattgagcatgggtcttcgggatttggtcgtggacactgacgacggtggcaatgccaatcgctccaaggagaacggtagcagcggagggcccagggtagtgcgcaggaatgtcgtcaatggcccaaccacgcctgctaggtaatggctttctagagcttgcagtgtgcttggtggaagaagcagtgccgcagtgcatcaatctgtgtgacaaaaacaaataaagatctgttgtccttttctcgcttatagctgtttaagctgtctattgtattctgttgagaaatcaatcacatctatactttgcttctgct

SEQ ID NO: 20155 - protein, 283 aa, Zea mays subsp. mays
  peptide (1)..(283): Ceres Seq. ID no. 12378099
NHRQRNPQTQNPTTAPMASPPPPPARHPTSAATAAAAGNGHDTSAATAAAAGNSHATSASPVDALFLQNLMTRVQLRPPFLDTNSFLTQDLDDFLLNEFAALSAAAGASDDDEDVEDEDGGLAGGEGSGEARRRRMLAREEAKLEKEIVRMVLAGEAEDKLKPNSGQSVAVGDHHLCVGFHDDASGEYRIWEWHGHVMLFDDEEGYSAEYIYGNHFEPLAAATARAKKKEKEMREKELSMGLRDLVVDTDDGGNANRSKENGSSGGPRVVRRNVVNGPTTPAR

SEQ ID NO: 20156 - protein, 267 aa, Zea mays subsp. mays
  peptide (1)..(267): Ceres Seq. ID no. 12378100
MASPPPPPARHPTSAATAAAAGNGHDTSAATAAAAGNSHATSASPVDALFLQNLMTRVQLRPPFLDTNSFLTQDLDDFLLNEFAALSAAAGASDDDEDVEDEDGGLAGGEGSGEARRRRMLAREEAKLEKEIVRMVLAGEAEDKLKPNSGQSVAVGDHHLCVGFHDDASGEYRIWEWHGHVMLFDDEEGYSAEYIYGNHFEPLAAATARAKKKEKEMREKELSMGLRDLVVDTDDGGNANRSKENGSSGGPRVVRRNVVNGPTTPAR

SEQ ID NO: 20157 - protein, 213 aa, Zea mays subsp. mays
  peptide (1)..(213): Ceres Seq. ID no. 12378101
MTRVQLRPPFLDTNSFLTQDLDDFLLNEFAALSAAAGASDDDEDVEDEDGGLAGGEGSGEARRRRMLAREEAKLEKEIVRMVLAGEAEDKLKPNSGQSVAVGDHHLCVGFHDDASGEYRIWEWHGHVMLFDDEEGYSAEYIYGNHFEPLAAATARAKKKEKEMREKELSMGLRDLVVDTDDGGNANRSKENGSSGGPRVVRRNVVNGPTTPAR

SEQ ID NO: 20158 - DNA, 975 bp, Zea mays subsp. mays
  misc_feature (1)..(975): Ceres Seq. ID no. 14305221
  misc_feature (1)..(975): Ortholog of  Ceres SEQ ID NO 14306110 as cited in SEQ ID NO 1363
  misc_feature (1)..(975): Ortholog of  Ceres SEQ ID NO 12609333 as cited in SEQ ID NO 51833
  misc_feature (1)..(975): Ortholog of  Ceres SEQ ID NO 12584903 as cited in SEQ ID NO 62712
ataaaggggcattggcttgggatcacctctgcatctcgcctgggatctgctagcttgatctctcctagtcctagcccattcgcttctcctgttcgtcgctcttaatttgcttgctcgatccctggcagtggcagctgctgcaatggcttccggtggcgcgtcgtcactggccttggccgcgctgctcctcgtgagctgcgcctcggcggcggtggcgaccaagtacaccgtcggggacgcgtccggctggacgaccaccggcgactacgccacctgggccagcggcaagaagttcaaagtcggcgacagtctcgagttcaaatacgccggcggggcgcacacggtggacgaggtgagcgcggcggactacgccgcctgctcctccagcaacgcgctcagcaccgacagcgccggcgccacgaccgtgaccctcaagacggccggcaagcactacttcatctgcggcgtggcgggccattgcagcagcggcatgaagctcgcggtggacgtggccaaggcggtgaccgccccggcgccggccccagccgcggccccggccccggccgcggacacagccccagatgcccccgacaccacgccgtcgaccccgacgtccccctcgagctccggcggccgcacgcccaagagcccagacacgacggtcctgtcgccgccggacaagaagtccacctcctccggcgccaccgggctcagcgccgcggcgtgggccggcttgggcctggccgggctcgtggccgtgcacctcggcgcgttctaggccagcccgctggcctggccagggaggagacagtgccgtgtgttgttgttaggctgcacgtcatggattggattggtgtattggttgagggacttgactgcttaccagagagagatctcttttggttcagggaactgtgctgtagacctgtagttggataccttggatgttatgctatcagttttgctgttgttatc

SEQ ID NO: 20159 - protein, 211 aa, Zea mays subsp. mays
  peptide (1)..(211): Ceres Seq. ID no. 14305222
MASGGASSLALAALLLVSCASAAVATKYTVGDASGWTTTGDYATWASGKKFKVGDSLEFKYAGGAHTVDEVSAADYAACSSSNALSTDSAGATTVTLKTAGKHYFICGVAGHCSSGMKLAVDVAKAVTAPAPAPAAAPAPAADTAPDAPDTTPSTPTSPSSSGGRTPKSPDTTVLSPPDKKSTSSGATGLSAAAWAGLGLAGLVAVHLGAF

SEQ ID NO: 20160 - DNA, 488 bp, Zea mays subsp. mays
  misc_feature (1)..(488): Ceres Seq. ID no. 2789959
  misc_feature (1)..(488): Ortholog of  Ceres SEQ ID NO 15174547 as cited in SEQ ID NO 59586
  misc_feature (1)..(488): Ortholog of  Ceres SEQ ID NO 15169470 as cited in SEQ ID NO 66036
acgggcacgaccatctcctacacccgcgggcaaaagttccctgtcccccgtacacattccaccccaaaatggcactcgcgccatcacccccagcgctgccgcccaacccggcgctccctttgccgtggtgggggcgggccggccgcggtgcgctcgtccgcgcccgcgcccgcgccgtccgcgcggcgctacggccccgagccagtggtccgtcgggagctggcggggccgcccggcgcagcagcwgcccgagtacccggacaaggcggacctggaagacgtgctgcggacggtgggaacgttcccgcccatcgtcttcgccggcgaggcgcgcaccctcgaggagcgcctcgcggaggccgccgtcggccgggccttcctcctccagggcggcgactgcgccgagagcttcaaggagttcaacgccaacaacatcagggacacttccgcgtcctcctgcaaatgtccgttgtgctcatgttcggagg

SEQ ID NO: 20161 - protein, 162 aa, Zea mays subsp. mays
  peptide (1)..(162): Ceres Seq. ID no. 2789960
  misc_feature (82)..(82): Xaa is any aa, unknown or other
RARPSPTPAGKSSLSPVHIPPQNGTRAITPSAAAQPGAPFAVVGAGRPRCARPRPRPRRPRGATAPSQWSVGSWRGRPAQQXPEYPDKADLEDVLRTVGTFPPIVFAGEARTLEERLAEAAVGRAFLLQGGDCAESFKEFNANNIRDTSASSCKCPLCSCSE

SEQ ID NO: 20162 - protein, 162 aa, Zea mays subsp. mays
  peptide (1)..(162): Ceres Seq. ID no. 2789961
  misc_feature (82)..(82): Xaa is any aa, unknown or other
GHDHLLHPRAKVPCPPYTFHPKMALAPSPPALPPNPALPLPWWGRAGRGALVRARARAVRAALRPRASGPSGAGGAARRSSXPSTRTRRTWKTCCGRWERSRPSSSPARRAPSRSASRRPPSAGPSSSRAATAPRASRSSTPTTSGTLPRPPANVRCAHVRR

SEQ ID NO: 20163 - protein, 162 aa, Zea mays subsp. mays
  peptide (1)..(162): Ceres Seq. ID no. 2789962
  misc_feature (82)..(82): Xaa is any aa, unknown or other
TGTTISYTRGQKFPVPRTHSTPKWHSRHHPQRCRPTRRSLCRGGGGPAAVRSSAPAPAPSARRYGPEPVVRRELAGPPGAAXARVPGQGGPGRRAADGGNVPAHRLRRRGAHPRGAPRGGRRRPGLPPPGRRLRRELQGVQRQQHQGHFRVLLQMSVVLMFG

SEQ ID NO: 20164 - DNA, 931 bp, Zea mays subsp. mays; identical to SEQ ID NO: 16713
  misc_feature (1)..(931): Ceres Seq. ID no. 12354601
  misc_feature (1)..(931): Ortholog of  Ceres SEQ ID NO 15169603 as cited in SEQ ID NO 65772
  misc_feature (1)..(931): Ortholog of  Ceres SEQ ID NO 14308003 as cited in SEQ ID NO 65919
  misc_feature (1)..(931): Ortholog of  Ceres SEQ ID NO 14303087 as cited in SEQ ID NO 66569

SEQ ID NO: 20165 - protein, 310 aa, Zea mays subsp. mays; identical to SEQ ID NO: 16714
  peptide (1)..(310): Ceres Seq. ID no. 12354602

SEQ ID NO: 20166 - protein, 299 aa, Zea mays subsp. mays; identical to SEQ ID NO: 16715
  peptide (1)..(299): Ceres Seq. ID no. 12354603

SEQ ID NO: 20167 - protein, 236 aa, Zea mays subsp. mays; identical to SEQ ID NO: 16716
  peptide (1)..(236): Ceres Seq. ID no. 12354604

SEQ ID NO: 20168 - DNA, 1239 bp, Zea mays subsp. mays; identical to SEQ ID NO: 12588
  misc_feature (1)..(1239): Ceres Seq. ID no. 12364583
  misc_feature (1)..(1239): Ortholog of  Ceres SEQ ID NO 13639236 as cited in SEQ ID NO 56720
  misc_feature (1)..(1239): Ortholog of  Ceres SEQ ID NO 12619999 as cited in SEQ ID NO 66123
  misc_feature (1)..(1239): Ortholog of  Ceres SEQ ID NO 13656436 as cited in SEQ ID NO 69154

SEQ ID NO: 20169 - protein, 130 aa, Zea mays subsp. mays; identical to SEQ ID NO: 12589
  peptide (1)..(130): Ceres Seq. ID no. 12364584

SEQ ID NO: 20170 - protein, 92 aa, Zea mays subsp. mays; identical to SEQ ID NO: 12590
  peptide (1)..(92): Ceres Seq. ID no. 12364585

SEQ ID NO: 20171 - protein, 87 aa, Zea mays subsp. mays; identical to SEQ ID NO: 12591
  peptide (1)..(87): Ceres Seq. ID no. 12364586

SEQ ID NO: 20172 - DNA, 407 bp, Zea mays subsp. mays
  misc_feature (1)..(407): Ceres Seq. ID no. 2787041
  misc_feature (1)..(407): Ortholog of  Ceres SEQ ID NO 13502983 as cited in SEQ ID NO 68464
aaaaaatcaatcgcccacaaaggagagccaggcagccagccaaatcttccacctcctccatttccagccccgtccccacaccagctcgcgtaacctcctgcccatggctggaggcggcggcgcaggcgcgggctcgtcgtccggcggcggcggagggggcggcagggagggcgactgggactgcggcagctgcggcaaccgcaactacgccttccgctcgctctgcaaccgctgcaagcagccgcgcctcctcgtcgaccccaacaccccgcgcgactccaagtggctaccccgcgccggggactggatctgcaccggttgcagtaacaataattatgcatccagaaagaactgcaaaaagtgtggcttgcccaaggaggaagcagcaatgccagcattgcaaatgg

SEQ ID NO: 20173 - protein, 135 aa, Zea mays subsp. mays
  peptide (1)..(135): Ceres Seq. ID no. 2787042
KNQSPTKESQAASQIFHLLHFQPRPHTSSRNLLPMAGGGGAGAGSSSGGGGGGGREGDWDCGSCGNRNYAFRSLCNRCKQPRLLVDPNTPRDSKWLPRAGDWICTGCSNNNYASRKNCKKCGLPKEEAAMPALQM

SEQ ID NO: 20174 - protein, 135 aa, Zea mays subsp. mays
  peptide (1)..(135): Ceres Seq. ID no. 2787043
KINRPQRRARQPAKSSTSSISSPVPTPARVTSCPWLEAAAQARARRPAAAEGAAGRATGTAAAAATATTPSARSATAASSRASSSTPTPRATPSGYPAPGTGSAPVAVTIIMHPERTAKSVACPRRKQQCQHCKW

SEQ ID NO: 20175 - protein, 101 aa, Zea mays subsp. mays
  peptide (1)..(101): Ceres Seq. ID no. 2787044
MAGGGGAGAGSSSGGGGGGGREGDWDCGSCGNRNYAFRSLCNRCKQPRLLVDPNTPRDSKWLPRAGDWICTGCSNNNYASRKNCKKCGLPKEEAAMPALQM

SEQ ID NO: 20176 - DNA, 1694 bp, Zea mays subsp. mays
  misc_feature (1)..(1694): Ceres Seq. ID no. 12435649
  misc_feature (1)..(1694): Ortholog of  Ceres SEQ ID NO 14315241 as cited in SEQ ID NO 52516
  misc_feature (1)..(1694): Ortholog of  Ceres SEQ ID NO 15176457 as cited in SEQ ID NO 55547
  misc_feature (1)..(1694): Ortholog of  Ceres SEQ ID NO 13594349 as cited in SEQ ID NO 58161
  misc_feature (1)..(1694): Ortholog of  Ceres SEQ ID NO 13663419 as cited in SEQ ID NO 66561
  misc_feature (1)..(1694): Ortholog of  Ceres SEQ ID NO 15177892 as cited in SEQ ID NO 0
aaccacgcaccagcagcagcgaggagctagagcagcggcagagcgcgcggcgcacaccacgcatcgtacgtcctagctcacgatggcgggcgcctggtccttgctcgcgctcgccctatcgctctgctccgtcgcggccgtcgcggtgcagcaggtgaacacggtggccgcggcgcagcaggcggcggaccgggtggcggggctcccggggcagccgcccgtggggttcgcgcagtacgccggctacgtgaccgtgaacgagacgcacggccgcgcgctcttctactggttcttcgaggccaccgcgtcgcccgacaagaagccgctcgtgctctggctcaacggcgggcccgggtgctcgtcgattgggtacggggaggcggaggagctgggtcccttcctggtgcagaagggcaagccggagctcagatggaacaactactcctggaacacagaggccaaccttatgttcctggagtccccggtgggcgtcggcttctcctacacaaacacgagctccgacctgctgcaactcggcgacaagatcaccgctgacgacgcttacaagttcctgctcaactggttcaagaggttcccgcagtacaggtcccacgacttctacatcgccggcgagagctacgccgggcactacgtcccgcagctgtcggagaagatcttcgacggcaacagggcggggcccaaggagagctacgtcaacctcaagggcctgatggtcgggaacgcgctcatggacgacgagacggaccagacgggcatggtcgactacgcctgggaccacgccgtcatctccgaccgggtgtacgccgacgtcaaggccaggtgcgacttcagcatggccaacgtcaccgacgcctgcaacgccgcgctccaggagtacttcgccgtgtaccgcctcatcgacatgtacagcctctacaccccggtctgcaccgacgacccggccggcgcgtcggcgttgccgtcctcctacgacgcgcgcggccaccggaaggtcgccgtccacggcgccgcccccaggatcttctccaaataccgaggatggatcatgaagccggcgggctacgacccctgcacggcggagtacgcggagacctacttcaaccggcccgacgtccaggcggcgctgcacgcgaacgtgaccaagatcggctacaactggacgcactgcagcgatgtgatcaacacttggaacgacgccgccttctccaccctccccaccatccgcaagctcgtcgccagcggcctcagggtgtgggtcttcagcggcgacaccgacgggaggatccccgtgacgtccacgaggctcaccctcaacaagctagggctcaagaccatccaggagtggacgccgtggtacgaccatctgcaggttggtggatggacggtcgtctatgagggcctgacgttcgtcaccatccgcggagccggacacgaggtgcctctgcacgcgccacggcaggcgctgacgctcttcagcaacttcctggcaggcaccaagatgcctccaacggcgttcccctagtttcaaaagaatttaaaaaaggtgcctcctcttgcccggcaaagccggctgatatgtttctttccccccttctcgcttctactaaagttgtaagtgtaattcgattggaaaaaagttcagaataaaagtcatagtgctgacctcaatgctc

SEQ ID NO: 20177 - protein, 486 aa, Zea mays subsp. mays
  peptide (1)..(486): Ceres Seq. ID no. 12435650
MAGAWSLLALALSLCSVAAVAVQQVNTVAAAQQAADRVAGLPGQPPVGFAQYAGYVTVNETHGRALFYWFFEATASPDKKPLVLWLNGGPGCSSIGYGEAEELGPFLVQKGKPELRWNNYSWNTEANLMFLESPVGVGFSYTNTSSDLLQLGDKITADDAYKFLLNWFKRFPQYRSHDFYIAGESYAGHYVPQLSEKIFDGNRAGPKESYVNLKGLMVGNALMDDETDQTGMVDYAWDHAVISDRVYADVKARCDFSMANVTDACNAALQEYFAVYRLIDMYSLYTPVCTDDPAGASALPSSYDARGHRKVAVHGAAPRIFSKYRGWIMKPAGYDPCTAEYAETYFNRPDVQAALHANVTKIGYNWTHCSDVINTWNDAAFSTLPTIRKLVASGLRVWVFSGDTDGRIPVTSTRLTLNKLGLKTIQEWTPWYDHLQVGGWTVVYEGLTFVTIRGAGHEVPLHAPRQALTLFSNFLAGTKMPPTAFP

SEQ ID NO: 20178 - protein, 358 aa, Zea mays subsp. mays
  peptide (1)..(358): Ceres Seq. ID no. 12435651
MFLESPVGVGFSYTNTSSDLLQLGDKITADDAYKFLLNWFKRFPQYRSHDFYIAGESYAGHYVPQLSEKIFDGNRAGPKESYVNLKGLMVGNALMDDETDQTGMVDYAWDHAVISDRVYADVKARCDFSMANVTDACNAALQEYFAVYRLIDMYSLYTPVCTDDPAGASALPSSYDARGHRKVAVHGAAPRIFSKYRGWIMKPAGYDPCTAEYAETYFNRPDVQAALHANVTKIGYNWTHCSDVINTWNDAAFSTLPTIRKLVASGLRVWVFSGDTDGRIPVTSTRLTLNKLGLKTIQEWTPWYDHLQVGGWTVVYEGLTFVTIRGAGHEVPLHAPRQALTLFSNFLAGTKMPPTAFP

SEQ ID NO: 20179 - protein, 270 aa, Zea mays subsp. mays
  peptide (1)..(270): Ceres Seq. ID no. 12435652
MVGNALMDDETDQTGMVDYAWDHAVISDRVYADVKARCDFSMANVTDACNAALQEYFAVYRLIDMYSLYTPVCTDDPAGASALPSSYDARGHRKVAVHGAAPRIFSKYRGWIMKPAGYDPCTAEYAETYFNRPDVQAALHANVTKIGYNWTHCSDVINTWNDAAFSTLPTIRKLVASGLRVWVFSGDTDGRIPVTSTRLTLNKLGLKTIQEWTPWYDHLQVGGWTVVYEGLTFVTIRGAGHEVPLHAPRQALTLFSNFLAGTKMPPTAFP

SEQ ID NO: 20180 - DNA, 1415 bp, Zea mays subsp. mays
  misc_feature (1)..(1415): Ceres Seq. ID no. 12435621
  misc_feature (1)..(1415): Ortholog of  Ceres SEQ ID NO 13596189 as cited in SEQ ID NO 68452
tcgaaaaacccccacgccccaccccaccaaacaatggcgccggcggcgacttccacagcctctgcgccctcctccttccactccaccggtaggcatagggccagggtcggggcccggccatcgctcgtctctctccgcgtcagagcagccaatcccaacgttaccgccgatcccgcaccggccttccagtccgtcacggccttcgcgccagccaccgtcgccaacctcggcccgggcttcgacttcctcggatgcgccgtcgccgacgcctccctctccctgggtgacaccgtcaccgcaaccctggacccgtcactcccgcccgccaccgtctccatcgcctccgtcacatccccgtcccgccccaacctcgccgagcgcctctctagggacccgctccgcaactgcgcgggcgtcgccgccatcgccgcgctccgcgccctcggcgtccgctcccacgccgtgtccatccacctcaccaagggcctgccgctcggctcggggctcggctcctccgcggcctccgccgccgccgccgccaaggccgtcgacgccctcttcggctcgcgcctcggccgcgacgacctcgtcctcgcggggctcgagtcggagaaggccgtcagcggcttccacgccgacaacatcgcccccgccatcctcggcggcttcgtcctcgtccgcagctacgacccctttcacctcgtcccgctttccttcccgccagcgctccgcctccacttcgtcctggtcacccccgacttcgaggcgcccacgagcaagatgcgcgccgcgctgcccaggcaggtcgacgtccagcagcacgtgcgcaactccagccaggcagcggcgctcgtggcggcggtgctgcagggggacgcgggcctcatcggctccgcgatgtcgtccgacggcatcgtggagcccaccagggcacccctcatacctggcatggcggccgtaaaggcggcggccctgcaagctggagcgctgggctgcacaattagcggcgcgggccccacagtggtggccgtcatccaaggggaggaaaggggggaggaggttgcccgcaggatggtggacgcgttctggagcgcaggcaagctcaaggcgacagcaaccgtcgcgcagctcgatacccttggtgccagggtcatcgccacgtcatccttgaactagcaaaagattcggaaagtggtactgcaattgtatcaccaaacaaggaagaatgaaggggaaccccatggatttgtatgttttctcttctttcttgcatctttaggtggttaattggctttggaataagtgagatggaggacatcgctagaacaattctgttccgtgggctgtaatttcaatttgggctggtttcttcatcatgccatggataattatgaataaatttgaggtagtttgtt

SEQ ID NO: 20181 - protein, 391 aa, Zea mays subsp. mays
  peptide (1)..(391): Ceres Seq. ID no. 12435622
SKNPHAPPHQTMAPAATSTASAPSSFHSTGRHRARVGARPSLVSLRVRAANPNVTADPAPAFQSVTAFAPATVANLGPGFDFLGCAVADASLSLGDTVTATLDPSLPPATVSIASVTSPSRPNLAERLSRDPLRNCAGVAAIAALRALGVRSHAVSIHLTKGLPLGSGLGSSAASAAAAAKAVDALFGSRLGRDDLVLAGLESEKAVSGFHADNIAPAILGGFVLVRSYDPFHLVPLSFPPALRLHFVLVTPDFEAPTSKMRAALPRQVDVQQHVRNSSQAAALVAAVLQGDAGLIGSAMSSDGIVEPTRAPLIPGMAAVKAAALQAGALGCTISGAGPTVVAVIQGEERGEEVARRMVDAFWSAGKLKATATVAQLDTLGARVIATSSLN

SEQ ID NO: 20182 - protein, 380 aa, Zea mays subsp. mays
  peptide (1)..(380): Ceres Seq. ID no. 12435623
MAPAATSTASAPSSFHSTGRHRARVGARPSLVSLRVRAANPNVTADPAPAFQSVTAFAPATVANLGPGFDFLGCAVADASLSLGDTVTATLDPSLPPATVSIASVTSPSRPNLAERLSRDPLRNCAGVAAIAALRALGVRSHAVSIHLTKGLPLGSGLGSSAASAAAAAKAVDALFGSRLGRDDLVLAGLESEKAVSGFHADNIAPAILGGFVLVRSYDPFHLVPLSFPPALRLHFVLVTPDFEAPTSKMRAALPRQVDVQQHVRNSSQAAALVAAVLQGDAGLIGSAMSSDGIVEPTRAPLIPGMAAVKAAALQAGALGCTISGAGPTVVAVIQGEERGEEVARRMVDAFWSAGKLKATATVAQLDTLGARVIATSSLN

SEQ ID NO: 20183 - protein, 319 aa, Zea mays subsp. mays
  peptide (1)..(319): Ceres Seq. ID no. 12435624
RKTPTPHPTKQWRRRRLPQPLRPPPSTPPVGIGPGSGPGHRSSLSASEQPIPTLPPIPHRPSSPSRPSRQPPSPTSARASTSSDAPSPTPPSPWVTPSPQPWTRHSRPPPSPSPPSHPRPAPTSPSASLGTRSATARASPPSPRSAPSASAPTPCPSTSPRACRSARGSAPPRPPPPPPPRPSTPSSARASAATTSSSRGSSRRRPSAASTPTTSPPPSSAASSSSAATTPFTSSRFPSRQRSASTSSWSPPTSRRPRARCAPRCPGRSTSSSTCATPARQRRSWRRCCRGTRASSAPRCRPTASWSPPGHPSYLAWRP

SEQ ID NO: 20184 - DNA, 2177 bp, Zea mays subsp. mays; identical to SEQ ID NO: 16780
  misc_feature (1)..(2177): Ceres Seq. ID no. 13492553
  misc_feature (1)..(2177): Ortholog of  Ceres SEQ ID NO 13596816 as cited in SEQ ID NO 62287

SEQ ID NO: 20185 - protein, 394 aa, Zea mays subsp. mays; identical to SEQ ID NO: 16781
  peptide (1)..(394): Ceres Seq. ID no. 13492554

SEQ ID NO: 20186 - protein, 390 aa, Zea mays subsp. mays; identical to SEQ ID NO: 16782
  peptide (1)..(390): Ceres Seq. ID no. 13492555

SEQ ID NO: 20187 - protein, 303 aa, Zea mays subsp. mays; identical to SEQ ID NO: 16783
  peptide (1)..(303): Ceres Seq. ID no. 13492556

SEQ ID NO: 20188 - DNA, 476 bp, Zea mays subsp. mays
  misc_feature (1)..(476): Ceres Seq. ID no. 11028215
  misc_feature (1)..(476): Ortholog of  Ceres SEQ ID NO 12356503 as cited in SEQ ID NO 0
aatatttttagccgcttttcggttggtggtgcctggcatctaccgtgcggagggggaagagggagaggccaggagaggaaagcctgcagccaccatggattccgacctctggatctcgcgtctcacggccgccnggcggcagtttgcgctgcagcgcgcgcagcgccagcacgccgccccggcatcccatcacgatcgatttgggtatgatgatatcgaacctgaggatgatttgcactcagacttcccatgcccttactgttatgaagatcatgatgttgcttctctctgcgcccatttggaggacgagcaccctttcgagtctaaaattgtgaaacatcaaagagtacgcagagttactggtaatggcaaccacaatctctcctatgcagggagagatcttcaactgcaagagacctacttaaaggtgcttcttggaaatagcagtcgaagcagcagtacaatgcatcaagtac

SEQ ID NO: 20189 - protein, 158 aa, Zea mays subsp. mays
  peptide (1)..(158): Ceres Seq. ID no. 11028216
  misc_feature (45)..(45): Xaa is any aa, unknown or other
IFLAAFRLVVPGIYRAEGEEGEARRGKPAATMDSDLWISRLTAAXRQFALQRAQRQHAAPASHHDRFGYDDIEPEDDLHSDFPCPYCYEDHDVASLCAHLEDEHPFESKIVKHQRVRRVTGNGNHNLSYAGRDLQLQETYLKVLLGNSSRSSSTMHQV

SEQ ID NO: 20190 - protein, 127 aa, Zea mays subsp. mays
  peptide (1)..(127): Ceres Seq. ID no. 11028217
  misc_feature (14)..(14): Xaa is any aa, unknown or other
MDSDLWISRLTAAXRQFALQRAQRQHAAPASHHDRFGYDDIEPEDDLHSDFPCPYCYEDHDVASLCAHLEDEHPFESKIVKHQRVRRVTGNGNHNLSYAGRDLQLQETYLKVLLGNSSRSSSTMHQV

SEQ ID NO: 20191 - DNA, 1466 bp, Zea mays subsp. mays; identical to SEQ ID NO: 6124
  misc_feature (1)..(1466): Ceres Seq. ID no. 13577847
  misc_feature (1)..(1466): Ortholog of  Ceres SEQ ID NO 15168580 as cited in SEQ ID NO 60279

SEQ ID NO: 20192 - protein, 393 aa, Zea mays subsp. mays; identical to SEQ ID NO: 6125
  peptide (1)..(393): Ceres Seq. ID no. 13577848

SEQ ID NO: 20193 - protein, 350 aa, Zea mays subsp. mays; identical to SEQ ID NO: 6126
  peptide (1)..(350): Ceres Seq. ID no. 13577849

SEQ ID NO: 20194 - protein, 322 aa, Zea mays subsp. mays; identical to SEQ ID NO: 6127
  peptide (1)..(322): Ceres Seq. ID no. 13577850

SEQ ID NO: 20195 - DNA, 1520 bp, Zea mays subsp. mays
  misc_feature (1)..(1520): Ceres Seq. ID no. 12378208
  misc_feature (1)..(1520): Ortholog of  Ceres SEQ ID NO 14312769 as cited in SEQ ID NO 55493
  misc_feature (1)..(1520): Ortholog of  Ceres SEQ ID NO 13639300 as cited in SEQ ID NO 56701
gcacgagaccattacctagaacatcctaatcgaaaagttccgtttcggtccgtcctccggtaacgcgctcgcctgctccgcttggctcatggattttcctccagggagcctccaatcgtggggtccaggtcgatgaggcggccctctccgctgaatctggcgatggtccgcggcggcagtcgccgatcaaacaccgtcaaaactttgcaggcccctggggcgtccacttccggtgccgagagcagcgccgtggagatgggcaccgagaagtccgaagtgtacagcactaacatgacgcaggctatgggagcagcgttgacatatagacatgaactcgggatgaactacaatttcatacgcccagacttgattgtaggatcctgcttacagagtccacttgatgttgataagcttcggaagattggtgtcaaaactgtattctgcttgcagcaagattcagatcttgaatattttggagtcgacatccgtgccattcaagattattctctacaattcaaagatattgtgcactgccgtgcggaaattagggattttgatgcttttgatttgcgattgaggcttcctgctgtggttagcaaattgcacaaacttatcaactgtaatggtggtgtaacatatatacattgtactgctggacttggaagagctcctgctgttgcattggcttatatgttctggattcttgggtacagtctcaatgaaggacatcggctgctacagagtaaaagggctttgctttccgaagttggaagccattaagttggcaactgctgacattcttgacaggattatccaaaaacacaatcactttgaagtgggaagctgatggttcttcctctgttgaaatttctgggctcgacattggctggggtcagagaattcctttgacatatgatgaggagaaaggagcttggtttcttgagaaagagttgcctgaaggacggtatgaatacaaatacgtagtggatggcaaatggctatgcaacgagcatgagctgataacgaaaccgaatgctgacggccacgtgaacaactatgttcaggtctccagagacggcacgagcgatgaagagaaggagcttagggagcggttgactggtcgggaccctgatctcacggaccaggagaggctgatgatcagagagtacttggaacagtacgcggatgccgccgagcgctaggagaagaatgatgatgactgaggaagagaagagacacaccatgagacgacggaccgaagccgacctgaccgcaccttcctttacggagaggtcgggcttcccctctcttgtcaatcaaatactcgtagcttaaccgtgcaaaagggcacgttctgctcgcatacttggagaatgatgatgaaggagcaaactgtacgtattgttgaacagcagctgtgcagaaataacaaaggtagtagcgtaaaactactgtactgaccataatgttactactgtatgctccttcttggctatgaataataataataataataaaag

SEQ ID NO: 20196 - protein, 215 aa, Zea mays subsp. mays
  peptide (1)..(215): Ceres Seq. ID no. 12378209
MRRPSPLNLAMVRGGSRRSNTVKTLQAPGASTSGAESSAVEMGTEKSEVYSTNMTQAMGAALTYRHELGMNYNFIRPDLIVGSCLQSPLDVDKLRKIGVKTVFCLQQDSDLEYFGVDIRAIQDYSLQFKDIVHCRAEIRDFDAFDLRLRLPAVVSKLHKLINCNGGVTYIHCTAGLGRAPAVALAYMFWILGYSLNEGHRLLQSKRALLSEVGSH

SEQ ID NO: 20197 - protein, 205 aa, Zea mays subsp. mays
  peptide (1)..(205): Ceres Seq. ID no. 12378210
MVRGGSRRSNTVKTLQAPGASTSGAESSAVEMGTEKSEVYSTNMTQAMGAALTYRHELGMNYNFIRPDLIVGSCLQSPLDVDKLRKIGVKTVFCLQQDSDLEYFGVDIRAIQDYSLQFKDIVHCRAEIRDFDAFDLRLRLPAVVSKLHKLINCNGGVTYIHCTAGLGRAPAVALAYMFWILGYSLNEGHRLLQSKRALLSEVGSH

SEQ ID NO: 20198 - protein, 174 aa, Zea mays subsp. mays
  peptide (1)..(174): Ceres Seq. ID no. 12378211
MGTEKSEVYSTNMTQAMGAALTYRHELGMNYNFIRPDLIVGSCLQSPLDVDKLRKIGVKTVFCLQQDSDLEYFGVDIRAIQDYSLQFKDIVHCRAEIRDFDAFDLRLRLPAVVSKLHKLINCNGGVTYIHCTAGLGRAPAVALAYMFWILGYSLNEGHRLLQSKRALLSEVGSH

SEQ ID NO: 20199 - DNA, 1091 bp, Zea mays subsp. mays
  misc_feature (1)..(1091): Ceres Seq. ID no. 12566444
  misc_feature (1)..(1091): Ortholog of  Ceres SEQ ID NO 14314343 as cited in SEQ ID NO 57301
aaaacagatcccaagtgctgccggcgagccagccggcctccatcttgtagcgaccgttcgtgacgtcgatgggtgacttcgtgggccacgtgctgccgggcacgctgctgctggcggtgggcctgtggcgggtgtgggcgtcagtggcgcgcttcggggccgacccggcggcgttccgcgtccgctcctggaaccccgtcccggcggcggggccgcggctgctggagctgcacgtggtggccggcggcgcgttcctggacatgtgcgtggagctctactacgccaacccgctccgcgtcctcaccggcggcggggtcgacccgggccacctcggcggcctcgagcacgccagcatgctcctcatgttcttcctcttcggcgcgctcgccctcgtctccgagaagaccaggtacctgcctttatcggacggcgcgctgagcctggtgttcgcgagcgcattcacggcagagttcctgctcttctacttccactccaccacgcacgcggggctggagggctactaccaccgcctcctcctcgccgtcctcgccctctgcatcgccgcgctcgtcgccggcgcgctcctgcccgccagcttccccgccgacctcggcgccggcgtcctcatcgccgtccagggcctgtggttctaccaggccgcgctcacgctgtacggccccatgctccccgcgggctgcgtccgccacttcgactcccctcactccgacgcccgcatcgagtgccacggcggcgccgcgcaggagcgcgccgagcagctggccaacttccagctgttcgggctcgtgttcctcgcgttcttctacgcgctcgggtgctacgccgtgactgcggcaaggtatgggaataacctggagctgacgacggtccatcacacacatgtggctgcgactgccatgtagaaggagaacaaagtgcacgatctagtggccacggatctctttttttcttcttgttcagttcagagtacgtagggcaggcgagtacatgaatggctgggctgttcaaaagaagctcgagtgtgatcttacttaccgcatggacctgtcactgtaaaatgtcaagttcgagcc

SEQ ID NO: 20200 - protein, 283 aa, Zea mays subsp. mays
  peptide (1)..(283): Ceres Seq. ID no. 12566445
MGDFVGHVLPGTLLLAVGLWRVWASVARFGADPAAFRVRSWNPVPAAGPRLLELHVVAGGAFLDMCVELYYANPLRVLTGGGVDPGHLGGLEHASMLLMFFLFGALALVSEKTRYLPLSDGALSLVFASAFTAEFLLFYFHSTTHAGLEGYYHRLLLAVLALCIAALVAGALLPASFPADLGAGVLIAVQGLWFYQAALTLYGPMLPAGCVRHFDSPHSDARIECHGGAAQERAEQLANFQLFGLVFLAFFYALGCYAVTAARYGNNLELTTVHHTHVAATAM

SEQ ID NO: 20201 - protein, 219 aa, Zea mays subsp. mays
  peptide (1)..(219): Ceres Seq. ID no. 12566446
MCVELYYANPLRVLTGGGVDPGHLGGLEHASMLLMFFLFGALALVSEKTRYLPLSDGALSLVFASAFTAEFLLFYFHSTTHAGLEGYYHRLLLAVLALCIAALVAGALLPASFPADLGAGVLIAVQGLWFYQAALTLYGPMLPAGCVRHFDSPHSDARIECHGGAAQERAEQLANFQLFGLVFLAFFYALGCYAVTAARYGNNLELTTVHHTHVAATAM

SEQ ID NO: 20202 - protein, 188 aa, Zea mays subsp. mays
  peptide (1)..(188): Ceres Seq. ID no. 12566447
MLLMFFLFGALALVSEKTRYLPLSDGALSLVFASAFTAEFLLFYFHSTTHAGLEGYYHRLLLAVLALCIAALVAGALLPASFPADLGAGVLIAVQGLWFYQAALTLYGPMLPAGCVRHFDSPHSDARIECHGGAAQERAEQLANFQLFGLVFLAFFYALGCYAVTAARYGNNLELTTVHHTHVAATAM

SEQ ID NO: 20203 - DNA, 1814 bp, Zea mays subsp. mays
  misc_feature (1)..(1814): Ceres Seq. ID no. 12443273
  misc_feature (1)..(1814): Ortholog of  Ceres SEQ ID NO 14309934 as cited in SEQ ID NO 20583
  misc_feature (1)..(1814): Ortholog of  Ceres SEQ ID NO 14304944 as cited in SEQ ID NO 53041
  misc_feature (1)..(1814): Ortholog of  Ceres SEQ ID NO 14304565 as cited in SEQ ID NO 53297
  misc_feature (1)..(1814): Ortholog of  Ceres SEQ ID NO 15170354 as cited in SEQ ID NO 54190
  misc_feature (1)..(1814): Ortholog of  Ceres SEQ ID NO 14307164 as cited in SEQ ID NO 54775
  misc_feature (1)..(1814): Ortholog of  Ceres SEQ ID NO 14307253 as cited in SEQ ID NO 54783
  misc_feature (1)..(1814): Ortholog of  Ceres SEQ ID NO 12583314 as cited in SEQ ID NO 56435
  misc_feature (1)..(1814): Ortholog of  Ceres SEQ ID NO 15171508 as cited in SEQ ID NO 58526
  misc_feature (1)..(1814): Ortholog of  Ceres SEQ ID NO 14312300 as cited in SEQ ID NO 58632
  misc_feature (1)..(1814): Ortholog of  Ceres SEQ ID NO 15225226 as cited in SEQ ID NO 58693
  misc_feature (1)..(1814): Ortholog of  Ceres SEQ ID NO 15172170 as cited in SEQ ID NO 58957
  misc_feature (1)..(1814): Ortholog of  Ceres SEQ ID NO 13654989 as cited in SEQ ID NO 63117
  misc_feature (1)..(1814): Ortholog of  Ceres SEQ ID NO 13584744 as cited in SEQ ID NO 69137
aggacccctattcttggctcagcaaatcctctcctcggcgcaaaggcatggagcgaatgctcatcccacctgaccacattttcccccacagagatcacatttaccgcgcacaaagcaccaacaacgatccacagcctgtttgcgagatctttagcacaaggagggaggcaggcatatagactcccacccgtgctctcattgtcagcacaacgaggcctgcggatcggtctgtgcgttctagagagaggggacgaggtttacccactgcgagagcggagaggggcagagaagagatccaaggttctggtacgtacagctgggagaagatgagctgcttcggatgcttcaagcccgacaagaaggtgccacccaggaggacggaatccagggaggtcacggtcgtcaacaaggcccccagccagaacgaagcgcctcccagggaatctgggtccatcaggccaccaccagttgcttcgaagcacaagcacagggccatcatctgaaacagcagcaagcatcgaacctcctaaaggaagttgttctgttgccaaaaccgcaaaagcattcacgttccgtgagctagccacggccacgaaaaacttccgctctgactgccttctcggagaagggggattcggcagggtatacaagggcaggcttgaaaacggacagcttgttgctgtcaagcaactagacctgaatgggtatcaaggcaacagagagttcctagttgaggtcctgatgctcagcctattgcaccatccaaacctagtcaatttggtgggctattgtgcagatggagatcaaaggcttctggtttatgagtacatggcacttggctcacttgcagatcacctgcttgatagcactcctgatcaagtgccactgagttggtatctcaggatgaagatagcttatggaactgcaaaagggcttgaatacctccatgagaaggcgaacccacctgtcatttaccgggatctcaagtcccccaacatccttctcgatgagaagtacaaccctaagctctcagattttgggctcgcaaagcttggcccagttgagggaaagacacacatctccactcgggtgatgggaacgtatgggtactgcgctccggaatacataagaacaggccagctaactgttaagaccgacgtgtacagttttggggttttcctactggagttgatcacaggaagaagagcagtggatacctccaggccagcaagtgaacagatcctggttaactgggtcaagcccatgctgagagacaggaagcgatacaatgagctagtagaccctcatcttagaggtgagtacccagaaaaagacttgagccaggctgtgggtgtggcagcaatgtgcctacaagaggaagcctcagtccggccttacatgagtgatgctgttgtggcactgggattccttgcagaaatgcctgctggctataaacacaaatctggacccatactccaaatgaaacaagttggagatccctcacgaactggtagcactaagcaagataaggatgcgtacaatcgtcaaaaagctgtagctgaggccattgagtggggctcactgaggcagaaacagaaggctcaaaatccagaaaagaaagctctaagtcaaggtatatcccctccagaagccagcagactgtgaaacacctctgctgtgcactaggttaccttctgacttgtaaccctccaattttgtgtaagacttagggccaaattgtcccacatagctgagagtttgtaaatgaaattcgtctctcataaagatgtaaggggtatatagtatttgctgtt

SEQ ID NO: 20204 - protein, 307 aa, Zea mays subsp. mays
  peptide (1)..(307): Ceres Seq. ID no. 12443274
MLSLLHHPNLVNLVGYCADGDQRLLVYEYMALGSLADHLLDSTPDQVPLSWYLRMKIAYGTAKGLEYLHEKANPPVIYRDLKSPNILLDEKYNPKLSDFGLAKLGPVEGKTHISTRVMGTYGYCAPEYIRTGQLTVKTDVYSFGVFLLELITGRRAVDTSRPASEQILVNWVKPMLRDRKRYNELVDPHLRGEYPEKDLSQAVGVAAMCLQEEASVRPYMSDAVVALGFLAEMPAGYKHKSGPILQMKQVGDPSRTGSTKQDKDAYNRQKAVAEAIEWGSLRQKQKAQNPEKKALSQGISPPEASRL

SEQ ID NO: 20205 - protein, 278 aa, Zea mays subsp. mays
  peptide (1)..(278): Ceres Seq. ID no. 12443275
MALGSLADHLLDSTPDQVPLSWYLRMKIAYGTAKGLEYLHEKANPPVIYRDLKSPNILLDEKYNPKLSDFGLAKLGPVEGKTHISTRVMGTYGYCAPEYIRTGQLTVKTDVYSFGVFLLELITGRRAVDTSRPASEQILVNWVKPMLRDRKRYNELVDPHLRGEYPEKDLSQAVGVAAMCLQEEASVRPYMSDAVVALGFLAEMPAGYKHKSGPILQMKQVGDPSRTGSTKQDKDAYNRQKAVAEAIEWGSLRQKQKAQNPEKKALSQGISPPEASRL

SEQ ID NO: 20206 - protein, 253 aa, Zea mays subsp. mays
  peptide (1)..(253): Ceres Seq. ID no. 12443276
MKIAYGTAKGLEYLHEKANPPVIYRDLKSPNILLDEKYNPKLSDFGLAKLGPVEGKTHISTRVMGTYGYCAPEYIRTGQLTVKTDVYSFGVFLLELITGRRAVDTSRPASEQILVNWVKPMLRDRKRYNELVDPHLRGEYPEKDLSQAVGVAAMCLQEEASVRPYMSDAVVALGFLAEMPAGYKHKSGPILQMKQVGDPSRTGSTKQDKDAYNRQKAVAEAIEWGSLRQKQKAQNPEKKALSQGISPPEASRL

SEQ ID NO: 20207 - DNA, 1782 bp, Zea mays subsp. mays
  misc_feature (1)..(1782): Ceres Seq. ID no. 12376897
  misc_feature (1)..(1782): Ortholog of  Ceres SEQ ID NO 15172124 as cited in SEQ ID NO 59754
gcacgagaccattacctagaacatcctaatcgaaaaatacgttcccacttctagcgcccccttgctccttcttccccgagccgcgtgcccgcgtcaagtaaccaaacctgtcataggctgatagctctcctctccactcctctttcctcgttgattcctcataccatctcctgcgccaccgacggcgaatccgcgtggcggcgccccgaatctgcgctctccgcgctcagatctcccgcctccgcgcttccggatgagccgcccccatttgcccaaggacccggccttcccgcgcaccaacgggtccttggacggcggggcccgcggccgcggcgagatcgaggaggttggcgctgcggccaccgtaggacgtcgaacagtcccccctgcagtcctcgtctccgtcggcatcgtcgccaccggcggcgatgtcatcgtgcgggcaatacatgctacaccgggtgcgcaagctggacaccctagcgggcgttgccatcaagtacggtgtcgaggtagccgacattaagaggctgaacggcctctcagctgacctccagatgtttgctcacaagacactgcagattccactcccggggaggcatcctccgtcatcataccagcagaatggctcatatgagagtgacgacagggaatgtactccacaccgcattcacgatgatatcttggattcaatattgaaaacaccaaagcccaaagtttcgccagctatgagtcttctgcagggatactatggccttgcaccacctccaaagagagatcaaacaagcgaaggcactgagatggcagtttacagtaaaggcaaatctgcttttctggatgttgagccgtggctggagccgccaaattccgacccattccctctccagaataggaaaaccaaaagcttgacgataggttctcttgatggtgatactgatgagaatggtgacagtgaaaggttcgtaaggcggcgccagaaagctgatggtgagctgttaccgagggaggaaaatggcggtgactttctggcaagcgccggaaaaggcttggcactgaggccaaagtctagcagtcgaccagacatgaacaagagccagcagaatctttttgcaatggcggagcctttgtttggcagcggcgtgcaaactgtaaggaaatcatccagcactccagagttccaggagccagagaccagcaccagttcatccatatggtcagcaagcaagtggagcataaatacagatgcttttgctcttcctctccccatccctcgttttgacaacattccgaagcccattgctgcttggagaaacaaggcggctcgcgattaataaactgctatataatcttggttatgtgcatgatttttcctgaactccaggaggcccagaacgtgtaattaggttggcaccagcctttacagctttggaagcagagcagagcagagcaggaccgtaattggctcctgcgagctagaacattctgaagatcagacgcatgtcgtccatgtttccagatggtatctagattaggtttacatgattctcatgttatattgggcatgttgcgccaagagtagcaacgttaatattcggtcatataaattatagatgctagatgacatagaggagacttgatatttgcggagggtattcttttgtacacaatgagataatgtagagcatcaaaggaatccacaatgagatatgtgttgtatgtgtgatcccatacccaaacatggaggaggattgctttatttaactacagattttgtttttcttc

SEQ ID NO: 20208 - protein, 300 aa, Zea mays subsp. mays
  peptide (1)..(300): Ceres Seq. ID no. 12376898
MSSCGQYMLHRVRKLDTLAGVAIKYGVEVADIKRLNGLSADLQMFAHKTLQIPLPGRHPPSSYQQNGSYESDDRECTPHRIHDDILDSILKTPKPKVSPAMSLLQGYYGLAPPPKRDQTSEGTEMAVYSKGKSAFLDVEPWLEPPNSDPFPLQNRKTKSLTIGSLDGDTDENGDSERFVRRRQKADGELLPREENGGDFLASAGKGLALRPKSSSRPDMNKSQQNLFAMAEPLFGSGVQTVRKSSSTPEFQEPETSTSSSIWSASKWSINTDAFALPLPIPRFDNIPKPIAAWRNKAARD

SEQ ID NO: 20209 - protein, 293 aa, Zea mays subsp. mays
  peptide (1)..(293): Ceres Seq. ID no. 12376899
MLHRVRKLDTLAGVAIKYGVEVADIKRLNGLSADLQMFAHKTLQIPLPGRHPPSSYQQNGSYESDDRECTPHRIHDDILDSILKTPKPKVSPAMSLLQGYYGLAPPPKRDQTSEGTEMAVYSKGKSAFLDVEPWLEPPNSDPFPLQNRKTKSLTIGSLDGDTDENGDSERFVRRRQKADGELLPREENGGDFLASAGKGLALRPKSSSRPDMNKSQQNLFAMAEPLFGSGVQTVRKSSSTPEFQEPETSTSSSIWSASKWSINTDAFALPLPIPRFDNIPKPIAAWRNKAARD

SEQ ID NO: 20210 - protein, 257 aa, Zea mays subsp. mays
  peptide (1)..(257): Ceres Seq. ID no. 12376900
MFAHKTLQIPLPGRHPPSSYQQNGSYESDDRECTPHRIHDDILDSILKTPKPKVSPAMSLLQGYYGLAPPPKRDQTSEGTEMAVYSKGKSAFLDVEPWLEPPNSDPFPLQNRKTKSLTIGSLDGDTDENGDSERFVRRRQKADGELLPREENGGDFLASAGKGLALRPKSSSRPDMNKSQQNLFAMAEPLFGSGVQTVRKSSSTPEFQEPETSTSSSIWSASKWSINTDAFALPLPIPRFDNIPKPIAAWRNKAARD

SEQ ID NO: 20211 - DNA, 1248 bp, Zea mays subsp. mays
  misc_feature (1)..(1248): Ceres Seq. ID no. 12390236
  misc_feature (1)..(1248): Ortholog of  Ceres SEQ ID NO 14308359 as cited in SEQ ID NO 55097
  misc_feature (1)..(1248): Ortholog of  Ceres SEQ ID NO 15169195 as cited in SEQ ID NO 55200
  misc_feature (1)..(1248): Ortholog of  Ceres SEQ ID NO 15226540 as cited in SEQ ID NO 58479
  misc_feature (1)..(1248): Ortholog of  Ceres SEQ ID NO 13581611 as cited in SEQ ID NO 59028
  misc_feature (1)..(1248): Ortholog of  Ceres SEQ ID NO 12590523 as cited in SEQ ID NO 0
  misc_feature (1)..(1248): Ortholog of  Ceres SEQ ID NO 14302142 as cited in SEQ ID NO 0
aatcgaaaagagctcacttcctcatctaatctacatgtctagaattatatgttgatggtttcttatggtattgactggctgtcttgtaattgctggctatagaatgcaggtgatcaacaaacagaaggttcatctcagccagaaaggaattcaatggaggaggggaacagaaagatttcgcccaaaatacaaagcaaggaagattcttctgatggtgatggtactaaagaggactatgttcatatccgggcaaagcgaggtcaagccactaacagccacagcctcgcagaaagactgaggagaaaaaagataagtgagagaatgaagcttcttcaagatcttgttcctggatgcagtaagatcactggcaaggcagtcatgctcgatgagattatcaactatgtacagtcattgcaacgacaagtggagttcttgtcaatgaaactttcaactgttaaccctgaacttggctttgacattgagcagatcatatccaaacaaatgatgctttcacaagacagacatcttgctttctatggagtcgatccaggatcaagcagccttactgctccattcaaccaaggaatcgtgcagccagcaatgatgtgcaacatttctaatcctgccgatgttttgcacggaactattcatgacgtgtcaacaatgaaccagataccttccatgtgggaaggacttcagagcatgcctcagatgaacttcaaccctggtgtggcagctgatagcggcaccaacaactctggctccatgaagatcgaacagtgagctgctgtatagtagcttcgaaattgttgtgtgaatcactgaatcatcgtaaagcgctctcgagatgaagctttttttgtatagctggaggcctgaccattatgctggattcctgcggttgctcccatactgtgcggcacattgtttatggtatggcatatggatcgtgtacagctggagctgaagaactgattccactgtaaatttctgttgtgctttggcctgcgaaaattgggatggaaacctagtagcatccatgaaattcaaggacagaagcttgttgggattgggacttgggaccacgtgctgaatactgatgggcctaaacgtactagacgagtactaatagaatcgtagttgtaggtaaaaaaatgcagagtttgaaaccagtggttttgtcagaaattccatggagtttgctatatttatttatgatatcaaaacagaaactgaatggccgctggc

SEQ ID NO: 20212 - protein, 209 aa, Zea mays subsp. mays
  peptide (1)..(209): Ceres Seq. ID no. 12390237
MEEGNRKISPKIQSKEDSSDGDGTKEDYVHIRAKRGQATNSHSLAERLRRKKISERMKLLQDLVPGCSKITGKAVMLDEIINYVQSLQRQVEFLSMKLSTVNPELGFDIEQIISKQMMLSQDRHLAFYGVDPGSSSLTAPFNQGIVQPAMMCNISNPADVLHGTIHDVSTMNQIPSMWEGLQSMPQMNFNPGVAADSGTNNSGSMKIEQ

SEQ ID NO: 20213 - protein, 153 aa, Zea mays subsp. mays
  peptide (1)..(153): Ceres Seq. ID no. 12390238
MKLLQDLVPGCSKITGKAVMLDEIINYVQSLQRQVEFLSMKLSTVNPELGFDIEQIISKQMMLSQDRHLAFYGVDPGSSSLTAPFNQGIVQPAMMCNISNPADVLHGTIHDVSTMNQIPSMWEGLQSMPQMNFNPGVAADSGTNNSGSMKIEQ

SEQ ID NO: 20214 - protein, 134 aa, Zea mays subsp. mays
  peptide (1)..(134): Ceres Seq. ID no. 12390239
MLDEIINYVQSLQRQVEFLSMKLSTVNPELGFDIEQIISKQMMLSQDRHLAFYGVDPGSSSLTAPFNQGIVQPAMMCNISNPADVLHGTIHDVSTMNQIPSMWEGLQSMPQMNFNPGVAADSGTNNSGSMKIEQ

SEQ ID NO: 20215 - DNA, 1656 bp, Zea mays subsp. mays
  misc_feature (1)..(1656): Ceres Seq. ID no. 12454875
  misc_feature (1)..(1656): Ortholog of  Ceres SEQ ID NO 13593889 as cited in SEQ ID NO 53305
  misc_feature (1)..(1656): Ortholog of  Ceres SEQ ID NO 13581959 as cited in SEQ ID NO 56156
  misc_feature (1)..(1656): Ortholog of  Ceres SEQ ID NO 15171809 as cited in SEQ ID NO 57329
atctcctctcctgccaggtcacggcctaattcgtggaattttgtttggtggtgcatatctccagtcaagtcttggccaagattttagctatctccggtcaaaaggctttaccgattcttggattggtggcttcttgggggcgagaagccggttcctgtttcgtctcttgtgctccagcatgttctgtagcacaccggttccccatctccagtgaaggtgttcgtgtgctcttggttttgtgcctcccggaatcgttcccggaaagctacttttggccgctgcggcgatggcgtcgagcaccagcgagatggccgaggggaaggagaagctgaagaggtccggcagcttgggaagcaacgatacgtatgtgcgtgcagacaagattgatcttacgagcctcgacatccagctggagaaccagctcaccaagacctggggcaaagccaatctcaaatcccaggggccaaaggaggagtgggagatcgaccttgcaaagctggagatccgctatgtcatcgctcaggggacgtatggcacggtctaccggggcacctacgatggacaggacgtcgcagtgaagcttttggattggggagaagatggttttgccacagaggctgaaactgctgctttacgaacatcatttaagacggaggttgctgtttggcataagctcagccaccctaatgttacaaagtttgttggtgcatctatggggaccacagaccttaagattccatcaaacaattccaatggtgctgcacgtacaaatttgccagcaagagcatgttgtgttgtggtagagtatcttgctggaggaactttgaagcaatatttgataaagaatagccgacggaagcttgcttataaagttgtggtccagcttgcattggatttggccagaggattgagctatctgcactccagaaagattgtacatcgggatgtgaaaagcgaaaacatgctgcttactccacagagaaaccttaagattgccgatttcggtgttgctcgtgttgaggctcagaatccaaaggacatgactggtgcaacaggcacacttggttatatggctccagaggttcttgatggtaagccatacaacaggaagtgtgatgtttatagttttggcatttgtttatgggaaatctattgctgtgacatgccttacccagacctaagttttgccgatgtctcatctgccgttgttcaccagaatttgcgcccagacattcctcgctgctgcccaagcgcatttgcgaatgttatgcggaaatgctgggatgcaaaccctgataaacgccctgatatggatgaagtggtgcagcttttagaggctctggacacgagcaaaggcggtggcatgatacctgatggccaatcatcaggatgcttatgcttcacaaaggctcgtggtccatagatacttttcatggtactcccttcccttggcaacactttccccgtgtaaatgactgggccacagcatgcttctctttgcacgacctgtgcagtcgtcgcttacagttctccatagctgccttgcgatcattgcgtgtcaacctgtagctctcatacgatttttgctgtcctctgtcgacaatcttttcatatactagtgtgctgctgtaattgtggttctaaaagagatttggc

SEQ ID NO: 20216 - protein, 378 aa, Zea mays subsp. mays
  peptide (1)..(378): Ceres Seq. ID no. 12454876
MASSTSEMAEGKEKLKRSGSLGSNDTYVRADKIDLTSLDIQLENQLTKTWGKANLKSQGPKEEWEIDLAKLEIRYVIAQGTYGTVYRGTYDGQDVAVKLLDWGEDGFATEAETAALRTSFKTEVAVWHKLSHPNVTKFVGASMGTTDLKIPSNNSNGAARTNLPARACCVVVEYLAGGTLKQYLIKNSRRKLAYKVVVQLALDLARGLSYLHSRKIVHRDVKSENMLLTPQRNLKIADFGVARVEAQNPKDMTGATGTLGYMAPEVLDGKPYNRKCDVYSFGICLWEIYCCDMPYPDLSFADVSSAVVHQNLRPDIPRCCPSAFANVMRKCWDANPDKRPDMDEVVQLLEALDTSKGGGMIPDGQSSGCLCFTKARGP

SEQ ID NO: 20217 - protein, 371 aa, Zea mays subsp. mays
  peptide (1)..(371): Ceres Seq. ID no. 12454877
MAEGKEKLKRSGSLGSNDTYVRADKIDLTSLDIQLENQLTKTWGKANLKSQGPKEEWEIDLAKLEIRYVIAQGTYGTVYRGTYDGQDVAVKLLDWGEDGFATEAETAALRTSFKTEVAVWHKLSHPNVTKFVGASMGTTDLKIPSNNSNGAARTNLPARACCVVVEYLAGGTLKQYLIKNSRRKLAYKVVVQLALDLARGLSYLHSRKIVHRDVKSENMLLTPQRNLKIADFGVARVEAQNPKDMTGATGTLGYMAPEVLDGKPYNRKCDVYSFGICLWEIYCCDMPYPDLSFADVSSAVVHQNLRPDIPRCCPSAFANVMRKCWDANPDKRPDMDEVVQLLEALDTSKGGGMIPDGQSSGCLCFTKARGP

SEQ ID NO: 20218 - protein, 236 aa, Zea mays subsp. mays
  peptide (1)..(236): Ceres Seq. ID no. 12454878
MGTTDLKIPSNNSNGAARTNLPARACCVVVEYLAGGTLKQYLIKNSRRKLAYKVVVQLALDLARGLSYLHSRKIVHRDVKSENMLLTPQRNLKIADFGVARVEAQNPKDMTGATGTLGYMAPEVLDGKPYNRKCDVYSFGICLWEIYCCDMPYPDLSFADVSSAVVHQNLRPDIPRCCPSAFANVMRKCWDANPDKRPDMDEVVQLLEALDTSKGGGMIPDGQSSGCLCFTKARGP

SEQ ID NO: 20219 - DNA, 427 bp, Zea mays subsp. mays
  misc_feature (1)..(427): Ceres Seq. ID no. 2788106
  misc_feature (1)..(427): Ortholog of  Ceres SEQ ID NO 14313449 as cited in SEQ ID NO 62735
gatcaagttcgcttctgccagtctgcctgcgtgctctgctggacagctggagagctagatggcgatgccgtccgggtggaggggtatcctgggcttccactacggcatcgtgcaggcgccgttgggccccgacatctccggccccgagctcgtcgccgccgtagcgaacgccggcgccatcggcctcctccgcctccccgactggccggcgccggatcacgtcagagaactgatccggaagaccaggagcctcacgtccaagccgttcggggcggccatcgtgctggccttcccgcacgaggagaatctcagggtcgtccctggaggagaagctcgccgtgctgcaggtctacyggggggacttccccaaccaccgggtccaaagaggcgcatcgcgcccggggttaaggtcttgcatcaggtcggc

SEQ ID NO: 20220 - protein, 135 aa, Zea mays subsp. mays
  peptide (1)..(135): Ceres Seq. ID no. 2788107
  misc_feature (118)..(118): Xaa is any aa, unknown or other
DQVRFCQSACVLCWTAGELDGDAVRVEGYPGLPLRHRAGAVGPRHLRPRARRRRSERRRHRPPPPPRLAGAGSRQRTDPEDQEPHVQAVRGGHRAGLPARGESQGRPWRRSSPCCRSXGGTSPTTGSKEAHRARG

SEQ ID NO: 20221 - protein, 123 aa, Zea mays subsp. mays
  peptide (1)..(123): Ceres Seq. ID no. 2788108
  misc_feature (99)..(99): Xaa is any aa, unknown or other
MAMPSGWRGILGFHYGIVQAPLGPDISGPELVAAVANAGAIGLLRLPDWPAPDHVRELIRKTRSLTSKPFGAAIVLAFPHEENLRVVPGGEARRAAGLXGGLPQPPGPKRRIAPGVKVLHQVG

SEQ ID NO: 20222 - protein, 121 aa, Zea mays subsp. mays
  peptide (1)..(121): Ceres Seq. ID no. 2788109
  misc_feature (97)..(97): Xaa is any aa, unknown or other
MPSGWRGILGFHYGIVQAPLGPDISGPELVAAVANAGAIGLLRLPDWPAPDHVRELIRKTRSLTSKPFGAAIVLAFPHEENLRVVPGGEARRAAGLXGGLPQPPGPKRRIAPGVKVLHQVG

SEQ ID NO: 20223 - DNA, 443 bp, Zea mays subsp. mays
  misc_feature (1)..(443): Ceres Seq. ID no. 2787343
  misc_feature (1)..(443): Ortholog of  Ceres SEQ ID NO 13662323 as cited in SEQ ID NO 68305
agagcccagcgtccgtctcttgctcatcagcatcagctagccacccgaccaggcttcagaaaacaaaaaaatgaagctctctgcggcagtcctctgcgcgcttgtggctgttcaggcggcggtgcttctcgccaccgtgccgacggcgcaggccagcgagctggaggtcgggtactacagcaagaaatgcaagggcgtggagaacgtggtgaagtggcacgtcatcaaggcgatcaaggccaaccgccgcaccggcgccgctctcgtccgccttatcttccatgactgcttcgtcaggggttgcgacggttctgtccttctggacgcttcctacgacaaccctcacccggagaaggaagcgccggtgaacatcgggctcgcagccttcgacgtactggangagatcaargccgctgtcgagaagagtgccccggcgtggtctc

SEQ ID NO: 20224 - protein, 124 aa, Zea mays subsp. mays
  peptide (1)..(124): Ceres Seq. ID no. 2787344
  misc_feature (110)..(110): Xaa is any aa, unknown or other
  misc_feature (113)..(113): Xaa is any aa, unknown or other
MKLSAAVLCALVAVQAAVLLATVPTAQASELEVGYYSKKCKGVENVVKWHVIKAIKANRRTGAALVRLIFHDCFVRGCDGSVLLDASYDNPHPEKEAPVNIGLAAFDVLXEIXAAVEKSAPAWS

SEQ ID NO: 20225 - protein, 94 aa, Zea mays subsp. mays
  peptide (1)..(94): Ceres Seq. ID no. 2787345
RAQRPSLAHQHQLATRPGFRKQKNEALCGSPLRACGCSGGGASRHRADGAGQRAGGRVLQQEMQGRGERGEVARHQGDQGQPPHRRRSRPPYLP

SEQ ID NO: 20226 - DNA, 1618 bp, Zea mays subsp. mays
  misc_feature (1)..(1618): Ceres Seq. ID no. 12380103
  misc_feature (1)..(1618): Ortholog of  Ceres SEQ ID NO 12609146 as cited in SEQ ID NO 52118
  misc_feature (1)..(1618): Ortholog of  Ceres SEQ ID NO 14303397 as cited in SEQ ID NO 54614
  misc_feature (1)..(1618): Ortholog of  Ceres SEQ ID NO 13594056 as cited in SEQ ID NO 55691
  misc_feature (1)..(1618): Ortholog of  Ceres SEQ ID NO 14314186 as cited in SEQ ID NO 57457
  misc_feature (1)..(1618): Ortholog of  Ceres SEQ ID NO 13638136 as cited in SEQ ID NO 58644
  misc_feature (1)..(1618): Ortholog of  Ceres SEQ ID NO 13596868 as cited in SEQ ID NO 62806
  misc_feature (1)..(1618): Ortholog of  Ceres SEQ ID NO 14301886 as cited in SEQ ID NO 64201
  misc_feature (1)..(1618): Ortholog of  Ceres SEQ ID NO 13595885 as cited in SEQ ID NO 69265
  misc_feature (1)..(1618): Ortholog of  Ceres SEQ ID NO 12566239 as cited in SEQ ID NO 0
  misc_feature (1)..(1618): Ortholog of  Ceres SEQ ID NO 13599119 as cited in SEQ ID NO 0
  misc_feature (1)..(1618): Ortholog of  Ceres SEQ ID NO 14308987 as cited in SEQ ID NO 0
ataaaaaaatggcgaaatgaaattcacggtaccagggtcaaccgagcacggacgcgtaaagccaacaaggggggaccgggggagcacgaggaaaccgaggagactgacccaacccgtgcttgcggcggcgctgcgctggtgccggccacggccatgatcggcggcgggcgggcagcggatagccacccggcgtcctgctcgtcctcgtcctcgtcttcctcctcgccgtcaggcccgtcgacggggggctcccgccttcaccgcagcaagaggcgtcccgacatcctcaacatgctcatgagtgcagcatgtctcagttcatcatcttctgatactggaaaaggacaaagcaagttttcaagcaacaaagtaacacacggatttcacttagtggaaggaagatctggccatgatatggaagactaccatgtagcagagtatagatatgaaaatgatcacgaacttggtctttttgctatttatgatggacatctgggagatagtgtggccagttatttgaaagctaatctttttgacaacatactgaaagagcctctcttttggtcagaccctcaagaagcaattaaaaacgcatacagctctacaaacaaatatattctggaaaacactaggcaactaggaccaggggggtcaacagcagtcactgctattgtagttgatggtacagatatgtggattgcaaatgtaggtgattcaagagctgttttgtctgaaactggtactgccagccaggttactgttgatcacgaacctcataccactaatgaacgaaagaggatagaagaaaaaggtggttttgtctctacgttccccggtaagcatctagttgcctagctctcaggtcattgttctctccaatagctatggaatttgtcccaatgcattttctagttgctgataggtgacgttcctcgtgtaaacggccaacttgcggttgcaagagcatttggtgatcagagcctcaaggcacacttgagctcagagcctgatgttaagcatataaagataaattcaagcacagagtttgtcatacttgccagtgacgggttatggaaggtatgtgtcttccttgcgtatttcactttacgttgccgtcgccttccctatatagttcaagatttcgatatccaatctgaatcgttttctcttagttctctcttttctcgttgttcatattcactcttttaccctgtttctggtgaaggtaatgaagaaccaggaagccgttgatctggtgaagtcaaccaaggacccgcaaacagcggcgaagcgactgacgtccgaggccctgggaaggatgagcaaggacgatatctcatgcattgtcatccgttttcgatgctgactcttgggtaatccagctcatccattgccctaagctgcctgtgtgcatcagcagaactgtttcctccgtatcgtagctggtagcgtctggatctgtttgcagctcaggatcagattggtgattggactggacaggttattgaccaaagaatagaagaatgctgggtttgggtgttttcagcgtctgcaggctgttctttttttcttcttctgtgcatatatacacgttggaatcaaatatataccgtcggac

SEQ ID NO: 20227 - protein, 284 aa, Zea mays subsp. mays
  peptide (1)..(284): Ceres Seq. ID no. 12380104
IKKWRNEIHGTRVNRARTRKANKGGPGEHEETEETDPTRACGGAALVPATAMIGGGRAADSHPASCSSSSSSSSSPSGPSTGGSRLHRSKRRPDILNMLMSAACLSSSSSDTGKGQSKFSSNKVTHGFHLVEGRSGHDMEDYHVAEYRYENDHELGLFAIYDGHLGDSVASYLKANLFDNILKEPLFWSDPQEAIKNAYSSTNKYILENTRQLGPGGSTAVTAIVVDGTDMWIANVGDSRAVLSETGTASQVTVDHEPHTTNERKRIEEKGGFVSTFPGKHLVA

SEQ ID NO: 20228 - protein, 233 aa, Zea mays subsp. mays
  peptide (1)..(233): Ceres Seq. ID no. 12380105
MIGGGRAADSHPASCSSSSSSSSSPSGPSTGGSRLHRSKRRPDILNMLMSAACLSSSSSDTGKGQSKFSSNKVTHGFHLVEGRSGHDMEDYHVAEYRYENDHELGLFAIYDGHLGDSVASYLKANLFDNILKEPLFWSDPQEAIKNAYSSTNKYILENTRQLGPGGSTAVTAIVVDGTDMWIANVGDSRAVLSETGTASQVTVDHEPHTTNERKRIEEKGGFVSTFPGKHLVA

SEQ ID NO: 20229 - protein, 187 aa, Zea mays subsp. mays
  peptide (1)..(187): Ceres Seq. ID no. 12380106
MLMSAACLSSSSSDTGKGQSKFSSNKVTHGFHLVEGRSGHDMEDYHVAEYRYENDHELGLFAIYDGHLGDSVASYLKANLFDNILKEPLFWSDPQEAIKNAYSSTNKYILENTRQLGPGGSTAVTAIVVDGTDMWIANVGDSRAVLSETGTASQVTVDHEPHTTNERKRIEEKGGFVSTFPGKHLVA

SEQ ID NO: 20230 - DNA, 1777 bp, Zea mays subsp. mays
  misc_feature (1)..(1777): Ceres Seq. ID no. 12384320
  misc_feature (1)..(1777): Ortholog of  Ceres SEQ ID NO 13584620 as cited in SEQ ID NO 65238
gcacgagaccattacctagaacatcctaatcaaaaaaagcaaaaacatattcctgtaataatagactgcctactccgtcttcctccgtatctctccctctctctgcttcctgtgtgcttctgttctgttagataggttaacatttggtatcagaagtccgtcgatccttggatctcgcatggcgaccacaggcgcagttgatgcccagctcaccctcgcgttggaatctcaaacgcgctccctgctgtctgaattggacaagcgcatccatgccatcgactccaagtgggcaaaccgcgtgggaatcctggagactcaagtggccgattccaccaggcgtttggagtcgttctccagggggatccatgaagacctggaggcccgtttggtgacagccgatgaagctgtggatgatcggatccgctatctggaggcgagtacgatctcccgtgtcgcggcgctcgagtcgtcttctcaagccgttgagctctggcggccccaaatcgatgcgtcgattgacgggctctatgccaacatccagacgattcgcgccgacatcgcgcagatcgtgacccaacaacctcccaacagccgttccggcgggttcggcgcagccggcatcctcggaacccccagatcggtgattgggcgttcccctgctaccttcgacaacaccgattgctcacgttttgggcccggcgctgcaatttttcaccgggacagtggtattgggtataatcaacccaatttccgctgcccggtcacgggtgcgtggaacaatccttctccttcgtttacgtttcctactcagtatgatcatagtggccatgttcccttgcaccgtcagttaggggatttgcccaagctttcatttcccaagtttgacggtactagcccaaaattatggcagaaacgatgcgaggattattttgctatgtatgccactgaaatcactgtttgggtcagagtagcgtccatgcactttgagggggttgctgggtgttggtttcagtctattgaaccacaagtgtcttcctggtcatggcaacagttttgtcaagctgtgcacgatcgttttgggcgtgaacaacacgagcttgttattcgcaagctgttccatatccgtcagacatcttcggtccaggattatgttgatcgtttttgtgaacttattgatgtccttgtcacctatgagcacactacagatcctttgtattataccatgaaattcattgatggcctccgtgacgatattaaatctgttatattggttcaacgccccagcactttggatggatactgcctgcgctcttgctttgttacaggaagaggcagattcatcccggcgtcgttagcatcgtgggtcggagggtgcgttcccagggcgttcatatccgaagttacctgctcctcctcctcctaggtgggataaatcgctgggaggggaaactgtcgccaccaagcctgtggtccctcagccgggttcttctactgacaagctcgcatcccttcgtgcttatcgtcatgcctgaggtctgtgtcaatattgcgctgaaaaatgggacaagggtcacaagtgcgctcagacagttcagctgcatgctatccaggaagtatgggatctgttgaatccggaactcaccggatcagaaggtgatttcgaagattccacggatcagttcatgatgttattgtcccgagaggccagttctccaaaaactgcatattctacgttcaaacttcaagggtatatccaaggaattccactgatgatttt

SEQ ID NO: 20231 - protein, 414 aa, Zea mays subsp. mays
  peptide (1)..(414): Ceres Seq. ID no. 12384321
MATTGAVDAQLTLALESQTRSLLSELDKRIHAIDSKWANRVGILETQVADSTRRLESFSRGIHEDLEARLVTADEAVDDRIRYLEASTISRVAALESSSQAVELWRPQIDASIDGLYANIQTIRADIAQIVTQQPPNSRSGGFGAAGILGTPRSVIGRSPATFDNTDCSRFGPGAAIFHRDSGIGYNQPNFRCPVTGAWNNPSPSFTFPTQYDHSGHVPLHRQLGDLPKLSFPKFDGTSPKLWQKRCEDYFAMYATEITVWVRVASMHFEGVAGCWFQSIEPQVSSWSWQQFCQAVHDRFGREQHELVIRKLFHIRQTSSVQDYVDRFCELIDVLVTYEHTTDPLYYTMKFIDGLRDDIKSVILVQRPSTLDGYCLRSCFVTGRGRFIPASLASWVGGCVPRAFISEVTCSSSS

SEQ ID NO: 20232 - DNA, 1444 bp, Zea mays subsp. mays
  misc_feature (1)..(1444): Ceres Seq. ID no. 12391561
  misc_feature (1)..(1444): Ortholog of  Ceres SEQ ID NO 13654722 as cited in SEQ ID NO 62078
  misc_feature (1)..(1444): Ortholog of  Ceres SEQ ID NO 14302852 as cited in SEQ ID NO 64814
  misc_feature (1)..(1444): Ortholog of  Ceres SEQ ID NO 13598593 as cited in SEQ ID NO 64978
  misc_feature (1)..(1444): Ortholog of  Ceres SEQ ID NO 14303067 as cited in SEQ ID NO 67078
  misc_feature (1)..(1444): Ortholog of  Ceres SEQ ID NO 13595992 as cited in SEQ ID NO 68401
atatagtgtgtcactttgtcccctcctacgcgacttcccctccaattcaggcgctctctctctcgatccatgcatctcaactcaaaggcattcaattaattaattatactagctagctaggaggaggagtactccggccggccggccggcgcccataagaacctctcgtgttgtgtatgcatcgatcgatcgatcgatcgatctccgactccgacgacctcgctatccgccatggctagcagcagcagtcttgtcaagtgcctggcggtcacggtggcggtggcgctcctggcgctgtcgtcgtgtggcgtggttgcctcggcggcggcgtggaggggcaagcctcagaagttgaagcccggggagaagccctccggcaaatccaagttcttcgccctcacccccggaatgttcggccacaagcgcgactaccaggccgcctgctccgacgagggtggcccggcatgctacgtgggttgcccaaaggattgccctaacaaatgcctcgtcttctgcgcctactgcctcagcttctgcatgtgtgatatcttccccggcacctcctgcggcgacccgcgcttcaccggcggcgacggcaacaccttctacttccatggaaacaaggacaaggacttctgcctcgtctccgacgcgggcctccacatcaacgcccacttcatcggcaaccacaacccggccctcaaccgcgacttcacgtgggtgcaggcgctgggggtcaccttcgtcgcaccaggcggcgccggcgaccgccaccgcctctacgtcggcgcccgcagggccgcggagtgggacgaggaggacgaccacatccagctcaccttggacgccgagcccgtcgacgtcgacgccgtcaagaacgcgcgctgggcgtccaaggccctcccggggctctccgtcacgcgcatggacgccgtcaacaccgtcatggtggagctggacggcgtcttcgccatctccgccaacgccgtgcccatcaccgacagggacgaccggatccacggctacggcaagacgggcgccgacagcctcgtgcacctcgacctggccttccagttccataacctcaccgcggacgtccacggcgtcctgggccagacctaccgccctggctacgtcagcaagctcgacatcggcgccaagatgcccgtcatgggcggcgcgcccaagtacctgtccgccggtctcttctccacggactgcgccgtctcccggttccactctttcgcctccgcctaatactaagtcccaagcgcgaccgatcctattcctatccacggcgtgaaataagatttctgtatgtaggctcttatctcatctcatcgtatgaaaatgtacacgtgcgttgctgcattggaagtacgtattgttgcacgatcaactgaataacttgcgtctcgaaaattttatgcactagtacgttcgc

SEQ ID NO: 20233 - protein, 341 aa, Zea mays subsp. mays
  peptide (1)..(341): Ceres Seq. ID no. 12391562
MASSSSLVKCLAVTVAVALLALSSCGVVASAAAWRGKPQKLKPGEKPSGKSKFFALTPGMFGHKRDYQAACSDEGGPACYVGCPKDCPNKCLVFCAYCLSFCMCDIFPGTSCGDPRFTGGDGNTFYFHGNKDKDFCLVSDAGLHINAHFIGNHNPALNRDFTWVQALGVTFVAPGGAGDRHRLYVGARRAAEWDEEDDHIQLTLDAEPVDVDAVKNARWASKALPGLSVTRMDAVNTVMVELDGVFAISANAVPITDRDDRIHGYGKTGADSLVHLDLAFQFHNLTADVHGVLGQTYRPGYVSKLDIGAKMPVMGGAPKYLSAGLFSTDCAVSRFHSFASA

SEQ ID NO: 20234 - protein, 282 aa, Zea mays subsp. mays
  peptide (1)..(282): Ceres Seq. ID no. 12391563
MFGHKRDYQAACSDEGGPACYVGCPKDCPNKCLVFCAYCLSFCMCDIFPGTSCGDPRFTGGDGNTFYFHGNKDKDFCLVSDAGLHINAHFIGNHNPALNRDFTWVQALGVTFVAPGGAGDRHRLYVGARRAAEWDEEDDHIQLTLDAEPVDVDAVKNARWASKALPGLSVTRMDAVNTVMVELDGVFAISANAVPITDRDDRIHGYGKTGADSLVHLDLAFQFHNLTADVHGVLGQTYRPGYVSKLDIGAKMPVMGGAPKYLSAGLFSTDCAVSRFHSFASA

SEQ ID NO: 20235 - protein, 239 aa, Zea mays subsp. mays
  peptide (1)..(239): Ceres Seq. ID no. 12391564
MCDIFPGTSCGDPRFTGGDGNTFYFHGNKDKDFCLVSDAGLHINAHFIGNHNPALNRDFTWVQALGVTFVAPGGAGDRHRLYVGARRAAEWDEEDDHIQLTLDAEPVDVDAVKNARWASKALPGLSVTRMDAVNTVMVELDGVFAISANAVPITDRDDRIHGYGKTGADSLVHLDLAFQFHNLTADVHGVLGQTYRPGYVSKLDIGAKMPVMGGAPKYLSAGLFSTDCAVSRFHSFASA

SEQ ID NO: 20236 - DNA, 1318 bp, Zea mays subsp. mays
  misc_feature (1)..(1318): Ceres Seq. ID no. 12454822
  misc_feature (1)..(1318): Ortholog of  Ceres SEQ ID NO 13581579 as cited in SEQ ID NO 58361
  misc_feature (1)..(1318): Ortholog of  Ceres SEQ ID NO 13596969 as cited in SEQ ID NO 63375
  misc_feature (1)..(1318): Ortholog of  Ceres SEQ ID NO 13584480 as cited in SEQ ID NO 64751
  misc_feature (1)..(1318): Ortholog of  Ceres SEQ ID NO 13597870 as cited in SEQ ID NO 64982
  misc_feature (1)..(1318): Ortholog of  Ceres SEQ ID NO 13595926 as cited in SEQ ID NO 67778
  misc_feature (1)..(1318): Ortholog of  Ceres SEQ ID NO 13596362 as cited in SEQ ID NO 67877
  misc_feature (1)..(1318): Ortholog of  Ceres SEQ ID NO 12567001 as cited in SEQ ID NO 0
gcacgagaccattacctagaacatcctaatcgaaaaagacacagatagctagaacacgagcagaggatggctaggcctaggccgtcggtcgtcgtcctcgcggtggccgtcgccgtcgccgtggcgtccctcgcgcagcccggcgcggccgacctgaagctggactactacgcgagcacctgccccaacgcggaggccatcgtgcgcggcgtggtgcagcagcgactgcaggccaccatccgggccgtcggctccaccgtccgcctcttcttccacgactgcttcgtcgagggttgcgacggctcggtgctgatcgaatccacgcccggcaaccaggccgagaaggacgcctccgacaacaagtccctcgcgtccgaaggcttcgacaccgtgcggagcgccaaggccgccgtcgaggccgcctgcccggacacggtctcctgcgccgacgtgctcgccattgccgctcgggacgccatctccatgagtggcgggcctttcttcccagtggagctgggcaggctggacggcctgagctccaccgccagcagcgtgccaggccagctgcccgaggccaaccagaccatggaccagctgctggcagtcttcaaggcacacgggctcaacatgtcacgacctcgtcgcgctctcagcggcgcacagcgtggggctggcgcactgcagcaagttcgcgagccggctgtacagctaccagctgccggggcagccgacggacccgacgctgaaccccaagtacgcgcggttcctggagagcaagtgccccgacggcgggcccgacaacctggtgctcatggaccaggcctcgccggcgcagttcgacaaccagtactaccgcaacctccaggacggcggcgggctgctgggctccgaccagctgctctacaccgacaaccggacgcgccccatggtggactcgctggccaacagcaccgccgccttctaccgcgccttagccgacgccgtcgtccggctcggccgcgtcggggtcaagtccggcaggcggggcaacgtccgcaagcagtgcgacgtgttcaactgacagggaaatcgtgttcaacctccggaagattcatttgatttgggtgttttgcttgtaatgcagctgttctctttgattcgttgcatagcacgcggttgctgattcttaaacttgtgtgtggtaattattcagcaattagttgttctacaaagtggtgaataatggttctgcctgctttgtcatagagtaaaaccccaaatagcagccaaaattagatcatacatagatacagttgatttcactgtaatttgaatactc

SEQ ID NO: 20237 - protein, 343 aa, Zea mays subsp. mays
  peptide (1)..(343): Ceres Seq. ID no. 12454823
MARPRPSVVVLAVAVAVAVASLAQPGAADLKLDYYASTCPNAEAIVRGVVQQRLQATIRAVGSTVRLFFHDCFVEGCDGSVLIESTPGNQAEKDASDNKSLASEGFDTVRSAKAAVEAACPDTVSCADVLAIAARDAISMSGGPFFPVELGRLDGLSSTASSVPGQLPEANQTMDQLLAVFKAHGLNMSRPRRALSGAQRGAGALQQVREPAVQLPAAGAADGPDAEPQVRAVPGEQVPRRRARQPGAHGPGLAGAVRQPVLPQPPGRRRAAGLRPAALHRQPDAPHGGLAGQQHRRLLPRLSRRRRPARPRRGQVRQAGQRPQAVRRVQLTGKSCSTSGRFI

SEQ ID NO: 20238 - protein, 204 aa, Zea mays subsp. mays
  peptide (1)..(204): Ceres Seq. ID no. 12454824
MSGGPFFPVELGRLDGLSSTASSVPGQLPEANQTMDQLLAVFKAHGLNMSRPRRALSGAQRGAGALQQVREPAVQLPAAGAADGPDAEPQVRAVPGEQVPRRRARQPGAHGPGLAGAVRQPVLPQPPGRRRAAGLRPAALHRQPDAPHGGLAGQQHRRLLPRLSRRRRPARPRRGQVRQAGQRPQAVRRVQLTGKSCSTSGRFI

SEQ ID NO: 20239 - DNA, 1608 bp, Zea mays subsp. mays
  misc_feature (1)..(1608): Ceres Seq. ID no. 12589090
  misc_feature (1)..(1608): Ortholog of  Ceres SEQ ID NO 13654166 as cited in SEQ ID NO 68381
  misc_feature (1)..(1608): Ortholog of  Ceres SEQ ID NO 13599720 as cited in SEQ ID NO 0
ctattcattcatccggccaccaccgctctaactactcttcaagagacgacgaccaacaggcacgtcgatcgtcttccggcgagggcgacggaaggatgtccggcggcgagagtggtccggcagcggcggcggcggccgttccgttgctgcaggcgccggaggggaggacgacgaagtactacgagggatgccccgggtgccggctggacgaggccaacaagactaggaccggcgtcccctacctcaatttcttctacatctgggtcgtctgcctcgccgccgcactgccggtccagtcactgttcccttatctatacttcatgatcagggacttgaaagtggcgaaagaggagcaagacattgggttttatgctggttttgttggggctacctatttccttggaagggccatcagcgctgtgccatggggcatgttcgctgacaagtatggaaggaagccatgcattgtgatcagcatcctctcagtgattgtgttcaacacactgtttggacttagcacaacttactgnntggcaattgtgactaggggattacttgggttgctatgtggcatacttggacccatcaaggcctatgcttcagaagtctgcaggaaagagcaccaagctctgggaatctctcttgttacatcttcacgagccatanctcttgttattgggcctgctattggaggcttccttgcacagcctgcacagaagtacccaaatcttttctctgaagagtccatatttggaaggtttccatacttccttccttgctttgtaatatcgttgctagcagcaggatcatgtattgcatgcatttggcttccggaaacgctacactttcatggtgatgacaaagtagaagctattgaagaactggaggcacaagttcgtggctccgaatctacaaaagatctgcataagaattggcaattgatgtcagcaataatcctctactgtgtcttttctatgcatgacacagcttatcttgaggtattttcactgtgggctgtgagcagtagaaaatttcgggggcttagtttgacatcccaggatgttggtactgtgctagccatctcaggttttggtgtacttgtataccaactcgctatttatccttttcttgcgaagtattttggaccaatcaagacatttcggcctgccgcgatcctgtcgatcattctcctcactacgtaccccttcatggccaatttacatggcctggagcttaaaatactcatcaacattgcatctgttttgaagaacatgtttgcggctaccatcactattgcctgcaacatcctacagaacactgcagtgacgcaagagcagagaggcgttgctaatggcatctctgttaccctgatgtccgtgttcaaatctgtagctccagcagcagcaggaattctgttctcgtgggctcagaagcacatcagcggactgttcttaccaggggatcagatcttgttcctagcgataaacatggtgtcggtgattggcctggtgctgacgttcaagccatttttctccctaccgaatccaacgaggcattcataaatctgtgtagatgaagcccgttcctgtgaattgtatcgatgcactg

SEQ ID NO: 20240 - protein, 519 aa, Zea mays subsp. mays
  peptide (1)..(519): Ceres Seq. ID no. 12589091
  misc_feature (176)..(176): Xaa is any aa, unknown or other
  misc_feature (177)..(177): Xaa is any aa, unknown or other
  misc_feature (222)..(222): Xaa is any aa, unknown or other
IHSSGHHRSNYSSRDDDQQARRSSSGEGDGRMSGGESGPAAAAAAVPLLQAPEGRTTKYYEGCPGCRLDEANKTRTGVPYLNFFYIWVVCLAAALPVQSLFPYLYFMIRDLKVAKEEQDIGFYAGFVGATYFLGRAISAVPWGMFADKYGRKPCIVISILSVIVFNTLFGLSTTYXXAIVTRGLLGLLCGILGPIKAYASEVCRKEHQALGISLVTSSRAIXLVIGPAIGGFLAQPAQKYPNLFSEESIFGRFPYFLPCFVISLLAAGSCIACIWLPETLHFHGDDKVEAIEELEAQVRGSESTKDLHKNWQLMSAIILYCVFSMHDTAYLEVFSLWAVSSRKFRGLSLTSQDVGTVLAISGFGVLVYQLAIYPFLAKYFGPIKTFRPAAILSIILLTTYPFMANLHGLELKILINIASVLKNMFAATITIACNILQNTAVTQEQRGVANGISVTLMSVFKSVAPAAAGILFSWAQKHISGLFLPGDQILFLAINMVSVIGLVLTFKPFFSLPNPTRHS

SEQ ID NO: 20241 - protein, 488 aa, Zea mays subsp. mays
  peptide (1)..(488): Ceres Seq. ID no. 12589092
  misc_feature (145)..(145): Xaa is any aa, unknown or other
  misc_feature (146)..(146): Xaa is any aa, unknown or other
  misc_feature (191)..(191): Xaa is any aa, unknown or other
MSGGESGPAAAAAAVPLLQAPEGRTTKYYEGCPGCRLDEANKTRTGVPYLNFFYIWVVCLAAALPVQSLFPYLYFMIRDLKVAKEEQDIGFYAGFVGATYFLGRAISAVPWGMFADKYGRKPCIVISILSVIVFNTLFGLSTTYXXAIVTRGLLGLLCGILGPIKAYASEVCRKEHQALGISLVTSSRAIXLVIGPAIGGFLAQPAQKYPNLFSEESIFGRFPYFLPCFVISLLAAGSCIACIWLPETLHFHGDDKVEAIEELEAQVRGSESTKDLHKNWQLMSAIILYCVFSMHDTAYLEVFSLWAVSSRKFRGLSLTSQDVGTVLAISGFGVLVYQLAIYPFLAKYFGPIKTFRPAAILSIILLTTYPFMANLHGLELKILINIASVLKNMFAATITIACNILQNTAVTQEQRGVANGISVTLMSVFKSVAPAAAGILFSWAQKHISGLFLPGDQILFLAINMVSVIGLVLTFKPFFSLPNPTRHS

SEQ ID NO: 20242 - protein, 413 aa, Zea mays subsp. mays
  peptide (1)..(413): Ceres Seq. ID no. 12589093
  misc_feature (70)..(70): Xaa is any aa, unknown or other
  misc_feature (71)..(71): Xaa is any aa, unknown or other
  misc_feature (116)..(116): Xaa is any aa, unknown or other
MIRDLKVAKEEQDIGFYAGFVGATYFLGRAISAVPWGMFADKYGRKPCIVISILSVIVFNTLFGLSTTYXXAIVTRGLLGLLCGILGPIKAYASEVCRKEHQALGISLVTSSRAIXLVIGPAIGGFLAQPAQKYPNLFSEESIFGRFPYFLPCFVISLLAAGSCIACIWLPETLHFHGDDKVEAIEELEAQVRGSESTKDLHKNWQLMSAIILYCVFSMHDTAYLEVFSLWAVSSRKFRGLSLTSQDVGTVLAISGFGVLVYQLAIYPFLAKYFGPIKTFRPAAILSIILLTTYPFMANLHGLELKILINIASVLKNMFAATITIACNILQNTAVTQEQRGVANGISVTLMSVFKSVAPAAAGILFSWAQKHISGLFLPGDQILFLAINMVSVIGLVLTFKPFFSLPNPTRHS

SEQ ID NO: 20243 - DNA, 1406 bp, Zea mays subsp. mays
  misc_feature (1)..(1406): Ceres Seq. ID no. 12424103
  misc_feature (1)..(1406): Ortholog of  Ceres SEQ ID NO 14311515 as cited in SEQ ID NO 51680
  misc_feature (1)..(1406): Ortholog of  Ceres SEQ ID NO 13582301 as cited in SEQ ID NO 56509
  misc_feature (1)..(1406): Ortholog of  Ceres SEQ ID NO 13595567 as cited in SEQ ID NO 56760
  misc_feature (1)..(1406): Ortholog of  Ceres SEQ ID NO 13597380 as cited in SEQ ID NO 64054
  misc_feature (1)..(1406): Ortholog of  Ceres SEQ ID NO 12625474 as cited in SEQ ID NO 64169
  misc_feature (1)..(1406): Ortholog of  Ceres SEQ ID NO 13597502 as cited in SEQ ID NO 64681
gcacgagaccattaccagaacatcctaatcgaaaaattgtccattttgcaccaccgatcgatcgagctctaggctctagctagcgcgctgcatatgtgaggcaacttttcatttatctgacacacgtacttacggcccacgatggccgccgccgccggcctcccgtggtggctgctgctcctcgccgtggtcccggccgtcaccgctgcggccaccgccggcggagaggggagggcgccggcgctgttcgtgttcggcgactcgctcatcgacagcggcaacaacaacaacctcgcatcgcttgccaaggccaactacttcccctacggcatcggacttcgccggcggccccaccggccgcttctgcaacggctacaccatcgtcgacgagctcgccgagctgcttggactgcccctggtgccaccctactctgaagcctcgtccgtgcagcatgtcctgcagggcgtcaactacccctctgccgccgccgggatcctcnacgacagtggcggcaactttgtcgggcggatcccattcaaccagcagatccagaacttngagacgaccgtggcgcggatcgccggcgcggcgggcgcggcggcggcggcggacctggtggcncgctccgtcctgttcgtggggatgggcagnaacgactacctcaacaactacctgatgcccaactacgacacgcggnggcggtaacggcccgcagcagttcgcggacctgctcgcgcggcagctggccgcgcagctggccaggctgcacggcgccgggggcaggcggttcgtggtggccggcgtggggtccgtgggctgcatcccgagcgtgcgcgcgcagagcctcgcggggcggtgctcgcgcgcggtggacgacctcgtgctccccttcaacgccaacgtgcgggcgctggtcgaccgcctcaacggcaacgctgccgccggccttcccggcgccagcctcacgtacctcgacaacttcgcggtgttcagggccatcctcaccgacccggccgcgttcggcttcgccgtcgtcgaccgcgggtgctgcggcatcggcaggaacgccgggcaggtcacctgcntgcccttcatgccgccgtgcgaccacagggagcgctacgtgttctgggacgcataccaccccacggcggccgtcaacgtcatcgtcgccagggtggggttccacnncggcgctgacgtngtntngcccgtcaacgtccgtgagcttgccggcatgtgacaagatgatcggagcggacatatatnctcctatatatagcaataataatttgtttggtgaattattgtatcagtagattttgtgctacaagcctccatccacaaaccatgcatgtagtagttatttgttactccgatctatttataaattcgctttgcactg

SEQ ID NO: 20244 - protein, 97 aa, Zea mays subsp. mays
  peptide (1)..(97): Ceres Seq. ID no. 12424104
MAAAAGLPWWLLLLAVVPAVTAAATAGGEGRAPALFVFGDSLIDSGNNNNLASLAKANYFPYGIGLRRRPHRPLLQRLHHRRRARRAAWTAPGATLL

SEQ ID NO: 20245 - protein, 74 aa, Zea mays subsp. mays
  peptide (1)..(74): Ceres Seq. ID no. 12424105
  misc_feature (16)..(16): Xaa is any aa, unknown or other
  misc_feature (36)..(36): Xaa is any aa, unknown or other
  misc_feature (57)..(57): Xaa is any aa, unknown or other
  misc_feature (67)..(67): Xaa is any aa, unknown or other
MSCRASTTPLPPPGSXTTVAATLSGGSHSTSRSRTXRRPWRGSPARRARRRRRTWWXAPSCSWGWAXTTTSTTT

SEQ ID NO: 20246 - protein, 49 aa, Zea mays subsp. mays
  peptide (1)..(49): Ceres Seq. ID no. 12424106
  misc_feature (33)..(33): Xaa is any aa, unknown or other
  misc_feature (37)..(37): Xaa is any aa, unknown or other
  misc_feature (38)..(38): Xaa is any aa, unknown or other
  misc_feature (39)..(39): Xaa is any aa, unknown or other
MPPCDHRERYVFWDAYHPTAAVNVIVARVGFHXGADXXXPVNVRELAGM

SEQ ID NO: 20247 - DNA, 1156 bp, Zea mays subsp. mays; identical to SEQ ID NO: 13035
  misc_feature (1)..(1156): Ceres Seq. ID no. 12364587
  misc_feature (1)..(1156): Ortholog of  Ceres SEQ ID NO 13594298 as cited in SEQ ID NO 57803
  misc_feature (1)..(1156): Ortholog of  Ceres SEQ ID NO 13503476 as cited in SEQ ID NO 61978
  misc_feature (1)..(1156): Ortholog of  Ceres SEQ ID NO 12578438 as cited in SEQ ID NO 62201
  misc_feature (1)..(1156): Ortholog of  Ceres SEQ ID NO 12617675 as cited in SEQ ID NO 64656

SEQ ID NO: 20248 - protein, 319 aa, Zea mays subsp. mays; identical to SEQ ID NO: 13036
  peptide (1)..(319): Ceres Seq. ID no. 12364588

SEQ ID NO: 20249 - protein, 297 aa, Zea mays subsp. mays; identical to SEQ ID NO: 13037
  peptide (1)..(297): Ceres Seq. ID no. 12364589

SEQ ID NO: 20250 - protein, 295 aa, Zea mays subsp. mays; identical to SEQ ID NO: 13038
  peptide (1)..(295): Ceres Seq. ID no. 12364590

SEQ ID NO: 20251 - DNA, 461 bp, Zea mays subsp. mays
  misc_feature (1)..(461): Ceres Seq. ID no. 2787617
  misc_feature (1)..(461): Ortholog of  Ceres SEQ ID NO 13597747 as cited in SEQ ID NO 69071
gaaacaaattgcgcattttcttctcctgcggtccttccttcgcttccccgttcttccagaatcctgtcgagacctgaatccaccctcacccagcggtccccatggcctccggcgaaggtgtagctaccagctgcacgatctaagcgaggtggagatcccacccacgctggaggaggtcgacctcaccgccaaccgcctctcttctgttgatcctcgcatcggccaactcccccatctccgcaagctctcattccgccagaacctcctcgacgatgacgccgtcgcgccactcacgtcctgggaggctattgccgggttgaaggagttcgtccttagagataacaaacttacaaggattcctgatgctggcatattcaaggatcttctggtgttcgatgtatctttcaatgagatatcttctttgactggtctgtccaaggtttccatcaaattgaaggaac

SEQ ID NO: 20252 - protein, 153 aa, Zea mays subsp. mays
  peptide (1)..(153): Ceres Seq. ID no. 2787618
KQIAHFLLLRSFLRFPVLPESCRDLNPPSPSGPHGLRRRCSYQLHDLSEVEIPPTLEEVDLTANRLSSVDPRIGQLPHLRKLSFRQNLLDDDAVAPLTSWEAIAGLKEFVLRDNKLTRIPDAGIFKDLLVFDVSFNEISSLTGLSKVSIKLKE

SEQ ID NO: 20253 - DNA, 814 bp, Zea mays subsp. mays; identical to SEQ ID NO: 14542
  misc_feature (1)..(814): Ceres Seq. ID no. 12544477
  misc_feature (1)..(814): Ortholog of  Ceres SEQ ID NO 13575779 as cited in SEQ ID NO 20515

SEQ ID NO: 20254 - protein, 164 aa, Zea mays subsp. mays; identical to SEQ ID NO: 14543
  peptide (1)..(164): Ceres Seq. ID no. 12544478

SEQ ID NO: 20255 - protein, 113 aa, Zea mays subsp. mays; identical to SEQ ID NO: 14544
  peptide (1)..(113): Ceres Seq. ID no. 12544479

SEQ ID NO: 20256 - DNA, 1837 bp, Zea mays subsp. mays
  misc_feature (1)..(1837): Ceres Seq. ID no. 12435551
  misc_feature (1)..(1837): Ortholog of  Ceres SEQ ID NO 14308359 as cited in SEQ ID NO 55097
  misc_feature (1)..(1837): Ortholog of  Ceres SEQ ID NO 15169195 as cited in SEQ ID NO 55200
  misc_feature (1)..(1837): Ortholog of  Ceres SEQ ID NO 15226540 as cited in SEQ ID NO 58479
  misc_feature (1)..(1837): Ortholog of  Ceres SEQ ID NO 13581611 as cited in SEQ ID NO 59028
  misc_feature (1)..(1837): Ortholog of  Ceres SEQ ID NO 13596689 as cited in SEQ ID NO 62728
  misc_feature (1)..(1837): Ortholog of  Ceres SEQ ID NO 14301693 as cited in SEQ ID NO 69246
agtctctaggctctggagacctcgcgcaccatcccaccagcagcaagcgcccactaattccgcaccacaacgcgcactctccggcaccaccgccgtcctcgcgacgtcacatagtacgcattacgcactcgcgcgcgcgcgtgcgcgtacatttacgcagcgatgagctcgagaacgcaccacccctgctttgcgtctgtggagtcatgggagcaagcggcgatggcgcacgacggcttcctcggcgatcttgcctgcccgctcccgctcgctcacgctgcaaccgcggcgccgttcgacccgctgcgggtacatgtggcgcacgcgctcacgggcgccggcgcggggtgggaacacgacgccgcgacgggcgcgctcgtgccgtcgcggccgcgaccgctgtcgccgtcctcgctcgcggcggccaccgccgtagtagttggaggaggaggagacgccgtggaggccgcgctgatggagcagcttgcgagcaggctcggcgtcagcgtgccttcgccgccgccatcgcggtacgcgtcctgccacggcacgccggcgggctccccctccaagtcggcggcgccgtgggtgctggccggggacgcggcgcctgcggagcgcgccacagggctcccgtgcttcccggcctcctgtggggagctctcgcgcgtgcccagctgccagtcgtcgcttctcggcgagcacgcaccgactccggcgcccgcgccgttgcctggcgctgccaaacagcacgcgagcgacgggtcgtgcagcgatggcccctgccggaagcggaaggcgtcgggcggcaaggccaaggacgtggtcaccacggccacacccaagtcccgggagccggagacgatggccaagagacgcaagctctcgacagacgccgcccgcgacgaggctgggtcgcacgggaacggcaaggggaaggaggtggcgccggcggcagagccagagccacagccacccaaggactacatccacgtgcgagcgcggaggggccaggccaccgacagccacagcctcgccgagcgggtgaggagggaaaagatcagcgaacgcatgaagctgctgcaggacctcgtgccaggctgcagcaaggttaccgggaaggccgtgatgctggacgagatcataaactacgtacagtcgctgcagtgccaggtggagttcctgtcgatgaagctgtcgacggtcgacccgcgccgggagctcgacgtgggctgcttcgtcgtccccaaagacgacgtaacgatgcaggccaacaggctgtgcgcgcccgcgacgtcgtcgtcgagctcagccttctgctacgccgcgcggagtgttgttacgaacgccaaaggattcgagacgccgctgcccttggcgaaccatggcgtcgcggcggacgacaggccacttgagcggcggactcgagacgcaggtccccaggcggggagcttgtgggaagaggacgatctgcagagcctggtcctgatgggattccggggccgttgatcgttgacgctctgattaggctaggccgctagggacgacagttcgtttccaccgaccgccaaccaaagcgagagttgcagggccacgtaacagcagggttgggctccaatcattgggaactctccatgattgtacacagacaggacgcttacacgctaatttccagctcggcggaggccaagaaacgaaacaaaaaaaaaaggcgaaaagaagatgtttttttctcgcattccccctcacgaatttgcagtttaatcgatgtaagataactcaatgtaattattaatggtatttgagtcttatagacatcaagttgatgaaattttat

SEQ ID NO: 20257 - protein, 470 aa, Zea mays subsp. mays
  peptide (1)..(470): Ceres Seq. ID no. 12435552
SLGSGDLAHHPTSSKRPLIPHHNAHSPAPPPSSRRHIVRITHSRARVRVHLRSDELENAPPLLCVCGVMGASGDGARRLPRRSCLPAPARSRCNRGAVRPAAGTCGARAHGRRRGVGTRRRDGRARAVAAATAVAVLARGGHRRSSWRRRRRRGGRADGAACEQARRQRAFAAAIAVRVLPRHAGGLPLQVGGAVGAGRGRGACGARHRAPVLPGLLWGALARAQLPVVASRRARTDSGARAVAWRCQTARERRVVQRWPLPEAEGVGRQGQGRGHHGHTQVPGAGDDGQETQALDRRRPRRGWVARERQGEGGGAGGRARATATQGLHPRASAEGPGHRQPQPRRAGEEGKDQRTHEAAAGPRARLQQGYREGRDAGRDHKLRTVAAVPGGVPVDEAVDGRPAPGARRGLLRRPQRRRNDAGQQAVRARDVVVELSLLLRRAECCYERQRIRDAAALGEPWRRGGRQAT

SEQ ID NO: 20258 - protein, 448 aa, Zea mays subsp. mays
  peptide (1)..(448): Ceres Seq. ID no. 12435553
MSSRTHHPCFASVESWEQAAMAHDGFLGDLACPLPLAHAATAAPFDPLRVHVAHALTGAGAGWEHDAATGALVPSRPRPLSPSSLAAATAVVVGGGGDAVEAALMEQLASRLGVSVPSPPPSRYASCHGTPAGSPSKSAAPWVLAGDAAPAERATGLPCFPASCGELSRVPSCQSSLLGEHAPTPAPAPLPGAAKQHASDGSCSDGPCRKRKASGGKAKDVVTTATPKSREPETMAKRRKLSTDAARDEAGSHGNGKGKEVAPAAEPEPQPPKDYIHVRARRGQATDSHSLAERVRREKISERMKLLQDLVPGCSKVTGKAVMLDEIINYVQSLQCQVEFLSMKLSTVDPRRELDVGCFVVPKDDVTMQANRLCAPATSSSSSAFCYAARSVVTNAKGFETPLPLANHGVAADDRPLERRTRDAGPQAGSLWEEDDLQSLVLMGFRGR

SEQ ID NO: 20259 - protein, 428 aa, Zea mays subsp. mays
  peptide (1)..(428): Ceres Seq. ID no. 12435554
MAHDGFLGDLACPLPLAHAATAAPFDPLRVHVAHALTGAGAGWEHDAATGALVPSRPRPLSPSSLAAATAVVVGGGGDAVEAALMEQLASRLGVSVPSPPPSRYASCHGTPAGSPSKSAAPWVLAGDAAPAERATGLPCFPASCGELSRVPSCQSSLLGEHAPTPAPAPLPGAAKQHASDGSCSDGPCRKRKASGGKAKDVVTTATPKSREPETMAKRRKLSTDAARDEAGSHGNGKGKEVAPAAEPEPQPPKDYIHVRARRGQATDSHSLAERVRREKISERMKLLQDLVPGCSKVTGKAVMLDEIINYVQSLQCQVEFLSMKLSTVDPRRELDVGCFVVPKDDVTMQANRLCAPATSSSSSAFCYAARSVVTNAKGFETPLPLANHGVAADDRPLERRTRDAGPQAGSLWEEDDLQSLVLMGFRGR

SEQ ID NO: 20260 - DNA, 1144 bp, Zea mays subsp. mays; identical to SEQ ID NO: 12883
  misc_feature (1)..(1144): Ceres Seq. ID no. 12340675
  misc_feature (1)..(1144): Ortholog of  Ceres SEQ ID NO 15179153 as cited in SEQ ID NO 1066
  misc_feature (1)..(1144): Ortholog of  Ceres SEQ ID NO 15176047 as cited in SEQ ID NO 55988
  misc_feature (1)..(1144): Ortholog of  Ceres SEQ ID NO 13582167 as cited in SEQ ID NO 56203
  misc_feature (1)..(1144): Ortholog of  Ceres SEQ ID NO 13658295 as cited in SEQ ID NO 66515

SEQ ID NO: 20261 - protein, 257 aa, Zea mays subsp. mays; identical to SEQ ID NO: 12884
  peptide (1)..(257): Ceres Seq. ID no. 12340676

SEQ ID NO: 20262 - protein, 171 aa, Zea mays subsp. mays; identical to SEQ ID NO: 12885
  peptide (1)..(171): Ceres Seq. ID no. 12340677

SEQ ID NO: 20263 - protein, 151 aa, Zea mays subsp. mays; identical to SEQ ID NO: 12886
  peptide (1)..(151): Ceres Seq. ID no. 12340678

SEQ ID NO: 20264 - DNA, 1848 bp, Zea mays subsp. mays
  misc_feature (1)..(1848): Ceres Seq. ID no. 12418208
  misc_feature (1)..(1848): Ortholog of  Ceres SEQ ID NO 15171446 as cited in SEQ ID NO 51590
  misc_feature (1)..(1848): Ortholog of  Ceres SEQ ID NO 13657707 as cited in SEQ ID NO 66407
accacgggcagctcagctcagcaagccgcacaagccccaaacagaaagagactcacccaccgcgccacgcaacagcccatctccgctctgctctctcgcccaccccgattcccccccatggctatggcgacgacggaggccaccacgctgacggtgctgctcaaggaggcggcggccgccttcccgacccgccgcgcagttgccgtaccgggcaggctggagctcacgcacgccgccctcgacgctctcgtcgacgcggcggccgcacgactcgccgccgacgccggagttctcccgggccacgtcgtcgcgctctccttccccaacaccgtcgagctggtgatcatgttcctggcggtaatccgcgcgcgcggcgtggcggcgccgctcaacccggcctacacgcaggaggagttcgagttctacctctccgactcggaggcgcgcctcctcgtcaccaacgcggagggcaacgcggcagcgcaggctgccgctgccaagctcgggctcgcccacgccaccgccagcctccacgacgcggccggccctgtccacctcgccggcctcccggtccatgctccggagaacgggtcccacggcggcggcgcggcgggctctctctcccccaacgacccgtcggacgtggccctgttcctgcacacctccggcacgacgagccggcccaagggcgtgccgctgaagcagcgcaacctggcggcgtcggtgcggaacatccggtccgtgtaccgcctcgccgagacggacgccacggtggtggtgctgccgctgttccacgtgcacgggctcctctgcgccctgctgagctcgctggcttcgggcgcgtccgtggcgctgccggcggcggggcggttctcggcgtccacgttctgggccgacatgcgggcgtcgggcgccacctggtacacggcggtgccgacgatccaccagatcatcctggaccggcacgcgtcgcggccggaggcgtacccggcgctccgattcatccgcagctgcagcgcgtcgctggcgccggcgatcctggagcggctggaggcggcgttcagcgcgccggtgctggaggcgtacgcgatgacggaggcgtcgcacctgatgacgtcaaacccgctgccggaggacgggccacggaagcccgggtcagtggggcgcgcggtggggcaggagctggcggtgctggacgaggaggggcggctcgtggcggcggggagccccggggaggtgtgcgtccgcggggacaacgtgacggcgggttacaaggggaacccagaggcgaacgaggcggcgttccggttcgggtggttccacacgggggacatcggcgtggtggacgaccaagggtatgtccggctggtggggcgcatcaaggagctcatcaaccgcggcggggagaagatctccccgatcgaggtggacgccgtgctgctaggcctccccggtgtggcgcaggcggtgtcgttcggggtgcctgacgacaagtacggggaggagatcaactgcgcggtgatcccgcgggacgggtcggcgctgcgggaggaggaggtgctggcgcactgccgacggaacctggcgtccttcaaggtgcccaagaaggtgttcatcacggacgacctgcccaagacggccaccggaaagatccagcgccgcatcgtggcgcagcacttcgtgcagccgaccagtgcctgatcgttgatcctggtgcttgccaagtcatgggtcgacggattggaatttcgctacactagctagcattttgccgttgttcccgcattgcgttgcgaggtggacatggcctgactgaacctgaataaacaaacacatgcatcgtctctc

SEQ ID NO: 20265 - protein, 566 aa, Zea mays subsp. mays
  peptide (1)..(566): Ceres Seq. ID no. 12418209
TTGSSAQQAAQAPNRKRLTHRATQQPISALLSRPPRFPPMAMATTEATTLTVLLKEAAAAFPTRRAVAVPGRLELTHAALDALVDAAAARLAADAGVLPGHVVALSFPNTVELVIMFLAVIRARGVAAPLNPAYTQEEFEFYLSDSEARLLVTNAEGNAAAQAAAAKLGLAHATASLHDAAGPVHLAGLPVHAPENGSHGGGAAGSLSPNDPSDVALFLHTSGTTSRPKGVPLKQRNLAASVRNIRSVYRLAETDATVVVLPLFHVHGLLCALLSSLASGASVALPAAGRFSASTFWADMRASGATWYTAVPTIHQIILDRHASRPEAYPALRFIRSCSASLAPAILERLEAAFSAPVLEAYAMTEASHLMTSNPLPEDGPRKPGSVGRAVGQELAVLDEEGRLVAAGSPGEVCVRGDNVTAGYKGNPEANEAAFRFGWFHTGDIGVVDDQGYVRLVGRIKELINRGGEKISPIEVDAVLLGLPGVAQAVSFGVPDDKYGEEINCAVIPRDGSALREEEVLAHCRRNLASFKVPKKVFITDDLPKTATGKIQRRIVAQHFVQPTSA

SEQ ID NO: 20266 - protein, 527 aa, Zea mays subsp. mays
  peptide (1)..(527): Ceres Seq. ID no. 12418210
MAMATTEATTLTVLLKEAAAAFPTRRAVAVPGRLELTHAALDALVDAAAARLAADAGVLPGHVVALSFPNTVELVIMFLAVIRARGVAAPLNPAYTQEEFEFYLSDSEARLLVTNAEGNAAAQAAAAKLGLAHATASLHDAAGPVHLAGLPVHAPENGSHGGGAAGSLSPNDPSDVALFLHTSGTTSRPKGVPLKQRNLAASVRNIRSVYRLAETDATVVVLPLFHVHGLLCALLSSLASGASVALPAAGRFSASTFWADMRASGATWYTAVPTIHQIILDRHASRPEAYPALRFIRSCSASLAPAILERLEAAFSAPVLEAYAMTEASHLMTSNPLPEDGPRKPGSVGRAVGQELAVLDEEGRLVAAGSPGEVCVRGDNVTAGYKGNPEANEAAFRFGWFHTGDIGVVDDQGYVRLVGRIKELINRGGEKISPIEVDAVLLGLPGVAQAVSFGVPDDKYGEEINCAVIPRDGSALREEEVLAHCRRNLASFKVPKKVFITDDLPKTATGKIQRRIVAQHFVQPTSA

SEQ ID NO: 20267 - protein, 525 aa, Zea mays subsp. mays
  peptide (1)..(525): Ceres Seq. ID no. 12418211
MATTEATTLTVLLKEAAAAFPTRRAVAVPGRLELTHAALDALVDAAAARLAADAGVLPGHVVALSFPNTVELVIMFLAVIRARGVAAPLNPAYTQEEFEFYLSDSEARLLVTNAEGNAAAQAAAAKLGLAHATASLHDAAGPVHLAGLPVHAPENGSHGGGAAGSLSPNDPSDVALFLHTSGTTSRPKGVPLKQRNLAASVRNIRSVYRLAETDATVVVLPLFHVHGLLCALLSSLASGASVALPAAGRFSASTFWADMRASGATWYTAVPTIHQIILDRHASRPEAYPALRFIRSCSASLAPAILERLEAAFSAPVLEAYAMTEASHLMTSNPLPEDGPRKPGSVGRAVGQELAVLDEEGRLVAAGSPGEVCVRGDNVTAGYKGNPEANEAAFRFGWFHTGDIGVVDDQGYVRLVGRIKELINRGGEKISPIEVDAVLLGLPGVAQAVSFGVPDDKYGEEINCAVIPRDGSALREEEVLAHCRRNLASFKVPKKVFITDDLPKTATGKIQRRIVAQHFVQPTSA

SEQ ID NO: 20268 - DNA, 1406 bp, Zea mays subsp. mays; identical to SEQ ID NO: 3054
  misc_feature (1)..(1406): Ceres Seq. ID no. 13498652
  misc_feature (1)..(1406): Ortholog of  Ceres SEQ ID NO 15177969 as cited in SEQ ID NO 58823
  misc_feature (1)..(1406): Ortholog of  Ceres SEQ ID NO 15177963 as cited in SEQ ID NO 59105
  misc_feature (1)..(1406): Ortholog of  Ceres SEQ ID NO 14302746 as cited in SEQ ID NO 66646
  misc_feature (1)..(1406): Ortholog of  Ceres SEQ ID NO 15179123 as cited in SEQ ID NO 0

SEQ ID NO: 20269 - protein, 418 aa, Zea mays subsp. mays; identical to SEQ ID NO: 3055
  peptide (1)..(418): Ceres Seq. ID no. 13498653

SEQ ID NO: 20270 - protein, 379 aa, Zea mays subsp. mays; identical to SEQ ID NO: 3056
  peptide (1)..(379): Ceres Seq. ID no. 13498654

SEQ ID NO: 20271 - protein, 376 aa, Zea mays subsp. mays; identical to SEQ ID NO: 3057
  peptide (1)..(376): Ceres Seq. ID no. 13498655

SEQ ID NO: 20272 - DNA, 998 bp, Zea mays subsp. mays; identical to SEQ ID NO: 15393
  misc_feature (1)..(998): Ceres Seq. ID no. 13636513
  misc_feature (1)..(998): Ortholog of  Ceres SEQ ID NO 15174311 as cited in SEQ ID NO 0

SEQ ID NO: 20273 - protein, 276 aa, Zea mays subsp. mays; identical to SEQ ID NO: 15394
  peptide (1)..(276): Ceres Seq. ID no. 15219366
  misc_feature (75)..(75): Xaa is any aa, unknown or other
  misc_feature (77)..(77): Xaa is any aa, unknown or other
  misc_feature (79)..(79): Xaa is any aa, unknown or other
  misc_feature (80)..(80): Xaa is any aa, unknown or other
  misc_feature (82)..(82): Xaa is any aa, unknown or other
  misc_feature (83)..(83): Xaa is any aa, unknown or other
  misc_feature (95)..(95): Xaa is any aa, unknown or other
  misc_feature (115)..(115): Xaa is any aa, unknown or other
  misc_feature (120)..(120): Xaa is any aa, unknown or other
  misc_feature (122)..(122): Xaa is any aa, unknown or other
  misc_feature (123)..(123): Xaa is any aa, unknown or other
  misc_feature (145)..(145): Xaa is any aa, unknown or other
  misc_feature (149)..(149): Xaa is any aa, unknown or other
  misc_feature (171)..(171): Xaa is any aa, unknown or other
  misc_feature (178)..(178): Xaa is any aa, unknown or other

SEQ ID NO: 20274 - protein, 272 aa, Zea mays subsp. mays; identical to SEQ ID NO: 15395
  peptide (1)..(272): Ceres Seq. ID no. 15219367
  misc_feature (75)..(75): Xaa is any aa, unknown or other
  misc_feature (77)..(77): Xaa is any aa, unknown or other
  misc_feature (79)..(79): Xaa is any aa, unknown or other
  misc_feature (80)..(80): Xaa is any aa, unknown or other
  misc_feature (82)..(82): Xaa is any aa, unknown or other
  misc_feature (94)..(94): Xaa is any aa, unknown or other
  misc_feature (114)..(114): Xaa is any aa, unknown or other
  misc_feature (120)..(120): Xaa is any aa, unknown or other
  misc_feature (122)..(122): Xaa is any aa, unknown or other
  misc_feature (145)..(145): Xaa is any aa, unknown or other
  misc_feature (149)..(149): Xaa is any aa, unknown or other
  misc_feature (171)..(171): Xaa is any aa, unknown or other
  misc_feature (178)..(178): Xaa is any aa, unknown or other

SEQ ID NO: 20275 - protein, 250 aa, Zea mays subsp. mays; identical to SEQ ID NO: 15396
  peptide (1)..(250): Ceres Seq. ID no. 15219368
  misc_feature (53)..(53): Xaa is any aa, unknown or other
  misc_feature (55)..(55): Xaa is any aa, unknown or other
  misc_feature (57)..(57): Xaa is any aa, unknown or other
  misc_feature (58)..(58): Xaa is any aa, unknown or other
  misc_feature (60)..(60): Xaa is any aa, unknown or other
  misc_feature (72)..(72): Xaa is any aa, unknown or other
  misc_feature (92)..(92): Xaa is any aa, unknown or other
  misc_feature (98)..(98): Xaa is any aa, unknown or other
  misc_feature (100)..(100): Xaa is any aa, unknown or other
  misc_feature (123)..(123): Xaa is any aa, unknown or other
  misc_feature (127)..(127): Xaa is any aa, unknown or other
  misc_feature (149)..(149): Xaa is any aa, unknown or other
  misc_feature (156)..(156): Xaa is any aa, unknown or other

SEQ ID NO: 20276 - DNA, 889 bp, Zea mays subsp. mays
  misc_feature (1)..(889): Ceres Seq. ID no. 12378077
  misc_feature (1)..(889): Ortholog of  Ceres SEQ ID NO 15179455 as cited in SEQ ID NO 0
cccatttctctgacatgtgagccctgtaggagagggccttcactcgtcacatgcgctgacgcgcatcccccccggcgtggcgtgcgctttgatctagctcttcttctcgaatccagcccgaggcctttttcttctgcggtttcatccgtacccatcctgcacacgaagcctagaatagccctcccctgctccgccacctcctcggatcccgaccaccccacccccaccccagacaacaggttgatggaggctaagatgggacgcttcttcgagtccgtgagcaatttcttcaccggaggcgaccacatcccctggtgcgaccgcgacctcatcgccggctgtgaaggagagcttgtcaatgctgcaaatgaggaacagaggaatgaaagccttatgaggttgtcatgggcccttgtgcactccaggcagacagacgatgtaaaccgtggaatcagcatgcttcaagcttctttggataattctgccagtcctctgcagactagggaaaagctgtacttgttggctgttggattctacaggattggcgactactcaaaaagcaggcaacttgcagatcgttgtttggagattcaagcggattggcggcaggccatatcgctgaagaaggcaatagaagataaaattgccaaagatggtctgattggaataggaattgcgacaactgcggtcggacttctggttggtggaattgcagctgctgttgccaggaagaagtgaggtcaatatattggatcggcagctcattgaactaggggagctcccgtctctgtaattccaacttttctgttgttaccttggtgatattacagttgaattgccactctttatatgtacgaagtaatcgtatgataatgataacaccattgtg

SEQ ID NO: 20277 - protein, 245 aa, Zea mays subsp. mays
  peptide (1)..(245): Ceres Seq. ID no. 12378078
PISLTCEPCRRGPSLVTCADAHPPRRGVRFDLALLLESSPRPFSSAVSSVPILHTKPRIALPCSATSSDPDHPTPTPDNRLMEAKMGRFFESVSNFFTGGDHIPWCDRDLIAGCEGELVNAANEEQRNESLMRLSWALVHSRQTDDVNRGISMLQASLDNSASPLQTREKLYLLAVGFYRIGDYSKSRQLADRCLEIQADWRQAISLKKAIEDKIAKDGLIGIGIATTAVGLLVGGIAAAVARKK

SEQ ID NO: 20278 - protein, 164 aa, Zea mays subsp. mays; identical to SEQ ID NO: 10262
  peptide (1)..(164): Ceres Seq. ID no. 12378079

SEQ ID NO: 20279 - protein, 160 aa, Zea mays subsp. mays; identical to SEQ ID NO: 10263
  peptide (1)..(160): Ceres Seq. ID no. 12378080

SEQ ID NO: 20280 - DNA, 1394 bp, Zea mays subsp. mays
  misc_feature (1)..(1394): Ceres Seq. ID no. 12435464
  misc_feature (1)..(1394): Ortholog of  Ceres SEQ ID NO 12609146 as cited in SEQ ID NO 52118
  misc_feature (1)..(1394): Ortholog of  Ceres SEQ ID NO 14303397 as cited in SEQ ID NO 54614
  misc_feature (1)..(1394): Ortholog of  Ceres SEQ ID NO 13594056 as cited in SEQ ID NO 55691
  misc_feature (1)..(1394): Ortholog of  Ceres SEQ ID NO 14314186 as cited in SEQ ID NO 57457
  misc_feature (1)..(1394): Ortholog of  Ceres SEQ ID NO 13638136 as cited in SEQ ID NO 58644
  misc_feature (1)..(1394): Ortholog of  Ceres SEQ ID NO 13596868 as cited in SEQ ID NO 62806
  misc_feature (1)..(1394): Ortholog of  Ceres SEQ ID NO 13595885 as cited in SEQ ID NO 69265
  misc_feature (1)..(1394): Ortholog of  Ceres SEQ ID NO 12566239 as cited in SEQ ID NO 0
  misc_feature (1)..(1394): Ortholog of  Ceres SEQ ID NO 13599119 as cited in SEQ ID NO 0
  misc_feature (1)..(1394): Ortholog of  Ceres SEQ ID NO 14308987 as cited in SEQ ID NO 0
  misc_feature (1)..(1394): Ortholog of  Ceres SEQ ID NO 15179992 as cited in SEQ ID NO 0
ccacccgctaacggcgacgacgactgcttccccagtgggagacctgcaatcctcagccacctgcccctccccctcccccatctccgttcacctcttcccctcttccctaccttcctgtattcgcggcgtcgagtgccgccgcccttcgccggcgccgagcacggagcaacgcaccagtttcagtacctggattcgaactgagagtggattacgaagtcatggcaaggttatgttgcttcggcgccggttgctccgatttcacggggcaagggtcaatagcatccggtaaagggaaaggctgtcaagggcaagtcaagatctgctatggatataaccttgtaagagggatgacgaatcatccaatggaggactatcattttgccgaacttgttgatgtcaaaggaaacgagcttggtctttttgctatttatgatggtcatttaggggataccgttcctatgtatttacagaagaatttatttacaaatattttgaatgaggaagagttttggacacacacagatagagcgattataaaagcgtatgaaaaaacagaccaagctattctgtcacatactccagatctgggacaaggtggctccactgctgtaaccgccattcttgtgaacggcaggaagttatgggtagctaatgttggcgattcaagagctgttcttttgaaaggtggtgagcccatacagatgtcgatagaccatgatccgaatgttgagcggagtgtaatcgaaaataggggtggttttgtttcaaatatgccaggagatgttccccgagtatgtggtcagttggctgtctccagagcttttggagacaggaatctaaaatcactattgagatcagagcctgatataaaaatcgaagacatagatcacactgccgagctacttgttcttgcgagtgacggtctttggaaggtgatgaacaatcaagaggttgtcgatttggccaaaaggtacaaggatccctatgctgctgccaagccaattaaccgtcgaagcacaaaaaagagatagtaaggatgatatatcatgcatcgttgttcggttcaaggcgtaagtcggtctcgaaggattttcatcgagagcaaaaaaacaagtgaattaggctgcctgacgatggtagtgataatctgatggttgaataatgactggggtgttggatgtaaatgatttgtctgctccaatgtaaagttcatatataagtatgctaggattatttggtttggcgatttcaaaggtacaggtgcgagggcccgagagctactaaatagctaccatctgtaaataatggttatattggatgttgaatttgtaagagtagactgagcaaaagacatctggatagttcctaaaagaacaaggtactctttatgttcg

SEQ ID NO: 20281 - protein, 270 aa, Zea mays subsp. mays
  peptide (1)..(270): Ceres Seq. ID no. 12435465
MARLCCFGAGCSDFTGQGSIASGKGKGCQGQVKICYGYNLVRGMTNHPMEDYHFAELVDVKGNELGLFAIYDGHLGDTVPMYLQKNLFTNILNEEEFWTHTDRAIIKAYEKTDQAILSHTPDLGQGGSTAVTAILVNGRKLWVANVGDSRAVLLKGGEPIQMSIDHDPNVERSVIENRGGFVSNMPGDVPRVCGQLAVSRAFGDRNLKSLLRSEPDIKIEDIDHTAELLVLASDGLWKVMNNQEVVDLAKRYKDPYAAAKPINRRSTKKR

SEQ ID NO: 20282 - protein, 227 aa, Zea mays subsp. mays
  peptide (1)..(227): Ceres Seq. ID no. 12435466
MTNHPMEDYHFAELVDVKGNELGLFAIYDGHLGDTVPMYLQKNLFTNILNEEEFWTHTDRAIIKAYEKTDQAILSHTPDLGQGGSTAVTAILVNGRKLWVANVGDSRAVLLKGGEPIQMSIDHDPNVERSVIENRGGFVSNMPGDVPRVCGQLAVSRAFGDRNLKSLLRSEPDIKIEDIDHTAELLVLASDGLWKVMNNQEVVDLAKRYKDPYAAAKPINRRSTKKR

SEQ ID NO: 20283 - protein, 222 aa, Zea mays subsp. mays
  peptide (1)..(222): Ceres Seq. ID no. 12435467
MEDYHFAELVDVKGNELGLFAIYDGHLGDTVPMYLQKNLFTNILNEEEFWTHTDRAIIKAYEKTDQAILSHTPDLGQGGSTAVTAILVNGRKLWVANVGDSRAVLLKGGEPIQMSIDHDPNVERSVIENRGGFVSNMPGDVPRVCGQLAVSRAFGDRNLKSLLRSEPDIKIEDIDHTAELLVLASDGLWKVMNNQEVVDLAKRYKDPYAAAKPINRRSTKKR

SEQ ID NO: 20284 - DNA, 1864 bp, Zea mays subsp. mays
  misc_feature (1)..(1864): Ceres Seq. ID no. 12443277
  misc_feature (1)..(1864): Ortholog of  Ceres SEQ ID NO 14309715 as cited in SEQ ID NO 55353
  misc_feature (1)..(1864): Ortholog of  Ceres SEQ ID NO 13595521 as cited in SEQ ID NO 59840
actcgtgctcgggctcggctccgtccgcgactccgccccacccctttccgtcagcggccgcaaccaccacaccaccacccaatggaggccggggaaatcggcggggcccttgtcttcatcctcgccgccgccgccgtcgtcgcggccgccgtgtccgtcggcgcggtcgacttcagccgcccgctcaccgcgggggcgccgttcgacttccaggcggcggtgtcctggctcatcggcatcctcgacggcacgtcctcggcagcggcggacgtggacggggcgtgggtggcggtgcgggccggggtgatcgcgccggtgctgcaggtggcggtgtgggcgtgcatggtgatgtcggtgatgctggtggtggaggccgtggtacaacagcgtcatcagcctcggcgtcaaggccattgggtggaggcctgagtggaggttcaagtggaagcccctcgacagcgccgacgaggagaaggggaccgcccacttccctatggtcctggttcagatacccatgtacaacgagctggaggtgtacaagctgtcaatagcggcagcatgtgagctgcagtggccaaaggacaggatagtaattcaagtgttggacgattctactgacccctttatcaagaatttggtggagcttgaatgtgagcactgggtgaacaaaggtgtcaatattaagtatgccacaagaaccagccgcaagggattcaaggcaggagctctgaagaaaggaatggaatgtgactatgcatggcaaagcgaatacattgctatatttgatgctgatttccaacctgaaccagattttctgctccaaactgtcccattccttctgcacaatccagaagttgcacttgttcaagctcggtggtccttcgtgaatgacacgacaagcctgctgacaagggtacaaaagatgttttacgactaccacttcaaagttgaacaagaagcaggatcagcgacctttgccttcttcagtttcaacggaactgctggagtgtggcgtacaggagccataagagatgcaggaggttggaaggaccgaactacagttgaagacatggacttggcggttcgagcaacactaaagggctggaaattcgtatatgttggagacgttagagtcaagagtgaactgccgtccacttacaaggcctactgtcggcagcaattccggtggtctagttggtggtgcaaacttattccgtaagatggcaaaggatgttttgtttgccaaggatatatcactcgtcaagaagttctatatgctctatagcttcttctttgtgaggagagttgtagcgccgacggctgcctgtattctctacaatgtcatcatccccatctcagtcacaatcccggagctttacctaccagtgtggggtgttgcctatattcccatggtgcttaccgtggtcacagctataagacatccaaaaaatctacacatactgccattttggattttgtttgagagtgtgatgacattgcatcggatgagggctgcgatgactggactgctggagctagaaggattcaaccagtggattgtgacaaagaaggtggggaatgatctcgaggacactgaagttcctttgcttcagaaaacccggaaaaggctgagagacagagtcaatctccccgagattggattttcggtgtttctcttcctctgtgcatcatacaacctggtgttccatgggaaaacaagctactacttatatatgtaccttcaggggttagcatttctgttactagggtttaacttcactggcaattgttcttgctaccaatgatagcatgtcaaagctgtacgaattgctgattgatattcattttctggtcatgcgttcgt

SEQ ID NO: 20285 - protein, 241 aa, Zea mays subsp. mays
  peptide (1)..(241): Ceres Seq. ID no. 12443278
MVLVQIPMYNELEVYKLSIAAACELQWPKDRIVIQVLDDSTDPFIKNLVELECEHWVNKGVNIKYATRTSRKGFKAGALKKGMECDYAWQSEYIAIFDADFQPEPDFLLQTVPFLLHNPEVALVQARWSFVNDTTSLLTRVQKMFYDYHFKVEQEAGSATFAFFSFNGTAGVWRTGAIRDAGGWKDRTTVEDMDLAVRATLKGWKFVYVGDVRVKSELPSTYKAYCRQQFRWSSWWCKLIP

SEQ ID NO: 20286 - protein, 234 aa, Zea mays subsp. mays
  peptide (1)..(234): Ceres Seq. ID no. 12443279
MYNELEVYKLSIAAACELQWPKDRIVIQVLDDSTDPFIKNLVELECEHWVNKGVNIKYATRTSRKGFKAGALKKGMECDYAWQSEYIAIFDADFQPEPDFLLQTVPFLLHNPEVALVQARWSFVNDTTSLLTRVQKMFYDYHFKVEQEAGSATFAFFSFNGTAGVWRTGAIRDAGGWKDRTTVEDMDLAVRATLKGWKFVYVGDVRVKSELPSTYKAYCRQQFRWSSWWCKLIP

SEQ ID NO: 20287 - protein, 229 aa, Zea mays subsp. mays
  peptide (1)..(229): Ceres Seq. ID no. 12443280
MLETLESRVNCRPLTRPTVGSNSGGLVGGANLFRKMAKDVLFAKDISLVKKFYMLYSFFFVRRVVAPTAACILYNVIIPISVTIPELYLPVWGVAYIPMVLTVVTAIRHPKNLHILPFWILFESVMTLHRMRAAMTGLLELEGFNQWIVTKKVGNDLEDTEVPLLQKTRKRLRDRVNLPEIGFSVFLFLCASYNLVFHGKTSYYLYMYLQGLAFLLLGFNFTGNCSCYQ

SEQ ID NO: 20288 - DNA, 443 bp, Zea mays subsp. mays
  misc_feature (1)..(443): Ceres Seq. ID no. 4613574
  misc_feature (1)..(443): Ortholog of  Ceres SEQ ID NO 12625388 as cited in SEQ ID NO 63299
  misc_feature (1)..(443): Ortholog of  Ceres SEQ ID NO 15179860 as cited in SEQ ID NO 66716
aatatattccctaaatttgcaaatcagggagtaccttccgatgggaggcagcgtcaagatgattgaagagtcactgaagctggcgtacggagaagattctgacttcatcaaagataagaggatagcagcggtgcaggcgctttcaggcactggtgcctgccggctctttgctgatttccaaaagcgttttttgccggattcgcagatctacataccaacaccaacgtggtccaaccatcacaatatttggagggatgctcaagtgccacagaagacattcacatactaccatccagagtcaagagggcttgatttctcaggattgatgaatgaaatcaagaatgctccagatggttcattctttttgcttcatgcatgtgctcataatcccaccggtgtagatcctacggagggaacaatggagagaaatatcccatcagttc

SEQ ID NO: 20289 - protein, 147 aa, Zea mays subsp. mays
  peptide (1)..(147): Ceres Seq. ID no. 4613575
IYSLNLQIREYLPMGGSVKMIEESLKLAYGEDSDFIKDKRIAAVQALSGTGACRLFADFQKRFLPDSQIYIPTPTWSNHHNIWRDAQVPQKTFTYYHPESRGLDFSGLMNEIKNAPDGSFFLLHACAHNPTGVDPTEGTMERNIPSV

SEQ ID NO: 20290 - protein, 134 aa, Zea mays subsp. mays
  peptide (1)..(134): Ceres Seq. ID no. 4613576
MGGSVKMIEESLKLAYGEDSDFIKDKRIAAVQALSGTGACRLFADFQKRFLPDSQIYIPTPTWSNHHNIWRDAQVPQKTFTYYHPESRGLDFSGLMNEIKNAPDGSFFLLHACAHNPTGVDPTEGTMERNIPSV

SEQ ID NO: 20291 - protein, 128 aa, Zea mays subsp. mays
  peptide (1)..(128): Ceres Seq. ID no. 4613577
MIEESLKLAYGEDSDFIKDKRIAAVQALSGTGACRLFADFQKRFLPDSQIYIPTPTWSNHHNIWRDAQVPQKTFTYYHPESRGLDFSGLMNEIKNAPDGSFFLLHACAHNPTGVDPTEGTMERNIPSV

SEQ ID NO: 20292 - DNA, 1962 bp, Zea mays subsp. mays
  misc_feature (1)..(1962): Ceres Seq. ID no. 12391483
  misc_feature (1)..(1962): Ortholog of  Ceres SEQ ID NO 14314220 as cited in SEQ ID NO 57321
cgccttcgccatttctccgctcctccgcctcgcctcgcctcgcccatcgttccatgtctttctcctccggcggtcaccacccctcccggccggaccaaccccggatcccatttccagttagatgcttccccttcaccaccaccccgccgccgcgccggagtcggcggccccggcgacagaccctccgcccccgccggtcctcgatccgtcctccctccgcatccacatcccgtcaagcccgcaccacgcactgccctccaccccgcacaagcgccccgtcgtcatgacctcgtcgtcctcctcgtccacccccacccgcccctcaccgttgcccttcaccccgcctcggaggcgcaaggtccccgcgcccgctgctcccgcggggacagcggcggccaggcatctccttcgctgcctgcacctccgcctgcgtgtcctcctcctcatctcgcttccctccctctactttctctccccgacccctgccatttttccgcgctccctcctcgccgacttcctttccgcggcggccttctcctgcgcgctcctccttctcctctgcctctccctgccgcggcttcccttcgcgctgacgctgccgctccccctccgccgcgcgcgccgatcccccatcctttggtccatcggttcctcgccatccgcatctgcgaccacccccacaaccggccatttcgtccaggtttatagcaacggtgacgtctacgagggccagttccaccgcggccgctgcactggcagcggcgtctactactactacatgagcgggaggtacgagggagattgggtcgacggcaagtacagcggcttcggcgtcgagacatgggccagaggtagccggtaccggggccagtaccggcagggactcaggcatggctacggcgtgtacaggttctacactggggatgtgtatgccggggagtggtcaaacggccagagccatgggtatggtgtgcacacctgtgaggacggtagccggtatataggggagtttaagaggggcgtcaagcatggtctcggccactaccatttcaggaatggtgacacctacgctggagagtactttgctgataggatgcacggctttggaatctacagctttgccaatggccatagatatgagggagcatggcatgagggtagaaggcagggtttaggcatgtatagtttcaggaatggagagacacaagctgggcactggcaaaatggagttcttgatactttaagcacccagaacttcatccctggatcacctattgctgtgaaccattccaaggtcctcaatgcagtgcaggaagcgagaagagctgcagagaaggcctatgacatcccaagagttgatgataaggtgaacagggcggttgcagcagctaataaagcagccaatgcagccagggtggctgccgtgaaggctgcacaaaagcgcatccccagtaatggtgacgatctaccactgtcagtagtgtgacaatgaagccaatatatgttggcatggagctgcttcgcgatgccatcgcatcaccaattgcccgacataaccttcaacttcccagtaggtgaagccactgctcgtccatcaggccatggcgtgttggcgacacctgagtcattgccagcagcattcaagcttgcgggagaagaccaagttttcagccatcccttccatacatctttgtgatgtcttttgcgatgcagcagaaccactgctctgaggactttccattgtccaaggcagccggtcgaggtcagcagtaggttttatcctgccttttctgcagtgtaatactcacccgatgttagtagagatatgatgaatgtacaccccaacatcagtcgataaaaaactgtgtttattttctctcttggactatgtacagaacctacaaatttagcggttgttggccgtgctggttggagaaacgacaggtgccttcgggttcggtc

SEQ ID NO: 20293 - protein, 454 aa, Zea mays subsp. mays
  peptide (1)..(454): Ceres Seq. ID no. 12391484
MLPLHHHPAAAPESAAPATDPPPPPVLDPSSLRIHIPSSPHHALPSTPHKRPVVMTSSSSSSTPTRPSPLPFTPPRRRKVPAPAAPAGTAAARHLLRCLHLRLRVLLLISLPSLYFLSPTPAIFPRSLLADFLSAAAFSCALLLLLCLSLPRLPFALTLPLPLRRARRSPILWSIGSSPSASATTPTTGHFVQVYSNGDVYEGQFHRGRCTGSGVYYYYMSGRYEGDWVDGKYSGFGVETWARGSRYRGQYRQGLRHGYGVYRFYTGDVYAGEWSNGQSHGYGVHTCEDGSRYIGEFKRGVKHGLGHYHFRNGDTYAGEYFADRMHGFGIYSFANGHRYEGAWHEGRRQGLGMYSFRNGETQAGHWQNGVLDTLSTQNFIPGSPIAVNHSKVLNAVQEARRAAEKAYDIPRVDDKVNRAVAAANKAANAARVAAVKAAQKRIPSNGDDLPLSVV

SEQ ID NO: 20294 - protein, 400 aa, Zea mays subsp. mays
  peptide (1)..(400): Ceres Seq. ID no. 12391485
MTSSSSSSTPTRPSPLPFTPPRRRKVPAPAAPAGTAAARHLLRCLHLRLRVLLLISLPSLYFLSPTPAIFPRSLLADFLSAAAFSCALLLLLCLSLPRLPFALTLPLPLRRARRSPILWSIGSSPSASATTPTTGHFVQVYSNGDVYEGQFHRGRCTGSGVYYYYMSGRYEGDWVDGKYSGFGVETWARGSRYRGQYRQGLRHGYGVYRFYTGDVYAGEWSNGQSHGYGVHTCEDGSRYIGEFKRGVKHGLGHYHFRNGDTYAGEYFADRMHGFGIYSFANGHRYEGAWHEGRRQGLGMYSFRNGETQAGHWQNGVLDTLSTQNFIPGSPIAVNHSKVLNAVQEARRAAEKAYDIPRVDDKVNRAVAAANKAANAARVAAVKAAQKRIPSNGDDLPLSVV

SEQ ID NO: 20295 - protein, 235 aa, Zea mays subsp. mays
  peptide (1)..(235): Ceres Seq. ID no. 12391486
MSGRYEGDWVDGKYSGFGVETWARGSRYRGQYRQGLRHGYGVYRFYTGDVYAGEWSNGQSHGYGVHTCEDGSRYIGEFKRGVKHGLGHYHFRNGDTYAGEYFADRMHGFGIYSFANGHRYEGAWHEGRRQGLGMYSFRNGETQAGHWQNGVLDTLSTQNFIPGSPIAVNHSKVLNAVQEARRAAEKAYDIPRVDDKVNRAVAAANKAANAARVAAVKAAQKRIPSNGDDLPLSVV

SEQ ID NO: 20296 - DNA, 483 bp, Zea mays subsp. mays
  misc_feature (1)..(483): Ceres Seq. ID no. 2871567
  misc_feature (1)..(483): Ortholog of  Ceres SEQ ID NO 15169372 as cited in SEQ ID NO 58778
ctcttattggctgctgtcctgggagttcgcttcagttgggccggccgggggtggttccgtacagttccttctctgttggagtagtcggcggcgatgggtatcctcgcgctcatcaccggcaaggccgacgccagccgcctcaccgtcgctatcacaggaggagctagtggcattggtctggagacatcaagagtcttcgccctgagaggagcccatgttgtcatcgctgctagaaacacagaggctgcatcagaagcaagaaagaccatcatggagaagaacccaacggcacgtattgatgttctgaagctagacctcagctccctcaagtctgtcagggcttttgtggaccagttcaactcgatgaaactccctctaaacatcctgataaataatgcaggcgtcatgttctgccctttttcaactgtctaaaaacggggtcgagatgcagttcgcgacaaatcatctcggacactttctgct

SEQ ID NO: 20297 - protein, 112 aa, Zea mays subsp. mays
  peptide (1)..(112): Ceres Seq. ID no. 2871568
MGILALITGKADASRLTVAITGGASGIGLETSRVFALRGAHVVIAARNTEAASEARKTIMEKNPTARIDVLKLDLSSLKSVRAFVDQFNSMKLPLNILINNAGVMFCPFSTV

SEQ ID NO: 20298 - protein, 67 aa, Zea mays subsp. mays
  peptide (1)..(67): Ceres Seq. ID no. 2871569
SYWLLSWEFASVGPAGGGSVQFLLCWSSRRRWVSSRSSPARPTPAASPSLSQEELVALVWRHQESSP

SEQ ID NO: 20299 - DNA, 1731 bp, Zea mays subsp. mays
  misc_feature (1)..(1731): Ceres Seq. ID no. 12436071
  misc_feature (1)..(1731): Ortholog of  Ceres SEQ ID NO 15176959 as cited in SEQ ID NO 52610
  misc_feature (1)..(1731): Ortholog of  Ceres SEQ ID NO 15176571 as cited in SEQ ID NO 54430
aggcgcaggcgcgagcgcgacgtccggcgtccggcttcggcggcggagtggagcgatcccgatccccacaaggaattccatcgctgtcgtggcgtttggtggcgctcctcccggccggcaagcaggatcaggtaccctcccgtcccggatcctcccaaccgttccgtttcccgcggccgggctggcttagttctgcggcgctggttgccatttcgggccaaatttgttgcgtgaagcggaaggatttggattgaatggcacgcgttgtttccagtcgacgccctcttggcttgcctttggctgtaggaaatcgcacggaggtgaggatacacgggtgcggaacgagagctaggcgaacctgtctggtacctcgcggcggagatggacgagaaggcgacgatggagagcaagctgtcctcggcggcggccttcgtggaggggggcgtgcaggacgcctgcgacgacgcctgcagcatctgcctcgacgccttctgcgacagcaaccccttccacgatgaccaagtgcaagcatgactaccatcttcagtgcattcttgaatggtgtatattataattcatgtaataatttaggtgccagagaagctcccagtgccccatgtgttggcagcatatcagcatgaaagatcctatgagccaagagctactagaggctgttgaacaagagaggaacatccgagctaatccttcacgtaatactgctgttttccaccatcaaatgctgggtgattttgagatccctgtaggtgcagatgatgcagaacttgaagaacgcattattcagcacttggctgccgcagctgcagtgcgtaggtcacaccgtcatcataatagaagagatgggcaccagagcagatcagaagcaagtagccacccacagtttctggtgctctcagcagacgagcgcacaatctcaggtcaagaaggggactacgaacaagcatctgctgtagcttctggccgccctttacgtacacttgttgaacaagaacgcactcgagggttagcggatgcttccagtccatctctccgttgttctactcctgctgatagtactggtagatcaaacaataggatttctgggatcgaatctacacctgtggatcaagacggaactggaccatccgctttacaatcaatggtacagggatttcataatcaaagtgcaagtggatggagggagaggtggttttctcggagcaactctttactggatcttggttctgaggtgaggagggaggtcaacgcggggattgctgcggtgtctcgcatgatggaatggcacgatgcaagggacgggacgggagcggggccttctcctacctctgcatcaagatctggttctcagtgaaacactctgcacttgaaaggacctatgcaaatgtaaagattaaggtatgtgctcatgctgtgctaatgaaagccttaaattcagtgttttgttttttttctggtggcgtactgtcactgttgactggcctacggatctgagtttttgtgtaattgtttggaagcaattccattgtcgccgaaatggcgcggtagtttctctgactgctgctgctaaatactaggaactttagttttcttcaagtccaaagggtcagagttgagagcacctgagatccggcgatgcttcatggccacggtcccccagaggctattcgcaatagttgactctaaatttctctctatatatcagttttttgtgtc

SEQ ID NO: 20300 - protein, 250 aa, Zea mays subsp. mays
  peptide (1)..(250): Ceres Seq. ID no. 12436072
MCWQHISMKDPMSQELLEAVEQERNIRANPSRNTAVFHHQMLGDFEIPVGADDAELEERIIQHLAAAAAVRRSHRHHNRRDGHQSRSEASSHPQFLVLSADERTISGQEGDYEQASAVASGRPLRTLVEQERTRGLADASSPSLRCSTPADSTGRSNNRISGIESTPVDQDGTGPSALQSMVQGFHNQSASGWRERWFSRSNSLLDLGSEVRREVNAGIAAVSRMMEWHDARDGTGAGPSPTSASRSGSQ

SEQ ID NO: 20301 - protein, 243 aa, Zea mays subsp. mays
  peptide (1)..(243): Ceres Seq. ID no. 12436073
MKDPMSQELLEAVEQERNIRANPSRNTAVFHHQMLGDFEIPVGADDAELEERIIQHLAAAAAVRRSHRHHNRRDGHQSRSEASSHPQFLVLSADERTISGQEGDYEQASAVASGRPLRTLVEQERTRGLADASSPSLRCSTPADSTGRSNNRISGIESTPVDQDGTGPSALQSMVQGFHNQSASGWRERWFSRSNSLLDLGSEVRREVNAGIAAVSRMMEWHDARDGTGAGPSPTSASRSGSQ

SEQ ID NO: 20302 - protein, 239 aa, Zea mays subsp. mays
  peptide (1)..(239): Ceres Seq. ID no. 12436074
MSQELLEAVEQERNIRANPSRNTAVFHHQMLGDFEIPVGADDAELEERIIQHLAAAAAVRRSHRHHNRRDGHQSRSEASSHPQFLVLSADERTISGQEGDYEQASAVASGRPLRTLVEQERTRGLADASSPSLRCSTPADSTGRSNNRISGIESTPVDQDGTGPSALQSMVQGFHNQSASGWRERWFSRSNSLLDLGSEVRREVNAGIAAVSRMMEWHDARDGTGAGPSPTSASRSGSQ

SEQ ID NO: 20303 - DNA, 1079 bp, Zea mays subsp. mays
  misc_feature (1)..(1079): Ceres Seq. ID no. 12455036
  misc_feature (1)..(1079): Ortholog of  Ceres SEQ ID NO 14304983 as cited in SEQ ID NO 53862
aacgagcagaggtgtgcctagctcatcgatcaacaagtgagtagtagcaccttcaccatggcagacaagaagaaggtggaggtcaaagagacgaaggtggaggtgaagacggccgtctacaaggtgtacgtccactgcggccagtgcgcgcgcgacatccagacgcagttcaccgagttccaaggggttgaagaggtgaaagtggacgccggggccgggaaggtgacagtgaagggcttcggcttcgacgtcgagaagctgaggaagaaagtcgagaagggttgccggaagaaggtcgagctgattccgcccgcgcctcccaaggacgacatggtcgttgatgtcaagaccaaaaaggaggagctcaaggtcataactgtaaagctgccgttgcattgccccgattgtgcagtcagggtcaaggaggttttgcttgagaacaagagtatctacgaggccaagacggatctcggcaagaacacgtgcaccatcgagggtgtcattgaggaggacaagctcgtcaagtacatctacgagaggatgcgcaagaagggcgtcgtcgacaaggtcgagaagaaggtgatcatcaaggaggagaaggtcttagtgaagaaggcggataaggagaaggagaagaaggagaaggagaaggagaaagaaaaggagaaggccaaggagaaggtgaaggaggctgtcgacaaggtcaaggaggtcatcgccccctacttcatcccctgcacgcacccgaacttcgtcgactactcgcacccctggcaccgcggcggcggcggctactgctcgtcgtacggtgacggttacggctacggcgggggctgcggagggtacccaccgtacggtttcagctacacacactctgagctcaaaggctaccatgacacgtcgttcttgcactgcacacaccccaatgagttcatcagcgaggagaacccctacgcgtgcgctgtgatgtagcctctctttttttgcgcttggattcaagtcgaataatttgaacactaagaacaacaccaacgtacggatggctcaaattttctcttttgcttcggctcagatttgtt

SEQ ID NO: 20304 - protein, 304 aa, Zea mays subsp. mays
  peptide (1)..(304): Ceres Seq. ID no. 12455037
MADKKKVEVKETKVEVKTAVYKVYVHCGQCARDIQTQFTEFQGVEEVKVDAGAGKVTVKGFGFDVEKLRKKVEKGCRKKVELIPPAPPKDDMVVDVKTKKEELKVITVKLPLHCPDCAVRVKEVLLENKSIYEAKTDLGKNTCTIEGVIEEDKLVKYIYERMRKKGVVDKVEKKVIIKEEKVLVKKADKEKEKKEKEKEKEKEKAKEKVKEAVDKVKEVIAPYFIPCTHPNFVDYSHPWHRGGGGYCSSYGDGYGYGGGCGGYPPYGFSYTHSELKGYHDTSFLHCTHPNEFISEENPYACAVM

SEQ ID NO: 20305 - protein, 213 aa, Zea mays subsp. mays
  peptide (1)..(213): Ceres Seq. ID no. 12455038
MVVDVKTKKEELKVITVKLPLHCPDCAVRVKEVLLENKSIYEAKTDLGKNTCTIEGVIEEDKLVKYIYERMRKKGVVDKVEKKVIIKEEKVLVKKADKEKEKKEKEKEKEKEKAKEKVKEAVDKVKEVIAPYFIPCTHPNFVDYSHPWHRGGGGYCSSYGDGYGYGGGCGGYPPYGFSYTHSELKGYHDTSFLHCTHPNEFISEENPYACAVM

SEQ ID NO: 20306 - DNA, 1290 bp, Zea mays subsp. mays
  misc_feature (1)..(1290): Ceres Seq. ID no. 12365221
  misc_feature (1)..(1290): Ortholog of  Ceres SEQ ID NO 14313170 as cited in SEQ ID NO 20674
ttttcctcccataaaagcctctccctccgctagtccgctctcaagtaaaaagctcccgaaatcccctcacctactcctctccctctccctctggcagcgccgcctcgccggcggttgcctgcctgcaccttcgccccccgtctcgacctcgacgcggcctccgttcctccgcgagacgcagcatggatgtgcgccctgcgaatgcggccgacgactcgtctctcggagacctgttcccgcaccagcccgccggtttggagagtgacgagagcaacacagaatggctctctggttacgtagaggactgcttttcgagctccacgtcgtacacaaatcccgtctctgcaatggcaagcgagggtgtcggaaaaccaaagctacctccaccaccatcctccaacggcaggagaaagaaacggagcttggcctccgtcatgaccaacggcgactaccaacaattcgtcctcccgctgtacgtcgagccaccgctgatcctgatcgaccagaaacactggatggcagagagcgagctgatccaccccaagaaggacgacgacgaccgagaggtttgccagcaacaagggcaggagcaagagaagggcgtgccgcggctggtgaagatgtgcagcaactgtctgtcaagccaaacgccacggtggagggacgggccgtcggggcgccagatgatgtgcagcgcatgcggcatgaggctcaagccagagaccaggttgtcagccgagcagcagtacggccaggaagaacccaccaggaaggagcaagagccagacaggaagaggaagaaggcggccaagaagacgtgctacgagagcagcgacgccccgccgtcgtcggaccagcaagagaagcggtgcgcccactgcctgtcctccaagaccccgcagtggagggcggggcctctggggcccaagaccctgtgcaacgcctgcggcgtcaggttcaagtccggcaggctgctgcccgagtaccggcccgccaacagccccaccttcgtgagctgcttgcactccaactcccacaagaaggtcatgcagatgcggcaggccgtcgcgcagcagcagtgaggccgacgtctcccggaatctatcgttggaagcgcgttaggggatctcttagatcgtagcttagtcgatgctcagagaggatgagaacagagactttggttatagtagtagtaggcaatcgtcgttagctctagcggtgttctagctcagactgatttgctcggtgtttttagacgtcggattcaatacaatctcgatgttgtcctgg

SEQ ID NO: 20307 - protein, 299 aa, Zea mays subsp. mays
  peptide (1)..(299): Ceres Seq. ID no. 12365222
MDVRPANAADDSSLGDLFPHQPAGLESDESNTEWLSGYVEDCFSSSTSYTNPVSAMASEGVGKPKLPPPPSSNGRRKKRSLASVMTNGDYQQFVLPLYVEPPLILIDQKHWMAESELIHPKKDDDDREVCQQQGQEQEKGVPRLVKMCSNCLSSQTPRWRDGPSGRQMMCSACGMRLKPETRLSAEQQYGQEEPTRKEQEPDRKRKKAAKKTCYESSDAPPSSDQQEKRCAHCLSSKTPQWRAGPLGPKTLCNACGVRFKSGRLLPEYRPANSPTFVSCLHSNSHKKVMQMRQAVAQQQ

SEQ ID NO: 20308 - protein, 286 aa, Zea mays subsp. mays
  peptide (1)..(286): Ceres Seq. ID no. 12365223
MALWLRRGLLFELHVVHKSRLCNGKRGCRKTKATSTTILQRQEKETELGLRHDQRRLPTIRPPAVRRATADPDRPETLDGRERADPPQEGRRRPRGLPATRAGAREGRAAAGEDVQQLSVKPNATVEGRAVGAPDDVQRMRHEAQARDQVVSRAAVRPGRTHQEGARARQEEEEGGQEDVLREQRRPAVVGPAREAVRPLPVLQDPAVEGGASGAQDPVQRLRRQVQVRQAAARVPARQQPHLRELLALQLPQEGHADAAGRRAAAVRPTSPGIYRWKRVRGSLRS

SEQ ID NO: 20309 - protein, 244 aa, Zea mays subsp. mays
  peptide (1)..(244): Ceres Seq. ID no. 12365224
MASEGVGKPKLPPPPSSNGRRKKRSLASVMTNGDYQQFVLPLYVEPPLILIDQKHWMAESELIHPKKDDDDREVCQQQGQEQEKGVPRLVKMCSNCLSSQTPRWRDGPSGRQMMCSACGMRLKPETRLSAEQQYGQEEPTRKEQEPDRKRKKAAKKTCYESSDAPPSSDQQEKRCAHCLSSKTPQWRAGPLGPKTLCNACGVRFKSGRLLPEYRPANSPTFVSCLHSNSHKKVMQMRQAVAQQQ

SEQ ID NO: 20310 - DNA, 1826 bp, Arabidopsis thaliana
  misc_feature (1)..(1826): Ceres Seq. ID no. 13646221
  misc_feature (1)..(1826): Ortholog of  Ceres SEQ ID NO 14311423 as cited in SEQ ID NO 53911
atttgctcactcccattctccagttgtggaaaccccccaaagacatggcatttgaaccttttgagtcatcatcagcgtattcattcacacgacgatttatagaatgtggtgtttgtcctgctttaaaccttccactaaacatgatccctctgaggatcgttttgaagaagaaacaaatatcgttacaggtatttctctgtatgaagatgtcatcttacgtcagagaagatcagaagctgatcagatagaatgggctattcaagatagcttcaacccgcaagaaacttctcgttgtcgtcagcgagaggaggatgatcagatagcgcgtggtttgcaatatgtggaagaaactgagcttgataaatcagttgtggacgaagaagatcagcagctttctaagattgttgaggagagtttgaaggagaaaggcaaaagtaagcaatttgaagatgatcaagtggaaaatgatgaacagcaagctctgatggttcaggagagtctatacatggtggagctttctgctcaacttgaagaagataaaaacatttcaacaatacctccgctgaatgaagatgcgcagcttcagaaggttatttgggaaagcgcgaagggtaaaggccaaatagagcatttcaaagatccagtggaagaagatggaaatcttccaagggtagatctcaacgttaaccatcctcatagcatatgtgatggttgcaaatctgcgattgaatatggaagatctgttcatgccttgggtgttaattggcatcctgaatgtttctgttgtcgttattgcgacaaaccaatcgctatgcacgagttttcaaacacaaaagggaggtgtcatataacctgctacgagcgtagtcacccaaactgccatgtctgcaaaaagaagtttcctggtagaaagtataaagaacatcccttctggaaggaaaagtactgcccttttcatgaagttgatggaactcccaagtgttgcagttgtgaaagattagagccctggggaacgaagtatgtaatgcttgctgacaatcggtggctatgcgtaaaatgtatggaatgcgcggttatggatacttatgagtgccaaccattgcactttgaaatccgtgaaatcttcggaagcttaaacatgaaggttgagaaagaattccctcttcttttggtggagaaagaagcgctgaaaaaagctgaggcgcaagaaaagatcgacaatcagcatggggttgtaaccagaggtatttgcctgtctgaagggcagattgtcaatagtgtctttaaaaagccaaccatggggccaaacggcgagctagtaagcttgggtacagaacctcaaaaggttgttggtggatgtgaggtcactgcaattctcatcctatatggacttcctaggttactaactggatatatcttggctcatgagatgatgcatgcttggcttagactcaatggttataggaatcttaagttagagctggaagaaggaatatgccaagtgctaggccacatgtggttggagtcacagacatactccagttctgcagctgcatcatcagcttcttcttcttcgaggactccagctgctaatgcatcaaagaaaggtgctcaatctgattacgagaagaaactggtggaattttgcaaggatcagatagaaacagacgattcaccggtctacggtgttggattcaggaaagttaaccagatggtctcaaactccagcctccataaaatcctgaaaagtattcaacactggacgaaaccagattcaaatctttgaagcacctaatataggacaaatcgaaacataccttatcgat

SEQ ID NO: 20311 - protein, 560 aa, Arabidopsis thaliana
  peptide (1)..(560): Ceres Seq. ID no. 13646222
MWCLSCFKPSTKHDPSEDRFEEETNIVTGISLYEDVILRQRRSEADQIEWAIQDSFNPQETSRCRQREEDDQIARGLQYVEETELDKSVVDEEDQQLSKIVEESLKEKGKSKQFEDDQVENDEQQALMVQESLYMVELSAQLEEDKNISTIPPLNEDAQLQKVIWESAKGKGQIEHFKDPVEEDGNLPRVDLNVNHPHSICDGCKSAIEYGRSVHALGVNWHPECFCCRYCDKPIAMHEFSNTKGRCHITCYERSHPNCHVCKKKFPGRKYKEHPFWKEKYCPFHEVDGTPKCCSCERLEPWGTKYVMLADNRWLCVKCMECAVMDTYECQPLHFEIREIFGSLNMKVEKEFPLLLVEKEALKKAEAQEKIDNQHGVVTRGICLSEGQIVNSVFKKPTMGPNGELVSLGTEPQKVVGGCEVTAILILYGLPRLLTGYILAHEMMHAWLRLNGYRNLKLELEEGICQVLGHMWLESQTYSSSAAASSASSSSRTPAANASKKGAQSDYEKKLVEFCKDQIETDDSPVYGVGFRKVNQMVSNSSLHKILKSIQHWTKPDSNL

SEQ ID NO: 20312 - protein, 433 aa, Arabidopsis thaliana
  peptide (1)..(433): Ceres Seq. ID no. 13646223
MVQESLYMVELSAQLEEDKNISTIPPLNEDAQLQKVIWESAKGKGQIEHFKDPVEEDGNLPRVDLNVNHPHSICDGCKSAIEYGRSVHALGVNWHPECFCCRYCDKPIAMHEFSNTKGRCHITCYERSHPNCHVCKKKFPGRKYKEHPFWKEKYCPFHEVDGTPKCCSCERLEPWGTKYVMLADNRWLCVKCMECAVMDTYECQPLHFEIREIFGSLNMKVEKEFPLLLVEKEALKKAEAQEKIDNQHGVVTRGICLSEGQIVNSVFKKPTMGPNGELVSLGTEPQKVVGGCEVTAILILYGLPRLLTGYILAHEMMHAWLRLNGYRNLKLELEEGICQVLGHMWLESQTYSSSAAASSASSSSRTPAANASKKGAQSDYEKKLVEFCKDQIETDDSPVYGVGFRKVNQMVSNSSLHKILKSIQHWTKPDSNL

SEQ ID NO: 20313 - protein, 426 aa, Arabidopsis thaliana
  peptide (1)..(426): Ceres Seq. ID no. 13646224
MVELSAQLEEDKNISTIPPLNEDAQLQKVIWESAKGKGQIEHFKDPVEEDGNLPRVDLNVNHPHSICDGCKSAIEYGRSVHALGVNWHPECFCCRYCDKPIAMHEFSNTKGRCHITCYERSHPNCHVCKKKFPGRKYKEHPFWKEKYCPFHEVDGTPKCCSCERLEPWGTKYVMLADNRWLCVKCMECAVMDTYECQPLHFEIREIFGSLNMKVEKEFPLLLVEKEALKKAEAQEKIDNQHGVVTRGICLSEGQIVNSVFKKPTMGPNGELVSLGTEPQKVVGGCEVTAILILYGLPRLLTGYILAHEMMHAWLRLNGYRNLKLELEEGICQVLGHMWLESQTYSSSAAASSASSSSRTPAANASKKGAQSDYEKKLVEFCKDQIETDDSPVYGVGFRKVNQMVSNSSLHKILKSIQHWTKPDSNL

SEQ ID NO: 20314 - DNA, 849 bp, Arabidopsis thaliana
  misc_feature (1)..(849): Ceres Seq. ID no. 13646254
cactcaagaagacatctaaagccatcaaaaatatatccatagaagcttcatcgaaatggcgaatcaagcagctgctgcagcattcttccttttcgctttagccgtcttctccaacttggagctctcagcttcttcacttgtcagtggcaagatctcttgccttgactgccaccgcgatttcgacttctcaggcattaaggtcctccttaaatgcgacggagagaagaaacaaataaccgcgatggcagctgcagacggatctttccggtcagtgcttccaacggctgacaaaaaaggctccataaattgtcttgcaaagctcttgggaggccctgagcaactctatgctcacaaacacaacttggtctctgaattggtcaagtctaaacacgattccaaagttttaactacctcaaacccacttgccttctctctctcctgccccaaaccatcccgagatgatatcggaaaattaatagtcttggaatctccgatcatacttccgatatcatctcgggatggtttggagcaggagaagaagacagaggtggttgaggagaaacagactgaggttgcggctgctgaggaagtcgccgttgagaaggccgaggagtaaagaggaaggaagaagctatatatgaccttttttggtctcatatcgttttctgtttattttattttatcaacatttcataagtattttctatgtttgttgggtttgttatgatgaaatcagatgtttggatcttttaatggttgctacattgtttacatgcttggtcgtagcaacaaagtacaaacttaaaccgmcaaaaaaaaaaaaaaaaaagcttatcgataccgtcgacc

SEQ ID NO: 20315 - protein, 186 aa, Arabidopsis thaliana
  peptide (1)..(186): Ceres Seq. ID no. 15218687
MANQAAAAAFFLFALAVFSNLELSASSLVSGKISCLDCHRDFDFSGIKVLLKCDGEKKQITAMAAADGSFRSVLPTADKKGSINCLAKLLGGPEQLYAHKHNLVSELVKSKHDSKVLTTSNPLAFSLSCPKPSRDDIGKLIVLESPIILPISSRDGLEQEKKTEVVEEKQTEVAAAEEVAVEKAEE

SEQ ID NO: 20316 - protein, 124 aa, Arabidopsis thaliana
  peptide (1)..(124): Ceres Seq. ID no. 15218688
MAAADGSFRSVLPTADKKGSINCLAKLLGGPEQLYAHKHNLVSELVKSKHDSKVLTTSNPLAFSLSCPKPSRDDIGKLIVLESPIILPISSRDGLEQEKKTEVVEEKQTEVAAAEEVAVEKAEE

SEQ ID NO: 20317 - DNA, 1826 bp, Arabidopsis thaliana
  misc_feature (1)..(1826): Ceres Seq. ID no. 13592768
  misc_feature (1)..(1826): Ortholog of  Ceres SEQ ID NO 14303656 as cited in SEQ ID NO 61363
aattcattccattgtcgttacctttttgtttctcagactgttaccttacctgtaaagaagagagttaaagatctattgcaaaaaaactcaacctttaatctctctgcttcttctaattaagtaatttcaactacccttttggcgaaacctctcgatctattggtttggtactgaagaaaccgacttgagtctgatttgtttttggtgaaagccatggaagctataagaaagcaagctgcgaagctcagagagcaagtcgcgaggcaacagcaagcggttttgaagcatttagggcatgttaatgctgatgctgttgttgttgatgaagaagagcttcattgtcatcagaaacttcaagatctttatagctctactaaagctgctaagcgtttgcaaaggaacattgttcgtggacttgaaggtttcattgcgactggcacaaaggttgttgagatagggttgaagtttgctgaagattttaagaaatatggagatgagaatcctgatgctaatactcctctatcaagagtcgcacatcactttgggacctcttacaagtcggtggaagacgagagggaaactctcctcggagttcttagtgagcaggtttgtgagccaattcgtacgatgatatatagtgcgcctttggaggatgctcggcatttggtgaatcactatgacaggctgagacaagaagtcgaagctcaggcaactgatgtactgaggagaagatctaagttgaaggaatctgatatttctgaagaagcctacataaaacttaagaattccgaatcgagattagctgagctcaaatcaagtatgaaaactcttggcaaagaagctactaaggccatgttggaagtcgacgatcagcaacagaacgttacttctcagcgcctccgtgctctggttgaagccgagagatcataccatcgtaatgccctcgatatccttgacaagctacatgctgagatgattgctgaggaagaagctataggagcatcaccaaagtcactgcctttacatttagaggatagtgcttctcttccccaagaagaaccgatttcaaaaccctcgggagaggtcaaatcaaaccccttgggaaagatcaaaggaagtcgtcgagaagaagtcaagtctaatccccaagaagtaaccaaacccaatcccaaggacgaaatgaagtccagtccccaagaagaaaccaaatccaatcatcagaaagaaatcaagtctagtccacaggaagagatcaagaagtccaatggatctgatgatcatcacaatcatcaacttctcagtcagaatgattcctactttcttgcaaaggttgtgcacccgtttgatgctcaagccccaggggaactcagtctcgctgtcgatgattatgtaattgtgcgacaggtggctgggacaggctggtcagaaggagaatacaagggcaaagccggatggttcccgtctgcttacgttgagaaacaagagaaagctccggcgagcaagatcgtggaatcaaacgccaagtaacaatgatccctttctttaacatatacatacaaaaagtatgtgtaagatatgattgtgtttttcttccttcttacctatcttcgtaagtaaagatatgtttccacgagtaaatatgatcttgtaagagttatgatttgtgtgttttcttccttttcttcttatgtatcaacatgagtctaactctagactcttgagtcatatctctacgcagttgtgagaatcctgttttatcttttgtttgataagatcctctgtttcttctgtaatttactctgataatgataatgatctttcttgct

SEQ ID NO: 20318 - protein, 437 aa, Arabidopsis thaliana
  peptide (1)..(437): Ceres Seq. ID no. 13592769
MEAIRKQAAKLREQVARQQQAVLKHLGHVNADAVVVDEEELHCHQKLQDLYSSTKAAKRLQRNIVRGLEGFIATGTKVVEIGLKFAEDFKKYGDENPDANTPLSRVAHHFGTSYKSVEDERETLLGVLSEQVCEPIRTMIYSAPLEDARHLVNHYDRLRQEVEAQATDVLRRRSKLKESDISEEAYIKLKNSESRLAELKSSMKTLGKEATKAMLEVDDQQQNVTSQRLRALVEAERSYHRNALDILDKLHAEMIAEEEAIGASPKSLPLHLEDSASLPQEEPISKPSGEVKSNPLGKIKGSRREEVKSNPQEVTKPNPKDEMKSSPQEETKSNHQKEIKSSPQEEIKKSNGSDDHHNHQLLSQNDSYFLAKVVHPFDAQAPGELSLAVDDYVIVRQVAGTGWSEGEYKGKAGWFPSAYVEKQEKAPASKIVESNAK

SEQ ID NO: 20319 - protein, 299 aa, Arabidopsis thaliana
  peptide (1)..(299): Ceres Seq. ID no. 13592770
MIYSAPLEDARHLVNHYDRLRQEVEAQATDVLRRRSKLKESDISEEAYIKLKNSESRLAELKSSMKTLGKEATKAMLEVDDQQQNVTSQRLRALVEAERSYHRNALDILDKLHAEMIAEEEAIGASPKSLPLHLEDSASLPQEEPISKPSGEVKSNPLGKIKGSRREEVKSNPQEVTKPNPKDEMKSSPQEETKSNHQKEIKSSPQEEIKKSNGSDDHHNHQLLSQNDSYFLAKVVHPFDAQAPGELSLAVDDYVIVRQVAGTGWSEGEYKGKAGWFPSAYVEKQEKAPASKIVESNAK

SEQ ID NO: 20320 - protein, 235 aa, Arabidopsis thaliana
  peptide (1)..(235): Ceres Seq. ID no. 13592771
MKTLGKEATKAMLEVDDQQQNVTSQRLRALVEAERSYHRNALDILDKLHAEMIAEEEAIGASPKSLPLHLEDSASLPQEEPISKPSGEVKSNPLGKIKGSRREEVKSNPQEVTKPNPKDEMKSSPQEETKSNHQKEIKSSPQEEIKKSNGSDDHHNHQLLSQNDSYFLAKVVHPFDAQAPGELSLAVDDYVIVRQVAGTGWSEGEYKGKAGWFPSAYVEKQEKAPASKIVESNAK

SEQ ID NO: 20321 - DNA, 1905 bp, Arabidopsis thaliana
  misc_feature (1)..(1905): Ceres Seq. ID no. 13486771
  misc_feature (1)..(1905): Ortholog of  Ceres SEQ ID NO 13595840 as cited in SEQ ID NO 56647
  misc_feature (1)..(1905): Ortholog of  Ceres SEQ ID NO 13582260 as cited in SEQ ID NO 59799
  misc_feature (1)..(1905): Ortholog of  Ceres SEQ ID NO 15180619 as cited in SEQ ID NO 0
acatcctaatcgaaaatccattaattctgctgctgcaaattctatcgaactggtgagttttgttaatctctttcctcgttcgtccttgtctgtatatcagatcgatctctattaccgttttagcttgttcttgatctttgtcaacataaaaacaatcaaacaaagtttcttctatgagttctggtctgaacgaagatttcctcgattgtatcgtgcgtttagaggagacacatgttcaacaaggcttcgatgagggttacgaagaaggtcttgtgtccggtcgtgaagacgctcgtcatctgggtttgaaactcgggttcgagacaggcgagctgattggattctacagaggttgctctgctctttggaattcagctctccgtattgatcctacacgcttctctcctcagctccataagcatctcaatgatttccatgtcttgctcgataaattcccgcttttggatcccgaggacgaagctaaagacgggatcaaggatgatctcagagtcaaattcagcatcatttgtgcatctctcggcttttccaagaaacaatttgagtataaaggatacccgaatccttcctccaatctcgacttttaagacctccctccatcaaaacactcttgtattgtatgtatggctttcaaagtttctctcgtttcctcaaagttkgtatttttaagagaagtgtgtgtgtagacaatctatgttttattggcttgtccttttttctggacatgtgaatgctgaccacaagtctaaatctggtggataacttcttttttagccttataatgaacaaacaaactcacatctgtagatatatatttgtataggtggtcggaggagatgttgagagaaatgcttggttgttgcaaggtttacatatctgaagcgcggaataagacggccctcgaagccattgagagagctttaaagccttttccaccagctgcaattgtcaacaagtttgaagatgcggcttatggcagggttggttacactgttgtatcctcgcttgctaacgggtcgtcttcttccttgaagaatgcggtgtttgctatggttaagactgctctcgacactatcaatcttgagttgcactgtggatcccatccccgccttggagtggttgaccacatatgctttcaccccttatctcaaacctctatagaacaagtttcttccgttgccaattcccttgcaatggatatcggctccattcttcgagttcctacatatctctatggagcagcagaaaaggagcagtgcaccctggattcgatcagaagaaagctggggtacttcaaggcaaacagggagggacatgaatgggcaggtgggtttgacctggagatggtgccactgaagccagacgcagggccacaagaggtgagcaaagccaaaggggttgtagcggttggggcgtgtgggtgggtaagtaactataacgtgcctgtcatgtcaaacgatctcaaggcagtgaggagaatagcgaggaagacgagcgagagaggagggggcttggcttcagtgcagacaatggcgctggtgcacggggaaggagtcatagaggttgcctgtaacttgttgaatccaagccaagtggggggagatgaagtacagggactgatcgagaggcttggcagagaggaaggtctgcttgtgggaaaagggtattatacggactatacacctgaccagatcgttgaaagatatatggacttgctcaacaattcataaatttcaaagtaaaaaaagtaaaaacagtatgatgttgtcattcttagaacgtattattaccgatatcgatcatttatcttcattttgtgtttagatgtgatatacattgccatgagtgacaattgaaattagcaaagattaaataaaaagtgaaatg

SEQ ID NO: 20322 - protein, 297 aa, Arabidopsis thaliana
  peptide (1)..(297): Ceres Seq. ID no. 15218567
MLREMLGCCKVYISEARNKTALEAIERALKPFPPAAIVNKFEDAAYGRVGYTVVSSLANGSSSSLKNAVFAMVKTALDTINLELHCGSHPRLGVVDHICFHPLSQTSIEQVSSVANSLAMDIGSILRVPTYLYGAAEKEQCTLDSIRRKLGYFKANREGHEWAGGFDLEMVPLKPDAGPQEVSKAKGVVAVGACGWVSNYNVPVMSNDLKAVRRIARKTSERGGGLASVQTMALVHGEGVIEVACNLLNPSQVGGDEVQGLIERLGREEGLLVGKGYYTDYTPDQIVERYMDLLNNS

SEQ ID NO: 20323 - protein, 293 aa, Arabidopsis thaliana
  peptide (1)..(293): Ceres Seq. ID no. 15218568
MLGCCKVYISEARNKTALEAIERALKPFPPAAIVNKFEDAAYGRVGYTVVSSLANGSSSSLKNAVFAMVKTALDTINLELHCGSHPRLGVVDHICFHPLSQTSIEQVSSVANSLAMDIGSILRVPTYLYGAAEKEQCTLDSIRRKLGYFKANREGHEWAGGFDLEMVPLKPDAGPQEVSKAKGVVAVGACGWVSNYNVPVMSNDLKAVRRIARKTSERGGGLASVQTMALVHGEGVIEVACNLLNPSQVGGDEVQGLIERLGREEGLLVGKGYYTDYTPDQIVERYMDLLNNS

SEQ ID NO: 20324 - protein, 226 aa, Arabidopsis thaliana
  peptide (1)..(226): Ceres Seq. ID no. 15218569
MVKTALDTINLELHCGSHPRLGVVDHICFHPLSQTSIEQVSSVANSLAMDIGSILRVPTYLYGAAEKEQCTLDSIRRKLGYFKANREGHEWAGGFDLEMVPLKPDAGPQEVSKAKGVVAVGACGWVSNYNVPVMSNDLKAVRRIARKTSERGGGLASVQTMALVHGEGVIEVACNLLNPSQVGGDEVQGLIERLGREEGLLVGKGYYTDYTPDQIVERYMDLLNNS

SEQ ID NO: 20325 - DNA, 1690 bp, Arabidopsis thaliana
  misc_feature (1)..(1690): Ceres Seq. ID no. 13647016
tttcttctcttcctcctacattctcgactctctctttttattagggttttcaattttaatcaaaaaaaaaccctcaaatctcatttttggatttggtttcttctgcgatctctgagattcaatttcttctatcaaaggaaacaaaaaacttcatctttccgaagattttttttccttccttctggagctcttttgaatcaggtgaatttctaattgaatctgaaagtttacgatgaacaatttgatatgatgataagttttgtttgatggagctttcaccaacaagcagtgacaagaaaacaatgaagagatggtttttcatagataaacgagttggatagagtgttattgaagataaagaaagcaaaaaacagaagttcttgcattgaagcattggttttagagtttattgaagcattgtttagagttttgattaatggatttaaactcaaaccacaaatcctctgttcttaaagatccttcaccatcagttaaccaatcaagactcggcgtgtctagtagatttatgatgagtcaatggaagaaacctgcgaaactcgatgatgttagatccaatggttggttagatgcaatgatttcatcttctccaccgcgtaagaagcttgtcaaagattttaatgttgaagttgctcctgaagatgattttgctcaacgtgcttggatggtgaaatatccttcggcgattagctcgtttgcgcatattgcagctcaagcaaagaagaaaaagattgctgtatttctagattatgatggtactctttctccaatagttgatgatcctgatcgtgccatcatgtctgatgcaatgcgttctgcggttaaagatgtcgcgagttacttcccaaccgcaataattagcggtagaagccgtgacaaggtttatcagttggtaggactaacagaactttattacgcgggtagtcatggaatggacataatgacttcttctgatggtccgaattgtttcaaatccactgaccaacagggtaaggaagtgaatctgtttcagcccgcgagagaattcataccggttatcgacgaggtttttagaacccttgttgagaaaatgaaagatatcaaaggtgcaaaagtagagaaccacaagttctgtgcatctgtacattaccgtaacgttgacgaaaaggattggcctattattgctcagcgtgttcatgaccacttgaaacaataccctcgtttgcgtctaactcatgggaggaaggttttagaggttcgtcctgtgatagactggaacaaaggaagagcggtcgagtttctattagaatctctcggattaagcaataaagacgatttgcttcctatctacattggtgatgacacaaccgatgaagatgcgttcaaggtactgagagatgggaaccgaggtttcggcatcctagtatcgtctataccgaaagaaagcaatgcgttttactcccttagagatccatccgaggtgaagaagtttctaaagactttggtgaaatgggcaaagttggagaagaattctactggtttttgaataatatagtggaattttatgattaaatgcttatttacacttttttttgtttctttaatcttttttcatctctacccagttttagtcacagcttaatttatgattttccatttatctggtggaagttaagttattaaagttacatgt

SEQ ID NO: 20326 - protein, 368 aa, Arabidopsis thaliana
  peptide (1)..(368): Ceres Seq. ID no. 13647017
MDLNSNHKSSVLKDPSPSVNQSRLGVSSRFMMSQWKKPAKLDDVRSNGWLDAMISSSPPRKKLVKDFNVEVAPEDDFAQRAWMVKYPSAISSFAHIAAQAKKKKIAVFLDYDGTLSPIVDDPDRAIMSDAMRSAVKDVASYFPTAIISGRSRDKVYQLVGLTELYYAGSHGMDIMTSSDGPNCFKSTDQQGKEVNLFQPAREFIPVIDEVFRTLVEKMKDIKGAKVENHKFCASVHYRNVDEKDWPIIAQRVHDHLKQYPRLRLTHGRKVLEVRPVIDWNKGRAVEFLLESLGLSNKDDLLPIYIGDDTTDEDAFKVLRDGNRGFGILVSSIPKESNAFYSLRDPSEVKKFLKTLVKWAKLEKNSTGF

SEQ ID NO: 20327 - protein, 338 aa, Arabidopsis thaliana
  peptide (1)..(338): Ceres Seq. ID no. 13647018
MMSQWKKPAKLDDVRSNGWLDAMISSSPPRKKLVKDFNVEVAPEDDFAQRAWMVKYPSAISSFAHIAAQAKKKKIAVFLDYDGTLSPIVDDPDRAIMSDAMRSAVKDVASYFPTAIISGRSRDKVYQLVGLTELYYAGSHGMDIMTSSDGPNCFKSTDQQGKEVNLFQPAREFIPVIDEVFRTLVEKMKDIKGAKVENHKFCASVHYRNVDEKDWPIIAQRVHDHLKQYPRLRLTHGRKVLEVRPVIDWNKGRAVEFLLESLGLSNKDDLLPIYIGDDTTDEDAFKVLRDGNRGFGILVSSIPKESNAFYSLRDPSEVKKFLKTLVKWAKLEKNSTGF

SEQ ID NO: 20328 - protein, 337 aa, Arabidopsis thaliana
  peptide (1)..(337): Ceres Seq. ID no. 13647019
MSQWKKPAKLDDVRSNGWLDAMISSSPPRKKLVKDFNVEVAPEDDFAQRAWMVKYPSAISSFAHIAAQAKKKKIAVFLDYDGTLSPIVDDPDRAIMSDAMRSAVKDVASYFPTAIISGRSRDKVYQLVGLTELYYAGSHGMDIMTSSDGPNCFKSTDQQGKEVNLFQPAREFIPVIDEVFRTLVEKMKDIKGAKVENHKFCASVHYRNVDEKDWPIIAQRVHDHLKQYPRLRLTHGRKVLEVRPVIDWNKGRAVEFLLESLGLSNKDDLLPIYIGDDTTDEDAFKVLRDGNRGFGILVSSIPKESNAFYSLRDPSEVKKFLKTLVKWAKLEKNSTGF

SEQ ID NO: 20329 - DNA, 1009 bp, Arabidopsis thaliana
  misc_feature (1)..(1009): Ceres Seq. ID no. 13648400
  misc_feature (1)..(1009): Ortholog of  Ceres SEQ ID NO 13654553 as cited in SEQ ID NO 68417
  misc_feature (1)..(1009): Ortholog of  Ceres SEQ ID NO 15175178 as cited in SEQ ID NO 0
gagaataatctcctctctctctaacaaactcgcaaactcacatttgtggtactctcagtgttagacaagtccgatcaagtttaagcagtcatggcggttttgcttcctctgtttcttctctctttcatgtttacctattcaaacgcggcggtttgtgtgtgcaaggacgctaacgagctggatcttcagaaggtgatagacttcgcatgtggaggaggtgctgactgtgcacagattcagacgaccggagcttgttatcaaccaaacaccctcaagaaccactgtgacgttgccgttaacagctactatcaacagaaagcttccaccggtgccacatgtgacttcaacggcgccgccgtcatctccacttcccctccttcgactacgtcaagctgtttatctagttctagttccaacggaacccccactgccggatatccatccaccggaaattcaaccacagcaagtccaggcaccacaaatccatccacaggcaattcaacaaacagcacactacccactaatgataagccgacttcatctacgataacgtttcctgacagtactactatgggaccatctagcagcacgagtggtgatcccaacggtggagaagagctatccgtcagaaccacgacgatcatcttactgactaccatcgctgccgtggcattgagggtttaggtaagatcatctcaagatgatgacgaggacgcttatttgttgtggacggctgagataatgccaagttaattagagcctatctttcttcccaccgaattttaatctttaatttccaattaggattgtgactctcgctcgtcttcttaagtattttggtttatagaaaatcttaatcaagagcttttttcttgctttcttttgtaaatccagaaaaaatgagatgctctttgggttgtattagttttacttataattatgccttcgccaataaagataacatgtttctcgaaaaaaaaaaaaaaaaaaactcgagggggggcccggt

SEQ ID NO: 20330 - protein, 197 aa, Arabidopsis thaliana
  peptide (1)..(197): Ceres Seq. ID no. 13648401
MAVLLPLFLLSFMFTYSNAAVCVCKDANELDLQKVIDFACGGGADCAQIQTTGACYQPNTLKNHCDVAVNSYYQQKASTGATCDFNGAAVISTSPPSTTSSCLSSSSSNGTPTAGYPSTGNSTTASPGTTNPSTGNSTNSTLPTNDKPTSSTITFPDSTTMGPSSSTSGDPNGGEELSVRTTTIILLTTIAAVALRV

SEQ ID NO: 20331 - protein, 185 aa, Arabidopsis thaliana
  peptide (1)..(185): Ceres Seq. ID no. 13648402
MFTYSNAAVCVCKDANELDLQKVIDFACGGGADCAQIQTTGACYQPNTLKNHCDVAVNSYYQQKASTGATCDFNGAAVISTSPPSTTSSCLSSSSSNGTPTAGYPSTGNSTTASPGTTNPSTGNSTNSTLPTNDKPTSSTITFPDSTTMGPSSSTSGDPNGGEELSVRTTTIILLTTIAAVALRV

SEQ ID NO: 20332 - DNA, 643 bp, Arabidopsis thaliana
  misc_feature (1)..(643): Ceres Seq. ID no. 13648014
ggtcaacacgaaaaagatctaaacatctaccaaacacaatccaaatatatatgtaaaaatgcaaaacctctcaatactacttgtgtgtagcttttgcatacttggccatgtatctagcgctggaatcaggattggtaacgaactcaaaaacaaaaaactcttatggatgagatgttattccaaagatgacgttataggtccattaataataccgatcggagggcataggttcaattattttggtaccaacatatttgctacgactcgtttcatgtgtaccttgagacaagtgcctaattatagacaccatcaaaactttacagcatttaaactttacagtgcttcagatgatggaggcgtatgggattggagagaaagagaagatgggatctatctaaagataaaagctgagagaggtgttaatagaccggtttttatgcataaaaaatatgattggatatattaaaaacgttaacaagctatttgaatgtaagaagatttaaatttttaatattcaatgagagtgtaaaatgataataacattatttgtattgtgttgagtatatcatttatgtataaaatctaaaatttgtatgttatacatttcattatttgtaaatctataataaaacaaatgttattc

SEQ ID NO: 20333 - protein, 135 aa, Arabidopsis thaliana
  peptide (1)..(135): Ceres Seq. ID no. 13648015
MQNLSILLVCSFCILGHVSSAGIRIGNELKNKKLLWMRCYSKDDVIGPLIIPIGGHRFNYFGTNIFATTRFMCTLRQVPNYRHHQNFTAFKLYSASDDGGVWDWREREDGIYLKIKAERGVNRPVFMHKKYDWIY

SEQ ID NO: 20334 - protein, 99 aa, Arabidopsis thaliana
  peptide (1)..(99): Ceres Seq. ID no. 13648016
MRCYSKDDVIGPLIIPIGGHRFNYFGTNIFATTRFMCTLRQVPNYRHHQNFTAFKLYSASDDGGVWDWREREDGIYLKIKAERGVNRPVFMHKKYDWIY

SEQ ID NO: 20335 - DNA, 1146 bp, Arabidopsis thaliana
  misc_feature (1)..(1146): Ceres Seq. ID no. 13648017
gaattcttactaaaaaaacacaacgaactcaaatcttcaatcttcatcttactctctaattgctttcctattccgatctctgtttcttcataaagtctcaatctttttttctctatggccggaactaaagattctcatgtagtggagattccagtagatgaagagcataaagagagacaacaacaacaacagttggttgcggtctcaaatccgggaatgggaatactcaaagtgattcagcagcatccgttgtctgaaatctcagagagtccaggacatttgttgcttttgaagttatggcaaagagaagaagatttgttctgtcgtcgtgttcttcttaaagaatcaagactagagtcaatcaaaagagagatctttcagctttgttgtttcttcctagtcttccatgggttcttcttcacacttgtctactcttcttcttgttctgatgatgctgacgtggtgaaaagtaatgcggtttgcaagaaatggtggataccttctgcagtgtcattagctacttcattggttctggtgtttcttgttcaagctaagctgtttgtgttctggaaagtttacagaggtgttaatagggagaggaatgataatagaacgcttacacggtgtgttttggagttgaggatgaaagggtcgagctttgatttgtcgaaagagccgatgagtgggaagaggatgaagagttcaagcgttgagatcaagtggaaacctgttacttggttctctcagtatttgataactattgttcttctttgctctgcagggttgttcttcccggtctcaaagttcatcctctgcggattttgacaaactcttcctattcactgtttgttcggactctgcattctttcttcaaccttcattgtggggatgatgcttttggtccgatcttaccattggcctctgttctagctttgagagagtagctgtcaaatctcccagactgaagattcgccggagggaataagaacaacctgtaacttttagcagtactcacacatagtagaaaattgatgtaattcgggattagaattctgatcttgatcttattaatttcattcttcgttaataataaacaacattgcttgtatagtaacaaatttttgcaataaataaaatgccagattc

SEQ ID NO: 20336 - protein, 236 aa, Arabidopsis thaliana
  peptide (1)..(236): Ceres Seq. ID no. 13648018
MAGTKDSHVVEIPVDEEHKERQQQQQLVAVSNPGMGILKVIQQHPLSEISESPGHLLLLKLWQREEDLFCRRVLLKESRLESIKREIFQLCCFFLVFHGFFFTLVYSSSCSDDADVVKSNAVCKKWWIPSAVSLATSLVLVFLVQAKLFVFWKVYRGVNRERNDNRTLTRCVLELRMKGSSFDLSKEPMSGKRMKSSSVEIKWKPVTWFSQYLITIVLLCSAGLFFPVSKFILCGF

SEQ ID NO: 20337 - protein, 202 aa, Arabidopsis thaliana
  peptide (1)..(202): Ceres Seq. ID no. 13648019
MGILKVIQQHPLSEISESPGHLLLLKLWQREEDLFCRRVLLKESRLESIKREIFQLCCFFLVFHGFFFTLVYSSSCSDDADVVKSNAVCKKWWIPSAVSLATSLVLVFLVQAKLFVFWKVYRGVNRERNDNRTLTRCVLELRMKGSSFDLSKEPMSGKRMKSSSVEIKWKPVTWFSQYLITIVLLCSAGLFFPVSKFILCGF

SEQ ID NO: 20338 - DNA, 1289 bp, Arabidopsis thaliana
  misc_feature (1)..(1289): Ceres Seq. ID no. 14302919
  misc_feature (1)..(1289): Ortholog of  Ceres SEQ ID NO 13595497 as cited in SEQ ID NO 51127
  misc_feature (1)..(1289): Ortholog of  Ceres SEQ ID NO 14306765 as cited in SEQ ID NO 53275
  misc_feature (1)..(1289): Ortholog of  Ceres SEQ ID NO 14314046 as cited in SEQ ID NO 59316
ggtactgctgcacaagtgtagaggcagtggcacaacatctttaagaaagagagagagaaagagtcatttattcatttcctcgcttaaaaatcttgagcacccagacagaattcttctttcttctttctggggttgagaaaaatgagtgaaagagatgatggattggggctaagtttgagcttgagtttaggttttaatcaaaaggacccgtcctcgaggttaaatccaatgcctctggcttcttatgcatcttcatcacacatgcagcatatgcagcagagcaattataaccatcctcaaaagattcagaacacttggattaacatgtttcagtcatcagagagaaactcggacatgagatcgtttctccggggaatagacgtaaacagagctccatcgacggtggtggttgacgtggaggatgaaggcgccggagtttcgtctccgaacagcaccgtctcaagcgtgatgagcgggaagaggagcgagcgagagctaatggctgcggcagctgcagttggaggaggaggtagagtagaagataatgagattgagagagcttcttgctcgctcggcggtggtagcgacgatgaagacggtagcgggaacggagatgactgttcgaggaagaaactccgattgtctaaagaacaagctttggttcttgaagaaacttttaaagaacatagtacactcaatccgaagcaaaagatggctttggctaagcaattgaatctgaggacgagacaagttgaagtgtggttccaaaaccgaagggcaaggacgaagctgaagcaaacggaagtagactgtgaatatcttaagagatgttgcgagaatctaacggatgagaatcggagattgcaaaaggaagtgagtgagcttagggctttaaagctttctccacacttatacatgcacatgaaacctcccactactctcacaatgtgtccttcttgcgagcgagtcgctgttacgtcatcttcgtcatcggtggctcctcctgtgatgaattcatcgtctccgatgggtccgatgagtccgatgagtccgtgggctgccatgcctctacggcaacgacctgctgctggttctcattagagtttaattagtctaaagataataggtttggtgatttgtttttattatatcgttgaacggacttggaagttcttttcaagagttggtcccatgctcttctttcctttgttttattcagtttctatttatagctgaattctggataatggaaaatctactaatattattgtccaattattagtttgggg

SEQ ID NO: 20339 - protein, 319 aa, Arabidopsis thaliana
  peptide (1)..(319): Ceres Seq. ID no. 14302920
MSERDDGLGLSLSLSLGFNQKDPSSRLNPMPLASYASSSHMQHMQQSNYNHPQKIQNTWINMFQSSERNSDMRSFLRGIDVNRAPSTVVVDVEDEGAGVSSPNSTVSSVMSGKRSERELMAAAAAVGGGGRVEDNEIERASCSLGGGSDDEDGSGNGDDCSRKKLRLSKEQALVLEETFKEHSTLNPKQKMALAKQLNLRTRQVEVWFQNRRARTKLKQTEVDCEYLKRCCENLTDENRRLQKEVSELRALKLSPHLYMHMKPPTTLTMCPSCERVAVTSSSSSVAPPVMNSSSPMGPMSPMSPWAAMPLRQRPAAGSH

SEQ ID NO: 20340 - protein, 290 aa, Arabidopsis thaliana
  peptide (1)..(290): Ceres Seq. ID no. 14302921
MPLASYASSSHMQHMQQSNYNHPQKIQNTWINMFQSSERNSDMRSFLRGIDVNRAPSTVVVDVEDEGAGVSSPNSTVSSVMSGKRSERELMAAAAAVGGGGRVEDNEIERASCSLGGGSDDEDGSGNGDDCSRKKLRLSKEQALVLEETFKEHSTLNPKQKMALAKQLNLRTRQVEVWFQNRRARTKLKQTEVDCEYLKRCCENLTDENRRLQKEVSELRALKLSPHLYMHMKPPTTLTMCPSCERVAVTSSSSSVAPPVMNSSSPMGPMSPMSPWAAMPLRQRPAAGSH

SEQ ID NO: 20341 - protein, 279 aa, Arabidopsis thaliana
  peptide (1)..(279): Ceres Seq. ID no. 14302922
MQHMQQSNYNHPQKIQNTWINMFQSSERNSDMRSFLRGIDVNRAPSTVVVDVEDEGAGVSSPNSTVSSVMSGKRSERELMAAAAAVGGGGRVEDNEIERASCSLGGGSDDEDGSGNGDDCSRKKLRLSKEQALVLEETFKEHSTLNPKQKMALAKQLNLRTRQVEVWFQNRRARTKLKQTEVDCEYLKRCCENLTDENRRLQKEVSELRALKLSPHLYMHMKPPTTLTMCPSCERVAVTSSSSSVAPPVMNSSSPMGPMSPMSPWAAMPLRQRPAAGSH

SEQ ID NO: 20342 - DNA, 664 bp, Arabidopsis thaliana
  misc_feature (1)..(664): Ceres Seq. ID no. 14302927
gatcacaaatatcatcttactaaaataaaaatccaatggatccatcagaatttcccttcgatatcgaagcttacaaaagacaatttcatatcaaagagaggtatatcatcaaccggtttagagagcgtcacaaaaaaattgaagaagattatccacgtcgcaataaaagaacatatatcaagagggatcatgtagcaccaaactaaaggttgattgacaactactttgctattcaacctacgtatgatgatgcaatgtttcgacggtgattccggatgcgaaaacatgtttttcttcgaatcgttggagccttatcaagaaatgacgactacttcacccaacgtgttgacgaaacaaataaagaaggtatatctccactagcaaaatgtatcacggccatgcggatgttagcatatggtatggcgtcagacacggtggatgaatacatcaaaataggaggttctacaacattagagtgcttgcgtagattctgtaatggaatcatacaattgtacgagcaagaatatcttagagcttgtcgcatctggtccccatctttttgttttctactgcgttgaatccacgtatgattttttgctttttcaacaccctcattgtaagagttcaacagttaaataaattattcaacatctccattgcacat

SEQ ID NO: 20343 - protein, 100 aa, Arabidopsis thaliana
  peptide (1)..(100): Ceres Seq. ID no. 14302928
MRKHVFLRIVGALSRNDDYFTQRVDETNKEGISPLAKCITAMRMLAYGMASDTVDEYIKIGGSTTLECLRRFCNGIIQLYEQEYLRACRIWSPSFCFLLR

SEQ ID NO: 20344 - protein, 64 aa, Arabidopsis thaliana
  peptide (1)..(64): Ceres Seq. ID no. 14302929
DHKYHLTKIKIQWIHQNFPSISKLTKDNFISKRGISSTGLESVTKKLKKIIHVAIKEHISRGIM

SEQ ID NO: 20345 - protein, 59 aa, Arabidopsis thaliana
  peptide (1)..(59): Ceres Seq. ID no. 14302930
MRMLAYGMASDTVDEYIKIGGSTTLECLRRFCNGIIQLYEQEYLRACRIWSPSFCFLLR

SEQ ID NO: 20346 - DNA, 1050 bp, Arabidopsis thaliana
  misc_feature (1)..(1050): Ceres Seq. ID no. 13647648
gaatactttgtctgtttcttcttcctgtggcttctgggtctttgtcaacatcaaagctctttactttttcaacttactttatcgtgcgtctgtacggaccacaaaaggctctctctttatttctctgtgagatttttttaggatctgagagagccaaagatcatggaggaaagccaagaacttgccttgacccagttgagaaaatcggtcgagaaactctcttcttctactgagggatatgacaaaccaacattgatgaggttcctggtggcaagatcaatggacccagtcaaggcagcaaagatgtttgtagattggcaaaaatggagagcctccatggttcctccaactggattcatccctgagtcagaagtgcaggatgaattggaattcagaaaggtctgtcttcagggtccgaccaaatccggacacccattggtgcttgtcataacctctaagcattttgcttctaaggatccagctaacttcaagaagtttgttgtttatgcgctagacaaaacaatcgcaagtggcaacaatggcaaagaagttggaggtgagaaattagtagccgttattgatctggcaaacattacatacaagaaccttgatgctcgtggattgatcactggctttcaattcttacaatcttactacccggaacgccttgcaaaatgctacattttgcatatgcccggattcttcgtgaccgtttggaaattcgtctgccgttttctagagaaagcaactcaggaaaagattgtgatagttacggatggagaagaacagagaaaattcgaggaagagatcggagcagatgctttaccggaagagtacggtggccgagctaagctcacagcaatccaagatgttcttcttcctcaggctgctccagtaactctaacaaacaataatgtttagctctttatttttggaagcattaacctgaatatttgtaatggtcagaacataactagtggtacatctctaaatttccgaaaaaaaaaaaaaaaaaaactcgaggggggggcccggtacccaattcgccct

SEQ ID NO: 20347 - protein, 252 aa, Arabidopsis thaliana
  peptide (1)..(252): Ceres Seq. ID no. 13647649
MEESQELALTQLRKSVEKLSSSTEGYDKPTLMRFLVARSMDPVKAAKMFVDWQKWRASMVPPTGFIPESEVQDELEFRKVCLQGPTKSGHPLVLVITSKHFASKDPANFKKFVVYALDKTIASGNNGKEVGGEKLVAVIDLANITYKNLDARGLITGFQFLQSYYPERLAKCYILHMPGFFVTVWKFVCRFLEKATQEKIVIVTDGEEQRKFEEEIGADALPEEYGGRAKLTAIQDVLLPQAAPVTLTNNNV

SEQ ID NO: 20348 - protein, 221 aa, Arabidopsis thaliana
  peptide (1)..(221): Ceres Seq. ID no. 13647650
MRFLVARSMDPVKAAKMFVDWQKWRASMVPPTGFIPESEVQDELEFRKVCLQGPTKSGHPLVLVITSKHFASKDPANFKKFVVYALDKTIASGNNGKEVGGEKLVAVIDLANITYKNLDARGLITGFQFLQSYYPERLAKCYILHMPGFFVTVWKFVCRFLEKATQEKIVIVTDGEEQRKFEEEIGADALPEEYGGRAKLTAIQDVLLPQAAPVTLTNNNV

SEQ ID NO: 20349 - protein, 213 aa, Arabidopsis thaliana
  peptide (1)..(213): Ceres Seq. ID no. 13647651
MDPVKAAKMFVDWQKWRASMVPPTGFIPESEVQDELEFRKVCLQGPTKSGHPLVLVITSKHFASKDPANFKKFVVYALDKTIASGNNGKEVGGEKLVAVIDLANITYKNLDARGLITGFQFLQSYYPERLAKCYILHMPGFFVTVWKFVCRFLEKATQEKIVIVTDGEEQRKFEEEIGADALPEEYGGRAKLTAIQDVLLPQAAPVTLTNNNV

SEQ ID NO: 20350 - DNA, 1491 bp, Arabidopsis thaliana
  misc_feature (1)..(1491): Ceres Seq. ID no. 14309794
tcttcatacaacattttagctttactttttctctttactcttctctctctctttctctttctctttctctttcactcgttctctctcactcactctcttcacacacagatccaagatggcctcttcaatggctagcaatgatttccagctccctccacgtttcttcactgttttcgtctcccatttcagctcagagttcatggtgatcccagtttcctactacgatcacattccacatcgtttccccaagactgtgattctccgaggacctggtggatgctcctggaaggtagcgacggagataaaggatgatgaagtgcttttttcacaaggatggcccaaatttgttcgggataatactcttaacgatggagactttttgacctttgcctataatggagctcacatattcgaggtcagtatctttcgcggctacgacgcatgtaaagagattagcgaagtcactgaattggaagaggaagaagaagacagtgttatatctctgagcagtgaagacacagacactggtgctaaatctgagatgaagaatacagtcccggaaggcagagacaaaggaaagtcaaaagtggaagttgtggaggattctgatgacgatgaggaggaggatagtgtttattctgaaagcagtgaagaaacagagacagacactgattctgaattcaaggtggccaagccaacaataccaaaaagccagaagaaaggaaagaagaaagaacaagttgtggagtcctctgatgacgaggaagacgaagaggaggacagtgacagtgattacattgaaacgtttggtcaattggatattgaagagaattccatcagtgaggaggacagttcttatgctcctgataaagaagacacagccactgcctcttttgtcaaaccaaaggttgcaaataaggttgctaatctgaagaggaaagaggcggcaaagaagaggaagaaagtcgatcccatgatcaagaatcctgagagatacctcgatgatcctaagaatatccatttcgagacaaacgtgaagaataggttatacgagctgttggttcatgcacaactggtgaaagactattgcttgaggtttggagactatgttaactacatcgacaggttcgggaaactaagtgctaaaacagccaaatggaaggatcagcgtgtttgtatcaaaagatggatgcgcatatgcaagaggaacaagttgaagaaagaagaccgcattttgtgtgagctcttgcgcaagggaactttcgtttacgcaatcaaactccatgtcatccgcggtaaggatctgtagacgctagcagtatgagtagaggaagagatttggctacttaattatctctctgatttccatcttgttgtgtgatcaagcaaacttatgtgtttcattattgtctacttcagattgtatgaccttctctcttgttctctcatgaatctatttctgaatacaatatctaatctttgagctaaaag

SEQ ID NO: 20351 - protein, 397 aa, Arabidopsis thaliana
  peptide (1)..(397): Ceres Seq. ID no. 14309795
MASSMASNDFQLPPRFFTVFVSHFSSEFMVIPVSYYDHIPHRFPKTVILRGPGGCSWKVATEIKDDEVLFSQGWPKFVRDNTLNDGDFLTFAYNGAHIFEVSIFRGYDACKEISEVTELEEEEEDSVISLSSEDTDTGAKSEMKNTVPEGRDKGKSKVEVVEDSDDDEEEDSVYSESSEETETDTDSEFKVAKPTIPKSQKKGKKKEQVVESSDDEEDEEEDSDSDYIETFGQLDIEENSISEEDSSYAPDKEDTATASFVKPKVANKVANLKRKEAAKKRKKVDPMIKNPERYLDDPKNIHFETNVKNRLYELLVHAQLVKDYCLRFGDYVNYIDRFGKLSAKTAKWKDQRVCIKRWMRICKRNKLKKEDRILCELLRKGTFVYAIKLHVIRGKDL

SEQ ID NO: 20352 - protein, 393 aa, Arabidopsis thaliana
  peptide (1)..(393): Ceres Seq. ID no. 14309796
MASNDFQLPPRFFTVFVSHFSSEFMVIPVSYYDHIPHRFPKTVILRGPGGCSWKVATEIKDDEVLFSQGWPKFVRDNTLNDGDFLTFAYNGAHIFEVSIFRGYDACKEISEVTELEEEEEDSVISLSSEDTDTGAKSEMKNTVPEGRDKGKSKVEVVEDSDDDEEEDSVYSESSEETETDTDSEFKVAKPTIPKSQKKGKKKEQVVESSDDEEDEEEDSDSDYIETFGQLDIEENSISEEDSSYAPDKEDTATASFVKPKVANKVANLKRKEAAKKRKKVDPMIKNPERYLDDPKNIHFETNVKNRLYELLVHAQLVKDYCLRFGDYVNYIDRFGKLSAKTAKWKDQRVCIKRWMRICKRNKLKKEDRILCELLRKGTFVYAIKLHVIRGKDL

SEQ ID NO: 20353 - protein, 369 aa, Arabidopsis thaliana
  peptide (1)..(369): Ceres Seq. ID no. 14309797
MVIPVSYYDHIPHRFPKTVILRGPGGCSWKVATEIKDDEVLFSQGWPKFVRDNTLNDGDFLTFAYNGAHIFEVSIFRGYDACKEISEVTELEEEEEDSVISLSSEDTDTGAKSEMKNTVPEGRDKGKSKVEVVEDSDDDEEEDSVYSESSEETETDTDSEFKVAKPTIPKSQKKGKKKEQVVESSDDEEDEEEDSDSDYIETFGQLDIEENSISEEDSSYAPDKEDTATASFVKPKVANKVANLKRKEAAKKRKKVDPMIKNPERYLDDPKNIHFETNVKNRLYELLVHAQLVKDYCLRFGDYVNYIDRFGKLSAKTAKWKDQRVCIKRWMRICKRNKLKKEDRILCELLRKGTFVYAIKLHVIRGKDL

SEQ ID NO: 20354 - DNA, 579 bp, Arabidopsis thaliana
  misc_feature (1)..(579): Ceres Seq. ID no. 12606011
aaaaaaaaaattcatttcgtttccgatcgcacttcttctcaagtaaatttaatagacgtttgttgggtgatttaagaagatgggtcagatccagtactccgacaaatatttcgatgatactttcgaatacaggcacgttgtacttcctccggaagttgctaagcttttacctaagaatcgtattctttcggaaagtgaatggagagccatcggagtgcagcaaagtcgtggatgggttcattacgcgattcatcgtcctgagccacatatcatgctctttaggaggcctcttaactaccagcaggagcaccaagctcagattgctaagtagaagaattatgcaaaattctccctaatctctgtttatgtctctcgtaaacgaggttttaaaatactactctgatgttttgttcctgtagttttttttattgtgttcatgaattctcttcagtggagaatcatgtgagtttggtagaacaacttttaatgttatgttaagtctggtcctttgctagactttggttggatccacgtttgaacttcttcatggttaagaatgaagacgttatttctcatgct

SEQ ID NO: 20355 - protein, 117 aa, Arabidopsis thaliana
  peptide (1)..(117): Ceres Seq. ID no. 12606012
KKNSFRFRSHFFSSKFNRRLLGDLRRWVRSSTPTNISMILSNTGTLYFLRKLLSFYLRIVFFRKVNGEPSECSKVVDGFITRFIVLSHISCSLGGLLTTSRSTKLRLLSRRIMQNSP

SEQ ID NO: 20356 - protein, 83 aa, Arabidopsis thaliana
  peptide (1)..(83): Ceres Seq. ID no. 12606013
MGQIQYSDKYFDDTFEYRHVVLPPEVAKLLPKNRILSESEWRAIGVQQSRGWVHYAIHRPEPHIMLFRRPLNYQQEHQAQIAK

SEQ ID NO: 20357 - protein, 80 aa, Arabidopsis thaliana
  peptide (1)..(80): Ceres Seq. ID no. 12606014
MILSNTGTLYFLRKLLSFYLRIVFFRKVNGEPSECSKVVDGFITRFIVLSHISCSLGGLLTTSRSTKLRLLSRRIMQNSP

SEQ ID NO: 20358 - DNA, 950 bp, Arabidopsis thaliana
  misc_feature (1)..(950): Ceres Seq. ID no. 13647678
gtcgttttagcttcccgacttcacttctaatctcagactctgcgacgctctttacaaaccgccggaaaaccgccatgaactttgtcgtcagacgggtaggctccattttgccgtcgatacgtcacggcggcgtttcccagattcgactcgcgagaacagaggcaggtcagccgagacggcgaaacaagttgccttctcttccgctaaagaagaaggaagagaaatccgagtggtggatagtagacggagagatgcacgagatcggtgatcacgtccctcctcgtgagcgtttcacaatccccagggacaacattccgaacaaacgccgtaagcagctccgtgaccagttcatgcgccgcactcgcctcgtccttaaagaatcggaacatgagccatggtgcaaaaagtatatggaactatataacgagcttagagaaaactgggagaggctttattgggatgaagggtattcaaagaaactcgcaagtgatcatgcaaattatgaatccgctgaagaagacgatgaagattttaatccatacaggaacaggcggtctttcagcgatcaaacaaaggagcaagggtttaatagaactacacaaggtgataattgggagaaagtcagtcaaatcagggataagtttgagtatgatagagaaaggaggatgagagataaagcctttgcaccaatgaatgcagcaccagaatctcaagaatctagggacttgaattggaatgcacaaagacggccatttgatcctgatagattcgcaagggattgaatacccttaacatcacatggtagagcaggcgaagaatgagcaggctgctctgaagaaatagaataatataagtttgggtttagtttttactttatgcagtgaatatactttcatgtaagcaaattgcgtgctgcagatttttccaagttttcctgtattagttttttt

SEQ ID NO: 20359 - protein, 259 aa, Arabidopsis thaliana
  peptide (1)..(259): Ceres Seq. ID no. 13647679
RFSFPTSLLISDSATLFTNRRKTAMNFVVRRVGSILPSIRHGGVSQIRLARTEAGQPRRRNKLPSLPLKKKEEKSEWWIVDGEMHEIGDHVPPRERFTIPRDNIPNKRRKQLRDQFMRRTRLVLKESEHEPWCKKYMELYNELRENWERLYWDEGYSKKLASDHANYESAEEDDEDFNPYRNRRSFSDQTKEQGFNRTTQGDNWEKVSQIRDKFEYDRERRMRDKAFAPMNAAPESQESRDLNWNAQRRPFDPDRFARD

SEQ ID NO: 20360 - protein, 235 aa, Arabidopsis thaliana
  peptide (1)..(235): Ceres Seq. ID no. 13647680
MNFVVRRVGSILPSIRHGGVSQIRLARTEAGQPRRRNKLPSLPLKKKEEKSEWWIVDGEMHEIGDHVPPRERFTIPRDNIPNKRRKQLRDQFMRRTRLVLKESEHEPWCKKYMELYNELRENWERLYWDEGYSKKLASDHANYESAEEDDEDFNPYRNRRSFSDQTKEQGFNRTTQGDNWEKVSQIRDKFEYDRERRMRDKAFAPMNAAPESQESRDLNWNAQRRPFDPDRFARD

SEQ ID NO: 20361 - protein, 176 aa, Arabidopsis thaliana
  peptide (1)..(176): Ceres Seq. ID no. 13647681
MHEIGDHVPPRERFTIPRDNIPNKRRKQLRDQFMRRTRLVLKESEHEPWCKKYMELYNELRENWERLYWDEGYSKKLASDHANYESAEEDDEDFNPYRNRRSFSDQTKEQGFNRTTQGDNWEKVSQIRDKFEYDRERRMRDKAFAPMNAAPESQESRDLNWNAQRRPFDPDRFARD

SEQ ID NO: 20362 - DNA, 1824 bp, Arabidopsis thaliana
  misc_feature (1)..(1824): Ceres Seq. ID no. 13648124
gttttgtatagaaagctgagaaaggttatttttttacattacagaagtaagggatacaaagttgttagttcatcttctctccgctcagaagaagaaaaacttaaaaaaattcaacgtctgaatatggctaatccacttctctattctccgatcaacccacaattcttccaaccacttcttcccggtttcgccaaccacctggacattcctgtggcgttcttcttgaagtacttagtgggaactaacgtaggaaaaacggctgagctcagatcagatgcatcggagatgacatggaaagtgaagatagacggccggagactctctaatggttgggaagatttcacaatcgcacatgatctccgagttggtgacattgttgttttcagacaagaaggagagttagtgttccatgtcacagctttaggaccaagttgctgtgagattcaatacggagaagatacccttgaagaggataaaattgagaaactttgtgatacagagaatgtttcaagtaagaaaaagagtctaaagagagaagctgagtctgcaccagacaattcactagattcttgttttgtggccactgtcacgggttcgaatctaaagcgcgatacattgtatatcccgaaagagtttgcattgtcaaatggtctgatgaacaaatatcagattgtgttaatgaatgaagaaggagaatcatggaagatagacttgagacgcgaggcatataattacggccggttttacatgagaagaggctggagaagtttctgtattgctaatgggaagaaacctggagacgtttttgcattcagattggtcaaaaatgaagaaacacctgtgatacagttgttccctatgaccattgaagatttagacaaacttcagagccttccaagacacaagattcgaaaaacagaagcagctccttcttcaccagacctttcttcttttgtagccactgttacggcttcaaatctaagccgcgatagactgtatcttcccaagacgttcattatgtcaaatggtttgttgaagaaatttcagatgtgtctaatgaatgaagagggagaatcatggacgatagatgtgaaacatgaggcacatacaggccggtttttaacgataagaggttggagaagattctgtgtggctaatgggaagaaaccaggagacttgctcaaattcaaattagtccataacgaagaaacacctgtgctccagttgttacccttgaaaagtgaagatctacacaaacttgatcctagcaatgacacaaggcatggacagagtttagaagttaccaaaaaagagtttcttggcacagaagccacagaaaatgagtttcttggcgcagaagtttaccgcaatgactcctttaaagctagcgagaaagatactcttccttttgctgaacctatcaatgaagatgtaaggcaaggacaatgttcacaagctattaaacaagaatatgtttccacagaagagaaaaactcaacaagccaaaaccgatttgtgaccttaacacttacacattcaagtaaacttaatcttccgtttgaattcatgaaggggaatggaatcaaaaaggcggggaagataacgatggttgatagatacgatgcaaaatggcggacgtcactactgatggacaagatcggagcaatgagtttaggaagaggttcaaaaggtttctgtgaggttaatggtgttgagatgaatgagtcgtttgtcttggagttgatttgggaagacacagttcctcttcttaagttttgttccaaagtttgagaaccatattaacaatgtctaggatcatcgctc

SEQ ID NO: 20363 - protein, 596 aa, Arabidopsis thaliana
  peptide (1)..(596): Ceres Seq. ID no. 13648125
VLYRKLRKVIFLHYRSKGYKVVSSSSLRSEEEKLKKIQRLNMANPLLYSPINPQFFQPLLPGFANHLDIPVAFFLKYLVGTNVGKTAELRSDASEMTWKVKIDGRRLSNGWEDFTIAHDLRVGDIVVFRQEGELVFHVTALGPSCCEIQYGEDTLEEDKIEKLCDTENVSSKKKSLKREAESAPDNSLDSCFVATVTGSNLKRDTLYIPKEFALSNGLMNKYQIVLMNEEGESWKIDLRREAYNYGRFYMRRGWRSFCIANGKKPGDVFAFRLVKNEETPVIQLFPMTIEDLDKLQSLPRHKIRKTEAAPSSPDLSSFVATVTASNLSRDRLYLPKTFIMSNGLLKKFQMCLMNEEGESWTIDVKHEAHTGRFLTIRGWRRFCVANGKKPGDLLKFKLVHNEETPVLQLLPLKSEDLHKLDPSNDTRHGQSLEVTKKEFLGTEATENEFLGAEVYRNDSFKASEKDTLPFAEPINEDVRQGQCSQAIKQEYVSTEEKNSTSQNRFVTLTLTHSSKLNLPFEFMKGNGIKKAGKITMVDRYDAKWRTSLLMDKIGAMSLGRGSKGFCEVNGVEMNESFVLELIWEDTVPLLKFCSKV

SEQ ID NO: 20364 - protein, 555 aa, Arabidopsis thaliana
  peptide (1)..(555): Ceres Seq. ID no. 13648126
MANPLLYSPINPQFFQPLLPGFANHLDIPVAFFLKYLVGTNVGKTAELRSDASEMTWKVKIDGRRLSNGWEDFTIAHDLRVGDIVVFRQEGELVFHVTALGPSCCEIQYGEDTLEEDKIEKLCDTENVSSKKKSLKREAESAPDNSLDSCFVATVTGSNLKRDTLYIPKEFALSNGLMNKYQIVLMNEEGESWKIDLRREAYNYGRFYMRRGWRSFCIANGKKPGDVFAFRLVKNEETPVIQLFPMTIEDLDKLQSLPRHKIRKTEAAPSSPDLSSFVATVTASNLSRDRLYLPKTFIMSNGLLKKFQMCLMNEEGESWTIDVKHEAHTGRFLTIRGWRRFCVANGKKPGDLLKFKLVHNEETPVLQLLPLKSEDLHKLDPSNDTRHGQSLEVTKKEFLGTEATENEFLGAEVYRNDSFKASEKDTLPFAEPINEDVRQGQCSQAIKQEYVSTEEKNSTSQNRFVTLTLTHSSKLNLPFEFMKGNGIKKAGKITMVDRYDAKWRTSLLMDKIGAMSLGRGSKGFCEVNGVEMNESFVLELIWEDTVPLLKFCSKV

SEQ ID NO: 20365 - protein, 501 aa, Arabidopsis thaliana
  peptide (1)..(501): Ceres Seq. ID no. 13648127
MTWKVKIDGRRLSNGWEDFTIAHDLRVGDIVVFRQEGELVFHVTALGPSCCEIQYGEDTLEEDKIEKLCDTENVSSKKKSLKREAESAPDNSLDSCFVATVTGSNLKRDTLYIPKEFALSNGLMNKYQIVLMNEEGESWKIDLRREAYNYGRFYMRRGWRSFCIANGKKPGDVFAFRLVKNEETPVIQLFPMTIEDLDKLQSLPRHKIRKTEAAPSSPDLSSFVATVTASNLSRDRLYLPKTFIMSNGLLKKFQMCLMNEEGESWTIDVKHEAHTGRFLTIRGWRRFCVANGKKPGDLLKFKLVHNEETPVLQLLPLKSEDLHKLDPSNDTRHGQSLEVTKKEFLGTEATENEFLGAEVYRNDSFKASEKDTLPFAEPINEDVRQGQCSQAIKQEYVSTEEKNSTSQNRFVTLTLTHSSKLNLPFEFMKGNGIKKAGKITMVDRYDAKWRTSLLMDKIGAMSLGRGSKGFCEVNGVEMNESFVLELIWEDTVPLLKFCSKV

SEQ ID NO: 20366 - DNA, 931 bp, Arabidopsis thaliana
  misc_feature (1)..(931): Ceres Seq. ID no. 13593410
gcacaatggcggccaacctgatttctcccccggtggcttgcccgtgcgttacttcctgagagggggtagtcaatgggcttcctccccggagaaaaaaatggatggtcacgaagagaaacagagtctctgctgtcacggccatgattgtggagccactttctgttgtttcttcttcagcaattcagattcatcaatggtgggaacaaaaccctaattcgttactgttaatgacggaggctactggtggttattcgttggctagctattatacgtctttgggtttgtttgttatctctgttcctggtctttggtctctaatcaaacgctctgttaaatcaaagatagtgagaaagacgtttgttgttaatgacgtcaagaaggagccaaagcaagtagctggagagattctatctttcttcacaaggaagaatttcaatatcactgatcgtggagaaacaatcacatttgaaggaaagatggttccaagtagaggacaagctgctctgcttacgttttgtacatgtataagcttagcaagtgttggtcttgtcttaaccattacagttcctgattttggaaacaattggttcttcatcattctccttagtccactcgcaggagtgtattactggaaaaaggcgtcgaggaaagaggagataaaagtgaagatgatggtgggatcaaaagggagattggatgagattgtggttcaaggagatgatgttcaggtcgaagaaatgaggaaagagcttcagcttaatgagaaaggcatggtttatgtcaaaggtctctttgagagatcatcataatgataacattttagcctcccatttttgccttttggggaatgtgtctatacttgttttattaaggttgagattaatgactttttaactcatttcccatacttcatactaaacgaatcgatttg

SEQ ID NO: 20367 - protein, 235 aa, Arabidopsis thaliana
  peptide (1)..(235): Ceres Seq. ID no. 13593411
MVTKRNRVSAVTAMIVEPLSVVSSSAIQIHQWWEQNPNSLLLMTEATGGYSLASYYTSLGLFVISVPGLWSLIKRSVKSKIVRKTFVVNDVKKEPKQVAGEILSFFTRKNFNITDRGETITFEGKMVPSRGQAALLTFCTCISLASVGLVLTITVPDFGNNWFFIILLSPLAGVYYWKKASRKEEIKVKMMVGSKGRLDEIVVQGDDVQVEEMRKELQLNEKGMVYVKGLFERSS

SEQ ID NO: 20368 - protein, 222 aa, Arabidopsis thaliana
  peptide (1)..(222): Ceres Seq. ID no. 13593412
MIVEPLSVVSSSAIQIHQWWEQNPNSLLLMTEATGGYSLASYYTSLGLFVISVPGLWSLIKRSVKSKIVRKTFVVNDVKKEPKQVAGEILSFFTRKNFNITDRGETITFEGKMVPSRGQAALLTFCTCISLASVGLVLTITVPDFGNNWFFIILLSPLAGVYYWKKASRKEEIKVKMMVGSKGRLDEIVVQGDDVQVEEMRKELQLNEKGMVYVKGLFERSS

SEQ ID NO: 20369 - protein, 193 aa, Arabidopsis thaliana
  peptide (1)..(193): Ceres Seq. ID no. 13593413
MTEATGGYSLASYYTSLGLFVISVPGLWSLIKRSVKSKIVRKTFVVNDVKKEPKQVAGEILSFFTRKNFNITDRGETITFEGKMVPSRGQAALLTFCTCISLASVGLVLTITVPDFGNNWFFIILLSPLAGVYYWKKASRKEEIKVKMMVGSKGRLDEIVVQGDDVQVEEMRKELQLNEKGMVYVKGLFERSS

SEQ ID NO: 20370 - DNA, 857 bp, Arabidopsis thaliana
  misc_feature (1)..(857): Ceres Seq. ID no. 13647395
gaaactctctttttgtctctattgttgaaaaaatggaagtgagaggcccagtgatatggatgttcttaatgtgttgcatatttggtcacttaattgtaagtcataagaatgacttagtggaagccaaaagcttttcaaaatctgaagatttggaaatcgagaagagactacagactatcaacaaacccgccgtcaagatcatcaagactattgatggagaaatatacggatgtgtggatttcttcaagcaaccagcatttgatcatccttctatgaagaatcacacataccattacaagatgcgtctaatctggaaagaaatgggagaaagagagacaaacaatactgcttttggttacttatgggagaatggtgtgggttgtcccattggtacagtccctatggaaagagtcaccaaagacgatattttaagattagactcatttggtgataatcataaaccctgtggttcctggaacactaccacttatgatcctaataatgttgttcattacaaccaacatcgttttgcggtagctcgaacgaagaacataggaaggaggttcaatggagcaacgatggaactttgtataaccgctcctaaggttaagccaacccaattcagtgcttcaagacttcacattcagatgggaagggatttcctccaagccggtttgactgtaaatccagtattgtacaaggacaagcaacctcgaacttttgtctatacagatgtgagtcagtcacattattctagtcaattctttttctaatattttttttgaatatatatatatatgaaagaattaacatggatggaaaaaaaaaaaaaaaaaaaactcgagggggggcccggt

SEQ ID NO: 20371 - protein, 256 aa, Arabidopsis thaliana
  peptide (1)..(256): Ceres Seq. ID no. 13647396
NSLFVSIVEKMEVRGPVIWMFLMCCIFGHLIVSHKNDLVEAKSFSKSEDLEIEKRLQTINKPAVKIIKTIDGEIYGCVDFFKQPAFDHPSMKNHTYHYKMRLIWKEMGERETNNTAFGYLWENGVGCPIGTVPMERVTKDDILRLDSFGDNHKPCGSWNTTTYDPNNVVHYNQHRFAVARTKNIGRRFNGATMELCITAPKVKPTQFSASRLHIQMGRDFLQAGLTVNPVLYKDKQPRTFVYTDVSQSHYSSQFFF

SEQ ID NO: 20372 - protein, 246 aa, Arabidopsis thaliana
  peptide (1)..(246): Ceres Seq. ID no. 13647397
MEVRGPVIWMFLMCCIFGHLIVSHKNDLVEAKSFSKSEDLEIEKRLQTINKPAVKIIKTIDGEIYGCVDFFKQPAFDHPSMKNHTYHYKMRLIWKEMGERETNNTAFGYLWENGVGCPIGTVPMERVTKDDILRLDSFGDNHKPCGSWNTTTYDPNNVVHYNQHRFAVARTKNIGRRFNGATMELCITAPKVKPTQFSASRLHIQMGRDFLQAGLTVNPVLYKDKQPRTFVYTDVSQSHYSSQFFF

SEQ ID NO: 20373 - protein, 237 aa, Arabidopsis thaliana
  peptide (1)..(237): Ceres Seq. ID no. 13647398
MFLMCCIFGHLIVSHKNDLVEAKSFSKSEDLEIEKRLQTINKPAVKIIKTIDGEIYGCVDFFKQPAFDHPSMKNHTYHYKMRLIWKEMGERETNNTAFGYLWENGVGCPIGTVPMERVTKDDILRLDSFGDNHKPCGSWNTTTYDPNNVVHYNQHRFAVARTKNIGRRFNGATMELCITAPKVKPTQFSASRLHIQMGRDFLQAGLTVNPVLYKDKQPRTFVYTDVSQSHYSSQFFF

SEQ ID NO: 20374 - DNA, 551 bp, Arabidopsis thaliana
  misc_feature (1)..(551): Ceres Seq. ID no. 13648206
agctcactagtcccccccccccccccgccaaaattaaacctcaccgacggattcaattctctcgttctcaggccgtcttcatcgccggagcgttttcttacgaaaagaatgggcttctggacattgttaaaaggtctgctgctctttgcaaatgcactggcaatcctcaacgaagaccgtttccttgttccaagaggatggacactcggagaactccaccaaaccggtagaagaaactctcccaaaggccaaatcattggtctgatccatgcctgccagtacatgaggctacccctcatgctcattaacacagcagtcatcgtcttgaagcttatctccggttgaagattttgtgtagatgaagataaactacattgcgttcttcaaatgattgtgattagttacaaatctattttgtgtaggagttggaatttgtttttgtcatccctcgcactcaagtttggtgtgcattctacaacattcttctcatatttttacatgccaaatcaaaccaaaaaaaaaaaaaaaaaaaactcgagggggggcccggt

SEQ ID NO: 20375 - protein, 114 aa, Arabidopsis thaliana
  peptide (1)..(114): Ceres Seq. ID no. 13648207
SSLVPPPPPPKLNLTDGFNSLVLRPSSSPERFLTKRMGFWTLLKGLLLFANALAILNEDRFLVPRGWTLGELHQTGRRNSPKGQIIGLIHACQYMRLPLMLINTAVIVLKLISG

SEQ ID NO: 20376 - protein, 78 aa, Arabidopsis thaliana
  peptide (1)..(78): Ceres Seq. ID no. 13648208
MGFWTLLKGLLLFANALAILNEDRFLVPRGWTLGELHQTGRRNSPKGQIIGLIHACQYMRLPLMLINTAVIVLKLISG

SEQ ID NO: 20377 - protein, 75 aa, Arabidopsis thaliana
  peptide (1)..(75): Ceres Seq. ID no. 13648209
LTSPPPPPAKIKPHRRIQFSRSQAVFIAGAFSYEKNGLLDIVKRSAALCKCTGNPQRRPFPCSKRMDTRRTPPNR

SEQ ID NO: 20378 - DNA, 1233 bp, Arabidopsis thaliana
  misc_feature (1)..(1233): Ceres Seq. ID no. 12605597
  misc_feature (1)..(1233): Ortholog of  Ceres SEQ ID NO 13494050 as cited in SEQ ID NO 20553
  misc_feature (1)..(1233): Ortholog of  Ceres SEQ ID NO 15177308 as cited in SEQ ID NO 52713
aaagatatgcccaattgaagcaaaagccagaacagcttttaaattgcaatggtctcttcggttttatccatccctccacaaacttgtctacttccacgattacccatctctgattctgtcaattgcaaatcgaaaatagtgtactatcgctccacaagtgtccgaggaagctccgtcaagagacaatcaacggccagaactcgaagtttcactgagacaaatcgtcgaacaccttccgtgcaatccaaacatgaattctgggaagacccagatgatggtagcgacagtgaaagcgaatatgaaggagacgaagaaggtggtattggaaatgatttagattacgagagtgattgggaagatgactcgagagcccagaagcttactactacagacaattacgaggaagagcttgcaaaagaggttgaacaacttcttgaacctgaagaaagagtaattcttcagcaaaatgagaaaccaaatctcaagatgatctcaacaaagagttggaagccacttcagacacttgctctgtcaatgcagattcagttaatggataatcttattgaaaacggactagacattgatgatgttgacaaggacaaccaaaccgctcttcacaaagcaatcattggtaaaaaagaagcggtgattagtcatcttttgaggaaaggagctaataatcatcttcaagatcgtggcggtgcagctgcgattcatcatgcagcacaagaaggagcatcgcagccggtagtaatactattcaagtacaacgtagtcgtcaatgttgcagataatgaaggatgatgtccgttgcatataatagttcaaagcagaagtcgtggcatcacaaagatattgttgtccaacggtggtgataatacaacacgacggaaggatgagaaattatctttggacttggctctgtgctttggaagagatttcaagtcatatgatctggtcaagctattgaagattatgcccaccggggatatatagaaagagctggtgagattttgaatgatcaggttgagattactaaactgcatttgccattgcttggtttgattgtaatctacaccggtataagtggttaaggtagaagaaacccgattgagtttgtaattactgcttttatatattcgtggatgaacttgttattcgggtgtgtgtatcataatgtgcataacaaagatacacattgttatgtcatatatattaaattacaagcattgc

SEQ ID NO: 20379 - protein, 251 aa, Arabidopsis thaliana
  peptide (1)..(251): Ceres Seq. ID no. 12605598
MVSSVLSIPPQTCLLPRLPISDSVNCKSKIVYYRSTSVRGSSVKRQSTARTRSFTETNRRTPSVQSKHEFWEDPDDGSDSESEYEGDEEGGIGNDLDYESDWEDDSRAQKLTTTDNYEEELAKEVEQLLEPEERVILQQNEKPNLKMISTKSWKPLQTLALSMQIQLMDNLIENGLDIDDVDKDNQTALHKAIIGKKEAVISHLLRKGANNHLQDRGGAAAIHHAAQEGASQPVVILFKYNVVVNVADNEG

SEQ ID NO: 20380 - DNA, 672 bp, Arabidopsis thaliana
  misc_feature (1)..(672): Ceres Seq. ID no. 14304353
  misc_feature (1)..(672): Ortholog of  Ceres SEQ ID NO 13496874 as cited in SEQ ID NO 20713
gagagagagcactagtccccccccccccgatgcatcacttgtttctccataataagagagttttaagcatttgaaacaaaaaaaatggcttccaaggctttggttctgttgggtctctttgctgttcttctcgtcgtctcagaagtagccgcggcatcttctgccacagtgaattcagagagtaaggaaactgtgaaacctgatcaacgtggctacggtgacaatggaggaaattacaataacggaggaggttaccagggaggagggggtaattaccaaggaggaggaggtaattaccaaggaggaggaggtaattaccaaggaggaggaggaagataccaaggaggaggaggacggtaccaaggaggaggaggacgataccaaggaggcggtgggcgacaaggaggagggggaagtgggggaagttactgccgccacggctgctgctacagaggttacaacggctgctcaagatgctgctcgtatgccggagaagctgttcagactcagcccggtcactaaaacaatatattaaccaatcaccaccatgcatgtattgcattatgtatgtatgattttaagtaaaccatggtgcgtttgtaatgaactgcctcaagtttttgaggcactatagattaagaagagaactatgggaataaagtttgattatgc

SEQ ID NO: 20381 - protein, 145 aa, Arabidopsis thaliana
  peptide (1)..(145): Ceres Seq. ID no. 14304354
MASKALVLLGLFAVLLVVSEVAAASSATVNSESKETVKPDQRGYGDNGGNYNNGGGYQGGGGNYQGGGGNYQGGGGNYQGGGGRYQGGGGRYQGGGGRYQGGGGRQGGGGSGGSYCRHGCCYRGYNGCSRCCSYAGEAVQTQPGH

SEQ ID NO: 20382 - protein, 103 aa, Arabidopsis thaliana
  peptide (1)..(103): Ceres Seq. ID no. 14304355
MEEITITEEVTREEGVITKEEEVITKEEEVITKEEEEDTKEEEDGTKEEEDDTKEAVGDKEEGEVGEVTAATAAATEVTTAAQDAARMPEKLFRLSPVTKTIY

SEQ ID NO: 20383 - DNA, 1347 bp, Arabidopsis thaliana
  misc_feature (1)..(1347): Ceres Seq. ID no. 13648367
gagaagaaaaatagtgctttgagaagaagaaaaaaaccgttgccctagaattaaaatccacttctcagtgtcataggcgtcgtcggtttgggaattttataaagttggtctcttttgaattcatcagtttcgtcattctccttcaaatctggaaaccaaagcgagtgtgttttgctctcttgaatcgaattttgagcagaaaatggaagctctctacgccaagctctacgacaaatacaccaaactccagaagaagaaatattccgaatacgatgagattaataaggaacaagaagagaaattccttacctttgtttcagcctcagaggagttgatggaacatttgagtggtgaaaatcagagttctctggagatggttgagaagttgaggaatgaaatcatttcaatcagatctggcagggacgacaagtttctggagtgtcaaaagcttctcatggaagaagaactaaagaacaaatcactttctgaagaagttgtcaagctaaaagaagaagttgtcaagctaaaagagctggtccaagaggaacatcctcgcaactatgaagatcaaagtggaaaaaaacaaaagagaaagactcctgaaagtgctcgagttacaacgagaagcatgataaaacgtagcagactgtcagaagatttggtggaaacggatatggtatcacctgacattagcaaacatcataaagcaaaggagcctctcttggtttctcagccacaatgctgcagaacaacctacgatggatcaagtagttctgctagttgtacatttcaagctcttggcaaacacttgctaggaatgaaattatcaactaataataagggcaaacgcgcctgcattgtagcctcacacccaacaaccggtttatccttcagcctaacttttataaataacccaaatggtgaagaatctgagctgctttacaagcctgcatcactcggaacatttcaaagagtggcaccggaatggatgagagaagttataaagttcagcacaagtatgtgtcccatcttctttgaaagagtctctcgagtcattaagctcaattgttgatcggtaccgtatgtacatctccctccccttatcttgtgtagtcatctctgatggcttcttagtgtgatgtttctcaataggtttgaaaagctagggaagttatcattgtatctatagaaatgtgtctctctttaactttggaattagtttcaaagatagtgtgtccttgtgatgaatcatattgtaacaagatcttgatttatcctttgctctcgataccctctcctcttgtagacctcataaatctctgatctattgagcattttacatgattc

SEQ ID NO: 20384 - protein, 289 aa, Arabidopsis thaliana
  peptide (1)..(289): Ceres Seq. ID no. 13648368
MEALYAKLYDKYTKLQKKKYSEYDEINKEQEEKFLTFVSASEELMEHLSGENQSSLEMVEKLRNEIISIRSGRDDKFLECQKLLMEEELKNKSLSEEVVKLKEEVVKLKELVQEEHPRNYEDQSGKKQKRKTPESARVTTRSMIKRSRLSEDLVETDMVSPDISKHHKAKEPLLVSQPQCCRTTYDGSSSSASCTFQALGKHLLGMKLSTNNKGKRACIVASHPTTGLSFSLTFINNPNGEESELLYKPASLGTFQRVAPEWMREVIKFSTSMCPIFFERVSRVIKLNC

SEQ ID NO: 20385 - protein, 245 aa, Arabidopsis thaliana
  peptide (1)..(245): Ceres Seq. ID no. 13648369
MEHLSGENQSSLEMVEKLRNEIISIRSGRDDKFLECQKLLMEEELKNKSLSEEVVKLKEEVVKLKELVQEEHPRNYEDQSGKKQKRKTPESARVTTRSMIKRSRLSEDLVETDMVSPDISKHHKAKEPLLVSQPQCCRTTYDGSSSSASCTFQALGKHLLGMKLSTNNKGKRACIVASHPTTGLSFSLTFINNPNGEESELLYKPASLGTFQRVAPEWMREVIKFSTSMCPIFFERVSRVIKLNC

SEQ ID NO: 20386 - protein, 232 aa, Arabidopsis thaliana
  peptide (1)..(232): Ceres Seq. ID no. 13648370
MVEKLRNEIISIRSGRDDKFLECQKLLMEEELKNKSLSEEVVKLKEEVVKLKELVQEEHPRNYEDQSGKKQKRKTPESARVTTRSMIKRSRLSEDLVETDMVSPDISKHHKAKEPLLVSQPQCCRTTYDGSSSSASCTFQALGKHLLGMKLSTNNKGKRACIVASHPTTGLSFSLTFINNPNGEESELLYKPASLGTFQRVAPEWMREVIKFSTSMCPIFFERVSRVIKLNC

SEQ ID NO: 20387 - DNA, 778 bp, Arabidopsis thaliana
  misc_feature (1)..(778): Ceres Seq. ID no. 13648212
agagctcactagtccccccccccccccccgaagataatgtatctaggtttgcttatgattatacatgtgatatttaatacatggcacaggttcgtcgagtttcacagccataggtacaatagaaggcaaattcgattgtggttatctggtaaaagttaagttgggctcagagattcttaacggcgttctttatcattcggcccagcccggcccatcatcatctccaaccgctgttctaaacaatgccgttgtaccttatgttgaaactgggaggagacggcgtcgtttaggtaaaagacgaagaagcagacgcagagaagatccgaattacccgaaaccgaaccggagcggttacaatttcttctttgctgagaaacattgcaagctcaaatcactttatcccaacaaggagagagagtttacgaaacttatcggagaatcgtggagcaatctctctaccgaagaacgaatggtttatcaagacattggattgaaggataaggaaaggtatcagagggagttgaatgagtacagagaaacgttgaggcttagggatggtgacatgacaaacggcaaggctttttaggtgatttatttaaaacggcaactcgttttgttgtaggtcgtttctctcttttaagattggacgcctcgccgtttcttttattttctagcttattgtagttgtccatgcttgcttaactaggctcagtgagaggctagacttgccaaacttgaagagtctttatttatttaagaattttagatgttctaatgt

SEQ ID NO: 20388 - protein, 40 aa, Arabidopsis thaliana
  peptide (1)..(40): Ceres Seq. ID no. 13648213
MYLGLLMIIHVIFNTWHRFVEFHSHRYNRRQIRLWLSGKS

SEQ ID NO: 20389 - protein, 38 aa, Arabidopsis thaliana
  peptide (1)..(38): Ceres Seq. ID no. 13648214
MVYQDIGLKDKERYQRELNEYRETLRLRDGDMTNGKAF

SEQ ID NO: 20390 - protein, 34 aa, Arabidopsis thaliana
  peptide (1)..(34): Ceres Seq. ID no. 13648215
MIIHVIFNTWHRFVEFHSHRYNRRQIRLWLSGKS

SEQ ID NO: 20391 - DNA, 408 bp, Arabidopsis thaliana
  misc_feature (1)..(408): Ceres Seq. ID no. 12606252
ggaaacgaattctctctctctcagcttatagatacccaaattaagaagaagtgaaagatgcatcctccacttacaccacatagacatccaatgtgtctggagataattgaggaatttcaaaagtgtcatatagaccatccgattgggaaattctttggagaatgtacagagctgaaagtaaagcttgatcgatgtttccgccaagagaaagctgtgaagcggaaggtaaatttcgaacaaagcaagaaacttcaagaaagactgaaagctataaggaaagaagaaaccgcagagacttgagcattgttgtataataatcctataaagaacatgtgcgtgtgtctatttcaaaagaacacatttctaaattgatccacaaagaagagttttgatactcttttgcctcgt

SEQ ID NO: 20392 - protein, 80 aa, Arabidopsis thaliana
  peptide (1)..(80): Ceres Seq. ID no. 12606253
MHPPLTPHRHPMCLEIIEEFQKCHIDHPIGKFFGECTELKVKLDRCFRQEKAVKRKVNFEQSKKLQERLKAIRKEETAET

SEQ ID NO: 20393 - protein, 69 aa, Arabidopsis thaliana
  peptide (1)..(69): Ceres Seq. ID no. 12606254
MCLEIIEEFQKCHIDHPIGKFFGECTELKVKLDRCFRQEKAVKRKVNFEQSKKLQERLKAIRKEETAET

SEQ ID NO: 20394 - protein, 40 aa, Arabidopsis thaliana
  peptide (1)..(40): Ceres Seq. ID no. 12606255
MFPPRESCEAEGKFRTKQETSRKTESYKERRNRRDLSIVV

SEQ ID NO: 20395 - DNA, 452 bp, Arabidopsis thaliana
  misc_feature (1)..(452): Ceres Seq. ID no. 12605645
gagacctgcgagaaacaaaaaataataaaagtaaacaaaactaccaaaaaaaaaaaaacagaaaaaaacctttcaggtctcaactagcaatggagatgaagaagattgcctgcggagtcgttttcgctgctgcttccatgaccgccgtcatggctgcagaggtcggagcacctgcaccaggacccgccgcaagtggagcctccgtagctgttccggctcttggctctttggttggagcttcccttgtgtctctcttcgcctactacttgaactaagcttttctatttaaagcaaaaaaagaagaaatatcgatgtctctgtcaatttctatgatgtccaattttgtgtgtgttgtttagacaggcaaagtgaataaaaacgaaagataatttgattacggtcagacatgtttttatgtaatgctgattaataaataaatattatataccctg

SEQ ID NO: 20396 - protein, 90 aa, Arabidopsis thaliana
  peptide (1)..(90): Ceres Seq. ID no. 12605646
DLRETKNNKSKQNYQKKKNRKKPFRSQLAMEMKKIACGVVFAAASMTAVMAAEVGAPAPGPAASGASVAVPALGSLVGASLVSLFAYYLN

SEQ ID NO: 20397 - protein, 61 aa, Arabidopsis thaliana
  peptide (1)..(61): Ceres Seq. ID no. 12605647
MEMKKIACGVVFAAASMTAVMAAEVGAPAPGPAASGASVAVPALGSLVGASLVSLFAYYLN

SEQ ID NO: 20398 - protein, 59 aa, Arabidopsis thaliana
  peptide (1)..(59): Ceres Seq. ID no. 12605648
MKKIACGVVFAAASMTAVMAAEVGAPAPGPAASGASVAVPALGSLVGASLVSLFAYYLN

SEQ ID NO: 20399 - DNA, 1324 bp, Arabidopsis thaliana
  misc_feature (1)..(1324): Ceres Seq. ID no. 14307631
ggagagtagaagaagcagaagcagtaatggtacgagcttcatcgtcgaagaaaggaggatcaaaaggaggagacaaagacgacgcagagtcaaaacagaggaagagattaaaaaccctagctctcgataaccaattgctctctgattctccggcgaaatctcattcctctctcaaaccttcaaagcaagttctcaaacaccatggcaccgacatcatccgcaaatctcagcgcaagaatcgctttctcttctctttccctggtcttctcgctcctatctccgccgctaccatcggcgatctcgatcgattatctaccaaaaaccctgtcctctaccttaatttccctcagggtcggatgaaactttttggaacgattttgtatccgaagaacaggtacttgactcttcaattttccagaggaggcaaaaatgtcttatgtgatgattattttgataacatgattgtgttctctgagtcatggtggattgggacaaaagaggagaatcctgaagaagctcgtcttgatttccctaaagaactagctcaggcagagaatactgagtttgatttccaaggcggtgctggaggagcagcttccgtcaagacgatggcaactcctgaaactggtagccaaccaacagagacagactcacctgaagttgacatggaggatgttttgtctgaggatggagaattcttggacgataagatccaagtaacaccaccagtccaattaacaccaccaatccaagtaacaccagtccgacagtctcagagaaattctgggaagaaattcaactttgcagaaacttccccagaggcctcctctggtgaaagtgaaggcaatacatctgatgaagatgagaaacctctgttggaacctgaatcttcaacaagaggtcgtgaggaatctcaagatggtaatggtgttactgcatcagcaagcaagttgcctacagaacttccggctaaaaaggaaaaaccaaaaagcaaagacagtaagctcgttcaagctactttgtctaaccttttcaagaaagctgaggagaaaacagctggaacttccaaggcgaaatcatcctcaaaagcttaaagaactcttttccagaagaaaatagaggtctgttgtttcttttgctgtgagaatatacagttttcagttcttttagttatgtttgagtgagatgagtaatgagaaattgctacaagactgatgattatgtttcacaaatcaagaattggataatgtattcatcatgcttaatcgatcgatagtttgtgttcaccgagcaatgtataaatcatctctgctcattttaatac

SEQ ID NO: 20400 - protein, 363 aa, Arabidopsis thaliana
  peptide (1)..(363): Ceres Seq. ID no. 14307632
RVEEAEAVMVRASSSKKGGSKGGDKDDAESKQRKRLKTLALDNQLLSDSPAKSHSSLKPSKQVLKHHGTDIIRKSQRKNRFLFSFPGLLAPISAATIGDLDRLSTKNPVLYLNFPQGRMKLFGTILYPKNRYLTLQFSRGGKNVLCDDYFDNMIVFSESWWIGTKEENPEEARLDFPKELAQAENTEFDFQGGAGGAASVKTMATPETGSQPTETDSPEVDMEDVLSEDGEFLDDKIQVTPPVQLTPPIQVTPVRQSQRNSGKKFNFAETSPEASSGESEGNTSDEDEKPLLEPESSTRGREESQDGNGVTASASKLPTELPAKKEKPKSKDSKLVQATLSNLFKKAEEKTAGTSKAKSSSKA

SEQ ID NO: 20401 - protein, 355 aa, Arabidopsis thaliana
  peptide (1)..(355): Ceres Seq. ID no. 14307633
MVRASSSKKGGSKGGDKDDAESKQRKRLKTLALDNQLLSDSPAKSHSSLKPSKQVLKHHGTDIIRKSQRKNRFLFSFPGLLAPISAATIGDLDRLSTKNPVLYLNFPQGRMKLFGTILYPKNRYLTLQFSRGGKNVLCDDYFDNMIVFSESWWIGTKEENPEEARLDFPKELAQAENTEFDFQGGAGGAASVKTMATPETGSQPTETDSPEVDMEDVLSEDGEFLDDKIQVTPPVQLTPPIQVTPVRQSQRNSGKKFNFAETSPEASSGESEGNTSDEDEKPLLEPESSTRGREESQDGNGVTASASKLPTELPAKKEKPKSKDSKLVQATLSNLFKKAEEKTAGTSKAKSSSKA

SEQ ID NO: 20402 - protein, 245 aa, Arabidopsis thaliana
  peptide (1)..(245): Ceres Seq. ID no. 14307634
MKLFGTILYPKNRYLTLQFSRGGKNVLCDDYFDNMIVFSESWWIGTKEENPEEARLDFPKELAQAENTEFDFQGGAGGAASVKTMATPETGSQPTETDSPEVDMEDVLSEDGEFLDDKIQVTPPVQLTPPIQVTPVRQSQRNSGKKFNFAETSPEASSGESEGNTSDEDEKPLLEPESSTRGREESQDGNGVTASASKLPTELPAKKEKPKSKDSKLVQATLSNLFKKAEEKTAGTSKAKSSSKA

SEQ ID NO: 20403 - DNA, 1114 bp, Arabidopsis thaliana
  misc_feature (1)..(1114): Ceres Seq. ID no. 13647714
aaaacaaacgcaggaggcctggaaaaaagaaagataacgggactcgagagattgagattacggagccacccactttcatggagtctacactctcagctttctcaaccgtcaaggcaacagcgatggctcgaagtagtggtggtccttcattacctctcctcactatttctaaagcacttaaccgccactttaccggcgccagacacctccatcctttattgctcgctcgctgttctccctccgtgcgacgtcttggtgggtttcatggcagtcgatttacttcgtcgaattcagctttgagaagcttgggagctgctgttttgccggtaatccgacaccgtttagagtgtttgtcgagctcatcgccgtctttcaggagtatctcaagtggcggcggttctggatttggggggtataatggtggaagcggcggtggtggtggcggaggatcggagagtggtgattccaagtcaaaactgggtgctaatgcaagtgatggtgtctctgttccgtcgtcagatatcattattctcgatgttggagggatgacatgtggagggtgttcagcaagtgtgaagaagatactggaaagccaacctcaagttgcttcagctagtgttaatctcaccaccgagacggcaattgtgtggcctgtaccggaagctaaaagtgtacctgattggcaaaagagtttaggcgagacgcttgcaaaccatctgaccaattgcgggtttcagtctactcctcgaggggaagttcctgaagatattgcaggagagtttgcaccttgatagtacaaaagatttttccagcagcaatcattattgatatgatgattaagagcagctgctcatggcgaatggattgtaaacctaaatttctggtgctagtagttccatttatgttgattttgttgtcagtccttgtgatctaagggcgtgtatttatcttctgttgtcgattgctgacataccttctccgaaccagacagcataactctgtagtgatgatcttgttctattatggtcgattttccaaaagaatacattgaaagctataaaattccatattaaagaaaaaaaaaaaaaaaaaaactcgagggggggcccggtac

SEQ ID NO: 20404 - protein, 262 aa, Arabidopsis thaliana
  peptide (1)..(262): Ceres Seq. ID no. 13647715
NKRRRPGKKKDNGTREIEITEPPTFMESTLSAFSTVKATAMARSSGGPSLPLLTISKALNRHFTGARHLHPLLLARCSPSVRRLGGFHGSRFTSSNSALRSLGAAVLPVIRHRLECLSSSSPSFRSISSGGGSGFGGYNGGSGGGGGGGSESGDSKSKLGANASDGVSVPSSDIIILDVGGMTCGGCSASVKKILESQPQVASASVNLTTETAIVWPVPEAKSVPDWQKSLGETLANHLTNCGFQSTPRGEVPEDIAGEFAP

SEQ ID NO: 20405 - protein, 237 aa, Arabidopsis thaliana
  peptide (1)..(237): Ceres Seq. ID no. 13647716
MESTLSAFSTVKATAMARSSGGPSLPLLTISKALNRHFTGARHLHPLLLARCSPSVRRLGGFHGSRFTSSNSALRSLGAAVLPVIRHRLECLSSSSPSFRSISSGGGSGFGGYNGGSGGGGGGGSESGDSKSKLGANASDGVSVPSSDIIILDVGGMTCGGCSASVKKILESQPQVASASVNLTTETAIVWPVPEAKSVPDWQKSLGETLANHLTNCGFQSTPRGEVPEDIAGEFAP

SEQ ID NO: 20406 - protein, 222 aa, Arabidopsis thaliana
  peptide (1)..(222): Ceres Seq. ID no. 13647717
MARSSGGPSLPLLTISKALNRHFTGARHLHPLLLARCSPSVRRLGGFHGSRFTSSNSALRSLGAAVLPVIRHRLECLSSSSPSFRSISSGGGSGFGGYNGGSGGGGGGGSESGDSKSKLGANASDGVSVPSSDIIILDVGGMTCGGCSASVKKILESQPQVASASVNLTTETAIVWPVPEAKSVPDWQKSLGETLANHLTNCGFQSTPRGEVPEDIAGEFAP

SEQ ID NO: 20407 - DNA, 1631 bp, Arabidopsis thaliana
  misc_feature (1)..(1631): Ceres Seq. ID no. 13648575
gagagatctttcatcttctaaatcgaagatggttcctaagatcgcatcaatggcgtctactagacctctcagttcacttccttacttgttcctctccttgtctctcctcttcgtcgtctcgcttctcttcttcttctccaattccttaatctccaatccaaatccgagcatttcacacaatactctccaaaacggtatcaatgtctatgtagctgagcttccaagatccctaaactatggtcttctcgacaaatactggtcctcttctactccagattcacgtatacccaccgacccagatcacccgacccgtaaaacccatttacccaaacccgatacacacccaccgtacccagagaatccgttgatcaagcaatacagtgctgagtactggatcatgggagacctagaaacctcaccagagaaacgaattggatcttttgctaaaagggttttcagtgaatctgacgctgatgtagtcttcgtgcccttctttgccacgttaagtgcagagatggagcttggaaatggtaaaggttcgtttagaaagaagtccggtaacgaagattatcaaagacagagacaagtgcttgattttctcaagaacactaaagcttggaaacgatctaatggtcgtgatcacgtttttgttctaactgaccctgttgcaatgtggcatgttcgtgaggagattgctttatctattcttcttgtggtggattttggaggatggtttaggcaagattctaagtcgtctaatgggactagcttgccggagaggattgagcatactcaagtctctgtcattaaggatgtgattgttccatatacgcatctgcttcctagattggatttgtctcagaaccagagacgtcatagccttctttatttcaaaggagctaagcacagacatcggggagggttaatcagagaaaaactatgggacttgttggtcaatgagcctggcgttgtcatggaagaaggttttcctaatgcaacaggaaaggaacagtcaataagaggaatgagaaactcagagttctgcttacatccagctggtgacactcccacttcatgccgtctctttgatgccattcaaagtctatgtatccctgtgattgtcagtgacaccatagagctcccgtttgagggaataatcgattactcagaattctcggtttttgcctctgtaagtgatgcattaacacctaagtggttggctaatcatctcagaaggttctctgaaagagagaaggaaacattgagaagtagaatagcaaaggttcagtcagtttttgtgtatgataatgggcatgccgatgggattggacctattgaaccagatggtgcggtgaatcacatatggaagaaggttcagcagaaggtgccaatggtgaaggaagcagtgattagggagaggagaaaaccagcaggggcttccgttccacttcgatgtcaatgtatctaaataatgcaaccaatccaaaagatagaaagtgttcctttgattttgttggtcttttcttttgtacttgtttcgtttacgaacattgttatggccactttaaaatccatgttccttagggttcaaagaaaaaaaaaaaaaaaaaaaactcgagggggggcccggt

SEQ ID NO: 20408 - protein, 488 aa, Arabidopsis thaliana
  peptide (1)..(488): Ceres Seq. ID no. 13648576
RDLSSSKSKMVPKIASMASTRPLSSLPYLFLSLSLLFVVSLLFFFSNSLISNPNPSISHNTLQNGINVYVAELPRSLNYGLLDKYWSSSTPDSRIPTDPDHPTRKTHLPKPDTHPPYPENPLIKQYSAEYWIMGDLETSPEKRIGSFAKRVFSESDADVVFVPFFATLSAEMELGNGKGSFRKKSGNEDYQRQRQVLDFLKNTKAWKRSNGRDHVFVLTDPVAMWHVREEIALSILLVVDFGGWFRQDSKSSNGTSLPERIEHTQVSVIKDVIVPYTHLLPRLDLSQNQRRHSLLYFKGAKHRHRGGLIREKLWDLLVNEPGVVMEEGFPNATGKEQSIRGMRNSEFCLHPAGDTPTSCRLFDAIQSLCIPVIVSDTIELPFEGIIDYSEFSVFASVSDALTPKWLANHLRRFSEREKETLRSRIAKVQSVFVYDNGHADGIGPIEPDGAVNHIWKKVQQKVPMVKEAVIRERRKPAGASVPLRCQCI

SEQ ID NO: 20409 - protein, 479 aa, Arabidopsis thaliana
  peptide (1)..(479): Ceres Seq. ID no. 13648577
MVPKIASMASTRPLSSLPYLFLSLSLLFVVSLLFFFSNSLISNPNPSISHNTLQNGINVYVAELPRSLNYGLLDKYWSSSTPDSRIPTDPDHPTRKTHLPKPDTHPPYPENPLIKQYSAEYWIMGDLETSPEKRIGSFAKRVFSESDADVVFVPFFATLSAEMELGNGKGSFRKKSGNEDYQRQRQVLDFLKNTKAWKRSNGRDHVFVLTDPVAMWHVREEIALSILLVVDFGGWFRQDSKSSNGTSLPERIEHTQVSVIKDVIVPYTHLLPRLDLSQNQRRHSLLYFKGAKHRHRGGLIREKLWDLLVNEPGVVMEEGFPNATGKEQSIRGMRNSEFCLHPAGDTPTSCRLFDAIQSLCIPVIVSDTIELPFEGIIDYSEFSVFASVSDALTPKWLANHLRRFSEREKETLRSRIAKVQSVFVYDNGHADGIGPIEPDGAVNHIWKKVQQKVPMVKEAVIRERRKPAGASVPLRCQCI

SEQ ID NO: 20410 - protein, 472 aa, Arabidopsis thaliana
  peptide (1)..(472): Ceres Seq. ID no. 13648578
MASTRPLSSLPYLFLSLSLLFVVSLLFFFSNSLISNPNPSISHNTLQNGINVYVAELPRSLNYGLLDKYWSSSTPDSRIPTDPDHPTRKTHLPKPDTHPPYPENPLIKQYSAEYWIMGDLETSPEKRIGSFAKRVFSESDADVVFVPFFATLSAEMELGNGKGSFRKKSGNEDYQRQRQVLDFLKNTKAWKRSNGRDHVFVLTDPVAMWHVREEIALSILLVVDFGGWFRQDSKSSNGTSLPERIEHTQVSVIKDVIVPYTHLLPRLDLSQNQRRHSLLYFKGAKHRHRGGLIREKLWDLLVNEPGVVMEEGFPNATGKEQSIRGMRNSEFCLHPAGDTPTSCRLFDAIQSLCIPVIVSDTIELPFEGIIDYSEFSVFASVSDALTPKWLANHLRRFSEREKETLRSRIAKVQSVFVYDNGHADGIGPIEPDGAVNHIWKKVQQKVPMVKEAVIRERRKPAGASVPLRCQCI

SEQ ID NO: 20411 - DNA, 1196 bp, Arabidopsis thaliana
  misc_feature (1)..(1196): Ceres Seq. ID no. 14307619
ggtggataagcttctcactttcagttcaattggatagccggaaaggctctcctccaagtggcgtttatatggaggtgacaaatacgagcagcatcatgtggttcttcagggacaaaggtttcgatgatccgagtatcgacaagatgttgagaaaatgcaaacagttggaaaaggctcaaagcgatgtggcatcagaaaactgggactacctgagtaacattgttggtatccaagagagaaaactcccttacatcgtctcccgatgccccaaaatcctgactttacgcctcgatgagagactcatccccatggtcgagtgcctctccagtcttggaaggaatcctcgtgaagttgcttccgccattaccaaatttcctccaatactctctcatagcgtggaggagaaactctgtccccttcttgctttctttcaagcgttgggtgtgcctgagactcaacttggcaaaatgatactttttaacccaaggcttatcagctacagcatcgacaccaagctgacagtgatcgtcagctttcttgctagcttggccttgatcaagatgggatgattggcaaagttctggtgaagaacccatttcttatggggtacagtgttgataaaaggttacggcctaccactgaattcttgaaatcatccgttggcctgagtgaggatggcattaagtcggtggtcatgaatttcccacaacttttgtgcagagacgttaacaagattctcaaaccaaattatgattatttgaaggagtgtgggtttggagattcccagatagcaaccatggtcactggttatccccaaatcttgattaagagtgttaagaattcactacagcctaggatcagattcctcgtccaggtgatgggaagaggcatggatgaagtggcttcttatcctgaattctttcaccatggattgaagaagaaggtcgaatcgaggtttaaacttgtcaaaaagaacaacattgactgcagccttagagaaatgctggactgtaacacaaagaaattccatgagaagtttggcttttcggaggtaactgcaagctcctagcttttatatctctctctagttttttccttcatcaggctctctctgtaagctgttttcagcttgtgcaccaatttctagcacgagctttaccttgagtgattgtgatatcaatagagtgttttcttcc

SEQ ID NO: 20412 - protein, 188 aa, Arabidopsis thaliana
  peptide (1)..(188): Ceres Seq. ID no. 14307620
WISFSLSVQLDSRKGSPPSGVYMEVTNTSSIMWFFRDKGFDDPSIDKMLRKCKQLEKAQSDVASENWDYLSNIVGIQERKLPYIVSRCPKILTLRLDERLIPMVECLSSLGRNPREVASAITKFPPILSHSVEEKLCPLLAFFQALGVPETQLGKMILFNPRLISYSIDTKLTVIVSFLASLALIKMG

SEQ ID NO: 20413 - protein, 167 aa, Arabidopsis thaliana
  peptide (1)..(167): Ceres Seq. ID no. 14307621
MIGKVLVKNPFLMGYSVDKRLRPTTEFLKSSVGLSEDGIKSVVMNFPQLLCRDVNKILKPNYDYLKECGFGDSQIATMVTGYPQILIKSVKNSLQPRIRFLVQVMGRGMDEVASYPEFFHHGLKKKVESRFKLVKKNNIDCSLREMLDCNTKKFHEKFGFSEVTASS

SEQ ID NO: 20414 - protein, 166 aa, Arabidopsis thaliana
  peptide (1)..(166): Ceres Seq. ID no. 14307622
MEVTNTSSIMWFFRDKGFDDPSIDKMLRKCKQLEKAQSDVASENWDYLSNIVGIQERKLPYIVSRCPKILTLRLDERLIPMVECLSSLGRNPREVASAITKFPPILSHSVEEKLCPLLAFFQALGVPETQLGKMILFNPRLISYSIDTKLTVIVSFLASLALIKMG

SEQ ID NO: 20415 - DNA, 558 bp, Arabidopsis thaliana
  misc_feature (1)..(558): Ceres Seq. ID no. 13647754
accagagagagagagagagagagagagctcactagtccccccccccccccccccgaattatcctaaattcagatcataaaaaagctaacttttaatttctttctttctgagaaattggttctcatcgttggaatcgaaaaatgggacgaatcggtttagtagtgactgatctggtattgtcgttcatgtggatatgggcaggagttctggtcaacattttagtccatggagttcttggatttagccggaccgatccttccggtgagatcgttcgttatctcttctctatcatctccatgttcatcttcgcctaccttcaacaagccaccaaaggcgggctttataatcctttgaccgctttggctgctggagtctccggtggcttcagcagtttcatcttctccgtcttcgttcgaatccccgtcgaggtttgtttcgttgactttttttggtttaattgaaattgactcttcgttagagagaggtctcagggtttgtgtaatgttgtaaaatgtcaaattagagaaaaaaaaagagaatttagctgatgggttcttc

SEQ ID NO: 20416 - protein, 106 aa, Arabidopsis thaliana
  peptide (1)..(106): Ceres Seq. ID no. 13647755
MGRIGLVVTDLVLSFMWIWAGVLVNILVHGVLGFSRTDPSGEIVRYLFSIISMFIFAYLQQATKGGLYNPLTALAAGVSGGFSSFIFSVFVRIPVEVCFVDFFWFN

SEQ ID NO: 20417 - protein, 91 aa, Arabidopsis thaliana
  peptide (1)..(91): Ceres Seq. ID no. 13647756
MWIWAGVLVNILVHGVLGFSRTDPSGEIVRYLFSIISMFIFAYLQQATKGGLYNPLTALAAGVSGGFSSFIFSVFVRIPVEVCFVDFFWFN

SEQ ID NO: 20418 - protein, 54 aa, Arabidopsis thaliana
  peptide (1)..(54): Ceres Seq. ID no. 13647757
MFIFAYLQQATKGGLYNPLTALAAGVSGGFSSFIFSVFVRIPVEVCFVDFFWFN

SEQ ID NO: 20419 - DNA, 1169 bp, Arabidopsis thaliana
  misc_feature (1)..(1169): Ceres Seq. ID no. 13648488
acatctctcaccatcttcaccattgtcgaaacatatcgaaaacgctaaaaccgagagagaaaggaaaacatgaggaataaatcccaatcattcatcagctcaaagcttatattcatttgttgctcaatcttggtgttgttcattctcttcttgaaaagagcaagcttctcttccaattcaaccgcaaccattcgagacgaatatcaccagaaatcgaagtgcccatcaaccccacaacaatgcaccaaattgcccacttctctatccgacgcattggttcactatgtcacctcagagatcacaccacaacaaacgtttgatgaagtctcagtctcaaagagagtcttggacaagaagtctccttgtaacttcctcgtctttggcttaggacacgatagcttgatgtgggcatctctcaatcacggtggacgcactttgttcctcgaggaagatgaagcttggattgagacagtaactaagaaattcccaaacttggaatcctaccacgtcgtatacgacacaaaagtgaaagattccaacaagcttatggagctaaagagaacagaggattgcaaagccgtgtctgatcctagagattccaaatgtgctctgtctctcaagggttttccagctgacgtgtacgagacgcaatgggatgtgataatggtcgatgctcccactggttaccacgatgaagctccagggaggatgagcgctatttacactgcgggtttattggctcgtaaccgttatgacggtggggagactgatgttttcgttcacgatattaaccggccggtggaggacgagttctcggtggcgttcttgtgtggagggtacatgaaagagcagcaaggaagacttaggcatttcaacatccctagccaccgggctagcttcggtacaccgttttgtccggcggatatcagtcgccgcttttgatattgtacaatgagagaaaagtgcaaagaacaataacaagaaaacttggcaaaggactttgaagttgcggaaatgagaattcgatattgatctagtttattctatcaaattagtaaaacttcaaatatacttttgccattttatgtttcgtatgatacaattaatcaagaagaaaagagagatatattttaatacatacgttgtgtgtcaatcttatgcctttaagc

SEQ ID NO: 20420 - protein, 290 aa, Arabidopsis thaliana
  peptide (1)..(290): Ceres Seq. ID no. 13648489
MRNKSQSFISSKLIFICCSILVLFILFLKRASFSSNSTATIRDEYHQKSKCPSTPQQCTKLPTSLSDALVHYVTSEITPQQTFDEVSVSKRVLDKKSPCNFLVFGLGHDSLMWASLNHGGRTLFLEEDEAWIETVTKKFPNLESYHVVYDTKVKDSNKLMELKRTEDCKAVSDPRDSKCALSLKGFPADVYETQWDVIMVDAPTGYHDEAPGRMSAIYTAGLLARNRYDGGETDVFVHDINRPVEDEFSVAFLCGGYMKEQQGRLRHFNIPSHRASFGTPFCPADISRRF

SEQ ID NO: 20421 - protein, 179 aa, Arabidopsis thaliana
  peptide (1)..(179): Ceres Seq. ID no. 13648490
MWASLNHGGRTLFLEEDEAWIETVTKKFPNLESYHVVYDTKVKDSNKLMELKRTEDCKAVSDPRDSKCALSLKGFPADVYETQWDVIMVDAPTGYHDEAPGRMSAIYTAGLLARNRYDGGETDVFVHDINRPVEDEFSVAFLCGGYMKEQQGRLRHFNIPSHRASFGTPFCPADISRRF

SEQ ID NO: 20422 - DNA, 1732 bp, Arabidopsis thaliana
  misc_feature (1)..(1732): Ceres Seq. ID no. 12605517
gaaaaaagaaaacaatttcactttttttggaatgtgtgtctctcttccatttccatatattatataaacaccaaatgagatctcatttttctaataaataagaagaaagaagagagaaacaatggcttatcgtcaaattttggccatagttttgtttctttgtgtgtttcaattcttggactgcactgttagctccgccgtagaagagaatgggactgtgtttgtgtacggaagagccgccgttggaacaatagatgaagacttcatttgcgccaccttagactggtggccaccggagaaatgtgactacggcagttgtagttgggaccatgcttcaattctcaatctggatttgaacaacgttattcttcaaaatgcaatcaaagcatttgctccgttgaaaataagaataggaggaacattacaagacatagtgatatatgagacaccagattcgaagcaaccatgtcttccttttaccaaaaactcttcaattctttttggttacacacaaggatgtctacctatgcgtcgatgggacgagctcaatgccttctttcgcaaaaccggaactaaagtcatcttcgggctgaatgcactttctggacgttccataaaatctaacggtgaagccataggagcctggaattacaccaatgctgaatcgttcatccggtttacagcagagaacaattacaccatcgacgggtgggagctcggcaatgagctgtgtggaagtggtgttggtgcacgagttggtgcaaatcaatatgctatagacaccataaatctgcgaaacattgtgaaccgggtttacaagaatgtgagtcccatgccgttggtgataggtccgggtggcttctttgaagttgattggttcacagaatacctgaacaaagcagaaaactctctcaatgctactactcgacatatctacgatctcggtccaggagtcgatgaacatctgatagaaaagattctaaacccttcatatctggaccaagaggcaaaaagttttcgcagtctcaagaacataatcaaaaactcctcaacaaaggctgtggcatgggttggtgagtccggtggtgcctacaacagtgggcggaatcttgtctctaatgctttcgtgtatagtttctggtacctggaccagcttggtatggcatcgctttatgatacaaaaacatactgtagacagtctctgatcggaggaaactatgggctgctaaatactactaacttcacaccaaatccagactattacagtgctctgatctggcgacaacttatgggaagaaaggcattgttcacaaccttttccggaaccaaaaagatacgttcgtacacccattgtgcaagacaatcgaaagggatcacagttttactgatgaaccttgacaatactacaacggttgtagcgaaagtagagttaaataacagtttcagtctgagacatacaaagcacatgaagtcttataaaagagcaagttcccaactttttgggggtcctaatggagtaatccaaagagaagagtaccatttgacagcaaaggatggaaacctacacagtcagactatgctactcaacggaaatgctcttcaggttaattcgatgggtgatttacctcctatagagccgatacatataaattcaacagagccaataacaatagctccatattccattgtgtttgtgcatatgcggaatgttgttgtacctgcatgtgcttaa

SEQ ID NO: 20423 - protein, 536 aa, Arabidopsis thaliana
  peptide (1)..(536): Ceres Seq. ID no. 12605518
MAYRQILAIVLFLCVFQFLDCTVSSAVEENGTVFVYGRAAVGTIDEDFICATLDWWPPEKCDYGSCSWDHASILNLDLNNVILQNAIKAFAPLKIRIGGTLQDIVIYETPDSKQPCLPFTKNSSILFGYTQGCLPMRRWDELNAFFRKTGTKVIFGLNALSGRSIKSNGEAIGAWNYTNAESFIRFTAENNYTIDGWELGNELCGSGVGARVGANQYAIDTINLRNIVNRVYKNVSPMPLVIGPGGFFEVDWFTEYLNKAENSLNATTRHIYDLGPGVDEHLIEKILNPSYLDQEAKSFRSLKNIIKNSSTKAVAWVGESGGAYNSGRNLVSNAFVYSFWYLDQLGMASLYDTKTYCRQSLIGGNYGLLNTTNFTPNPDYYSALIWRQLMGRKALFTTFSGTKKIRSYTHCARQSKGITVLLMNLDNTTTVVAKVELNNSFSLRHTKHMKSYKRASSQLFGGPNGVIQREEYHLTAKDGNLHSQTMLLNGNALQVNSMGDLPPIEPIHINSTEPITIAPYSIVFVHMRNVVVPACA

SEQ ID NO: 20424 - protein, 401 aa, Arabidopsis thaliana
  peptide (1)..(401): Ceres Seq. ID no. 12605519
MRRWDELNAFFRKTGTKVIFGLNALSGRSIKSNGEAIGAWNYTNAESFIRFTAENNYTIDGWELGNELCGSGVGARVGANQYAIDTINLRNIVNRVYKNVSPMPLVIGPGGFFEVDWFTEYLNKAENSLNATTRHIYDLGPGVDEHLIEKILNPSYLDQEAKSFRSLKNIIKNSSTKAVAWVGESGGAYNSGRNLVSNAFVYSFWYLDQLGMASLYDTKTYCRQSLIGGNYGLLNTTNFTPNPDYYSALIWRQLMGRKALFTTFSGTKKIRSYTHCARQSKGITVLLMNLDNTTTVVAKVELNNSFSLRHTKHMKSYKRASSQLFGGPNGVIQREEYHLTAKDGNLHSQTMLLNGNALQVNSMGDLPPIEPIHINSTEPITIAPYSIVFVHMRNVVVPACA

SEQ ID NO: 20425 - protein, 299 aa, Arabidopsis thaliana
  peptide (1)..(299): Ceres Seq. ID no. 12605520
MPLVIGPGGFFEVDWFTEYLNKAENSLNATTRHIYDLGPGVDEHLIEKILNPSYLDQEAKSFRSLKNIIKNSSTKAVAWVGESGGAYNSGRNLVSNAFVYSFWYLDQLGMASLYDTKTYCRQSLIGGNYGLLNTTNFTPNPDYYSALIWRQLMGRKALFTTFSGTKKIRSYTHCARQSKGITVLLMNLDNTTTVVAKVELNNSFSLRHTKHMKSYKRASSQLFGGPNGVIQREEYHLTAKDGNLHSQTMLLNGNALQVNSMGDLPPIEPIHINSTEPITIAPYSIVFVHMRNVVVPACA

SEQ ID NO: 20426 - DNA, 1092 bp, Arabidopsis thaliana
  misc_feature (1)..(1092): Ceres Seq. ID no. 13647762
cccccggtatatatgagacattagttatagaagagagactaacatgaagatggatttttcatgtttccaagaatacccttttgagtttcattgcagaggaacaacatttaatgggtttagagaaaacaatgcagtgtctgaaacagtagaagagttctgtaataaaagaaggatgcagaagaagagtgatgatttgaagactaagaagaagaagaaacagagtgtttctagggtttgtagtagaggacattggaggatctctgaagatactcagcttatggagcttgtttcggtttacggtcctcaaaactggaaccacattgcagagagtatgcaaggaagaacaggaaagagctgcagattgaggtggtttaaccagttagatccgaggattaacaagagagctttcagtgatgaagaagaagagagactacttgctgctcatagagcttttggtaacaaatgggctatgattgctaagcttttcaatggaagaacagataatgccttgaagaatcattggcatgttctcatggcaaggaagatgagacagcaatcaagttcttacgtccaaagattcaatggttctgctcatgaatctaacacagatcacaaaatcttcaatctttctcctggtaatgtagatgatgatgaagatgtgaatctgaaaaagtgcagctgggaaatgctaaaagagggaactactaacctgaaagctcagtatctccaagaagaatatagttcttcacgcatgccgatgcagggtccacatcatcactactcaaccttccctgcagattccttggcactgacactgcatgtctccatccaggaaccatcatcatcatcgtcattatcactgccatcatcatcaacaactggagaacatacaatggtgaccagatattttgagaccattaaacctccagcatttatagattttctaggagttggtcactaaagctctaacatttagattgggaactaatcaagaagttgcttactcctgtcattattatcaaagtctctgacttttcttttgttagccattaacatgacaagctaaagacatcaagtatcttttcttttctg

SEQ ID NO: 20427 - protein, 305 aa, Arabidopsis thaliana
  peptide (1)..(305): Ceres Seq. ID no. 13647763
MKMDFSCFQEYPFEFHCRGTTFNGFRENNAVSETVEEFCNKRRMQKKSDDLKTKKKKKQSVSRVCSRGHWRISEDTQLMELVSVYGPQNWNHIAESMQGRTGKSCRLRWFNQLDPRINKRAFSDEEEERLLAAHRAFGNKWAMIAKLFNGRTDNALKNHWHVLMARKMRQQSSSYVQRFNGSAHESNTDHKIFNLSPGNVDDDEDVNLKKCSWEMLKEGTTNLKAQYLQEEYSSSRMPMQGPHHHYSTFPADSLALTLHVSIQEPSSSSSLSLPSSSTTGEHTMVTRYFETIKPPAFIDFLGVGH

SEQ ID NO: 20428 - protein, 303 aa, Arabidopsis thaliana
  peptide (1)..(303): Ceres Seq. ID no. 13647764
MDFSCFQEYPFEFHCRGTTFNGFRENNAVSETVEEFCNKRRMQKKSDDLKTKKKKKQSVSRVCSRGHWRISEDTQLMELVSVYGPQNWNHIAESMQGRTGKSCRLRWFNQLDPRINKRAFSDEEEERLLAAHRAFGNKWAMIAKLFNGRTDNALKNHWHVLMARKMRQQSSSYVQRFNGSAHESNTDHKIFNLSPGNVDDDEDVNLKKCSWEMLKEGTTNLKAQYLQEEYSSSRMPMQGPHHHYSTFPADSLALTLHVSIQEPSSSSSLSLPSSSTTGEHTMVTRYFETIKPPAFIDFLGVGH

SEQ ID NO: 20429 - protein, 262 aa, Arabidopsis thaliana
  peptide (1)..(262): Ceres Seq. ID no. 13647765
MQKKSDDLKTKKKKKQSVSRVCSRGHWRISEDTQLMELVSVYGPQNWNHIAESMQGRTGKSCRLRWFNQLDPRINKRAFSDEEEERLLAAHRAFGNKWAMIAKLFNGRTDNALKNHWHVLMARKMRQQSSSYVQRFNGSAHESNTDHKIFNLSPGNVDDDEDVNLKKCSWEMLKEGTTNLKAQYLQEEYSSSRMPMQGPHHHYSTFPADSLALTLHVSIQEPSSSSSLSLPSSSTTGEHTMVTRYFETIKPPAFIDFLGVGH

SEQ ID NO: 20430 - DNA, 1552 bp, Arabidopsis thaliana
  misc_feature (1)..(1552): Ceres Seq. ID no. 13647847
acaaatcttttgatctgactttcgtctctccaaatctctctcgtctcgtttcttcagaggctatggggatctccttaagcaagcgtcgacgagacaacaacaaccaccaccaccatccacaccacaatccgccgtactattactccgatcctccaccacaacagccgccgcctcaaaacgagtatagctactctcacaattaccccgtttcaactccacagctctctcttcctccaccaccggctcagccaccgtctttttctcagcctcctccgtcgcagattagttacctaccgtacggtcaaaactaccatcaaaaccaatactacccgcaacaagctcctccgtatttcaccggttatcatcacaatgggtttaatccgatgatgaggccggtttatttcggtcctcctccggttgctgttatggaaccgcctgcaccttatgtggagcatcagaccgctaagaaggttaagaacgatgtcaatgtgaataaagctacggtgaggctcgtagctgacgatcttaaccctggtcattatcttgtttccttcgtcttcgatgccttattcgatggcagtttcactatcatattttttggagaagaggaatcaaagtgcataatcgtccctcatttaccagaagctttcccaccaatcaaagtccctttccaaaaaggtgccgggcagaagtttctacaagctccagggacaggaatcgacctaggcttcttttcactggatgatttatcgaaaccatcaccagaagaggtgtacccacttgtaatatcagccgagacagtaatatcaccaagctcggtttcagaggaaccattagttcataagcagatcactcaagcggttttggagaagacgaatgatggatctttcaaagtgaaagtcatgaaacagatcctatggattgaaggagaacgatatgaactacaagagttgtatggaatcgataattcaacaacacaaggtactgctgcatcggggttagaggatactgatggcaaagaatgtgtcatttgcttgactgaacctaaggacacagccgtcatgccttgtagacatttgtgtttgtgcagtgattgcgcagaagaactgaggtttcagacaaacaaatgtcccatttgtagacaacctatccatgagcttgtaaagattaaagtggaaagtagtgatgaacaacactgaaaaagaggtttcttcccttcacttaaacaccatgtttgattctttcttcttcttctttttgaaaaccgtcaaatcgaattctttttcccttttttcttatacaaatgtgttttctcatgtcatactcttgcacatatttgttggtcttagttttgggaaactcaaagaaaaaaaagtcagtaatgtatatatagctccaatggttcttgagaaactttctcttcgtatctttctacttgaaacactcattctgtaactgaatactttttggtttgggcattgctcaaatataacttgcaatcatatgttgtttatcgtaaaaaaaaaaaaaaaaactcgagggggggcccggt

SEQ ID NO: 20431 - protein, 398 aa, Arabidopsis thaliana
  peptide (1)..(398): Ceres Seq. ID no. 13647848
KSFDLTFVSPNLSRLVSSEAMGISLSKRRRDNNNHHHHPHHNPPYYYSDPPPQQPPPQNEYSYSHNYPVSTPQLSLPPPPAQPPSFSQPPPSQISYLPYGQNYHQNQYYPQQAPPYFTGYHHNGFNPMMRPVYFGPPPVAVMEPPAPYVEHQTAKKVKNDVNVNKATVRLVADDLNPGHYLVSFVFDALFDGSFTIIFFGEEESKCIIVPHLPEAFPPIKVPFQKGAGQKFLQAPGTGIDLGFFSLDDLSKPSPEEVYPLVISAETVISPSSVSEEPLVHKQITQAVLEKTNDGSFKVKVMKQILWIEGERYELQELYGIDNSTTQGTAASGLEDTDGKECVICLTEPKDTAVMPCRHLCLCSDCAEELRFQTNKCPICRQPIHELVKIKVESSDEQH

SEQ ID NO: 20432 - protein, 378 aa, Arabidopsis thaliana
  peptide (1)..(378): Ceres Seq. ID no. 13647849
MGISLSKRRRDNNNHHHHPHHNPPYYYSDPPPQQPPPQNEYSYSHNYPVSTPQLSLPPPPAQPPSFSQPPPSQISYLPYGQNYHQNQYYPQQAPPYFTGYHHNGFNPMMRPVYFGPPPVAVMEPPAPYVEHQTAKKVKNDVNVNKATVRLVADDLNPGHYLVSFVFDALFDGSFTIIFFGEEESKCIIVPHLPEAFPPIKVPFQKGAGQKFLQAPGTGIDLGFFSLDDLSKPSPEEVYPLVISAETVISPSSVSEEPLVHKQITQAVLEKTNDGSFKVKVMKQILWIEGERYELQELYGIDNSTTQGTAASGLEDTDGKECVICLTEPKDTAVMPCRHLCLCSDCAEELRFQTNKCPICRQPIHELVKIKVESSDEQH

SEQ ID NO: 20433 - protein, 271 aa, Arabidopsis thaliana
  peptide (1)..(271): Ceres Seq. ID no. 13647850
MMRPVYFGPPPVAVMEPPAPYVEHQTAKKVKNDVNVNKATVRLVADDLNPGHYLVSFVFDALFDGSFTIIFFGEEESKCIIVPHLPEAFPPIKVPFQKGAGQKFLQAPGTGIDLGFFSLDDLSKPSPEEVYPLVISAETVISPSSVSEEPLVHKQITQAVLEKTNDGSFKVKVMKQILWIEGERYELQELYGIDNSTTQGTAASGLEDTDGKECVICLTEPKDTAVMPCRHLCLCSDCAEELRFQTNKCPICRQPIHELVKIKVESSDEQH

SEQ ID NO: 20434 - DNA, 1110 bp, Arabidopsis thaliana
  misc_feature (1)..(1110): Ceres Seq. ID no. 14311243
ggaaacctcctcccgcagtcacacaactgcgcagagccaaaaataaacgaaacctccggcgaaagctacggcgaagagactgcgtctaactccgtttacacgccgattgtcttggagagagagagagagcacgaggtaaatcacgcaagggttagatgggaaaccagaaactaaagttgacggcggaggaagaggaggcgttactcgccggaatcagaaagcacggtcctggaaagtggaagaatattctccgggatccagaattcgctgatcagctcatccatcgctccaacattgacctaaaggataagtggcgtaacttgagtgttccccctggtactcaaagtttaactaataaggcacggccagcaaaagtcaaagaggaaggcgacactccggctgcagatgcaaatgatgctgtcactattccacggcctattcctactattccacctcctcccggtcggcgtactttaccttctgagttgatccctgatgaaaatacaaagaatgctcctaggtatgactgggtgatatttgaagctctctctgctttagccgatggtaatggatctgatgtcagttccatttatcatttcattgagcccaggcatgaagtaccgccaaattttagaagaatccttagtacaagactgaggaggcttgcagctcagagcaaacttgaaaaggttagcaccttcaaatctatacagaacttctataagatacccgatccatcaggaacaaaaataggtgtcccaaaaccaaaggagacacatacgaagctgcgccaagcaaacaatcagacctctgctgattcacaacagatgatcgaggaagctgcaataaccgcagcctgtaaagtcgtagaggcggagaataaaatagacgttgccaaactagcagcagaagagtttgagaagatgacaaagattgcagaagaaaatagaaaactcctggtcatagctactgagatgcatgaactatgttcctgtggggagactatgctcttggcttgaattgaatctatgggacattccttgtagctctcttcagttatctccgtaatggtgttgataataatatataaaaagaaaactaaattaattt

SEQ ID NO: 20435 - protein, 287 aa, Arabidopsis thaliana
  peptide (1)..(287): Ceres Seq. ID no. 14311244
MGNQKLKLTAEEEEALLAGIRKHGPGKWKNILRDPEFADQLIHRSNIDLKDKWRNLSVPPGTQSLTNKARPAKVKEEGDTPAADANDAVTIPRPIPTIPPPPGRRTLPSELIPDENTKNAPRYDWVIFEALSALADGNGSDVSSIYHFIEPRHEVPPNFRRILSTRLRRLAAQSKLEKVSTFKSIQNFYKIPDPSGTKIGVPKPKETHTKLRQANNQTSADSQQMIEEAAITAACKVVEAENKIDVAKLAAEEFEKMTKIAEENRKLLVIATEMHELCSCGETMLLA

SEQ ID NO: 20436 - DNA, 712 bp, Arabidopsis thaliana
  misc_feature (1)..(712): Ceres Seq. ID no. 13648568
gatagacccctcacctacgctttactctttcactcctctctctcctgctttgctccgccgtgagaggagaaacaaatggggaattgtcaagcggcggaggcggcaacgacggtgatacaacaaccagacggtaaatcggttagattttactgtacagtaaacgcgagcgaagtgattaagtcccatcccggtcaccacgtggctctcctcctctcttccgccgtacctcacggtggctctctccgcgtcactcgtataaagcttcttcgtccttctgataacctcttgctcggtcatgtttatagactcatctcctccgaagaggtgatgaaaggaataagagccaagaaatctggaaagatgaagaagattcatggagagttttctgttgcagaagaagagattaacccactaaccctaagatctgatgcttctgacaaagacactcagagaaggatatatgaaaagcagagaggaatgatgaacacaggrggrgytwccaagaaagttagagtttggcagccttytyttcaaagcatytcagaatytmcaagttaaaacccttcaatccatatttttctatctttttttcttactttggatttttttttattaccattggatttctctttatattgtggtttttcccaatcaaatttgtaaaggaagaagacccatttgtttgtggttgaagaagaagaaacttttgtcc

SEQ ID NO: 20437 - protein, 160 aa, Arabidopsis thaliana
  peptide (1)..(160): Ceres Seq. ID no. 15219562
  misc_feature (139)..(139): Xaa is any aa, unknown or other
  misc_feature (140)..(140): Xaa is any aa, unknown or other
  misc_feature (141)..(141): Xaa is any aa, unknown or other
  misc_feature (142)..(142): Xaa is any aa, unknown or other
  misc_feature (151)..(151): Xaa is any aa, unknown or other
  misc_feature (152)..(152): Xaa is any aa, unknown or other
  misc_feature (155)..(155): Xaa is any aa, unknown or other
  misc_feature (158)..(158): Xaa is any aa, unknown or other
  misc_feature (159)..(159): Xaa is any aa, unknown or other
MGNCQAAEAATTVIQQPDGKSVRFYCTVNASEVIKSHPGHHVALLLSSAVPHGGSLRVTRIKLLRPSDNLLLGHVYRLISSEEVMKGIRAKKSGKMKKIHGEFSVAEEEINPLTLRSDASDKDTQRRIYEKQRGMMNTXXXXKKVRVWQPXXQSXSEXXS

SEQ ID NO: 20438 - DNA, 965 bp, Arabidopsis thaliana
  misc_feature (1)..(965): Ceres Seq. ID no. 12605742
ggggtgattttcttctctggaaggatctgtttttctcttcttcgtcttctctcacccgcctactgactttttttcaaatttcttcagcaacacatacatacagtcacaaggtttccaattttcgattcacgatggaaatggcggaaggggaaggaactacagaggagaactacgacgtagacatcgcgaccaccgcttcttcattaggcggctccggcgtcttccatatcatcaatgacatagtcggattcgtcctctatatgcaccagcagatcccttcggtattacaagacatgagccttgaatttgaaggattgcaaactgaatttatggatttggagacgaatcttgcagaacctcaagtgaaaccactggttagaagaaaactgatgagtagaaagagagaggtgaagaatgagattaagaaactggagaaactgatgaaaaccatctctagtctccgaagtgcgctgcagttaatgatccgtgaagctcctggcattcagaaagttgtgttgattcttggtggtagtccattacggcctcaaaatgcttatgagttgttattcacacaacgcagagaccatgttctaggctacgaaggtgactttgctaaatccaaagctgcagaagcactttcaaaaaagactatccgagcactgatctcgacgggtgctggatcaacttcctacccaggtccaatgaggctcttcatattggttcatgctccacctactttgaatcttccacaacatttccttcctaaacgtgacttcagatacaacagaaagtttgtgccttcaaagttgagattcaagtgcagaacgcaagacaatgcaacaaattctcctcccacaaatgatctaatatggtacttctcttattcacaattctccagttacacactaaacaagttcttgaccatgccttactgtgtcattgcaggtatcaatgtcgacatgtga

SEQ ID NO: 20439 - protein, 320 aa, Arabidopsis thaliana
  peptide (1)..(320): Ceres Seq. ID no. 12605743
GDFLLWKDLFFSSSSSLTRLLTFFQISSATHTYSHKVSNFRFTMEMAEGEGTTEENYDVDIATTASSLGGSGVFHIINDIVGFVLYMHQQIPSVLQDMSLEFEGLQTEFMDLETNLAEPQVKPLVRRKLMSRKREVKNEIKKLEKLMKTISSLRSALQLMIREAPGIQKVVLILGGSPLRPQNAYELLFTQRRDHVLGYEGDFAKSKAAEALSKKTIRALISTGAGSTSYPGPMRLFILVHAPPTLNLPQHFLPKRDFRYNRKFVPSKLRFKCRTQDNATNSPPTNDLIWYFSYSQFSSYTLNKFLTMPYCVIAGINVDM

SEQ ID NO: 20440 - protein, 277 aa, Arabidopsis thaliana
  peptide (1)..(277): Ceres Seq. ID no. 12605744
MEMAEGEGTTEENYDVDIATTASSLGGSGVFHIINDIVGFVLYMHQQIPSVLQDMSLEFEGLQTEFMDLETNLAEPQVKPLVRRKLMSRKREVKNEIKKLEKLMKTISSLRSALQLMIREAPGIQKVVLILGGSPLRPQNAYELLFTQRRDHVLGYEGDFAKSKAAEALSKKTIRALISTGAGSTSYPGPMRLFILVHAPPTLNLPQHFLPKRDFRYNRKFVPSKLRFKCRTQDNATNSPPTNDLIWYFSYSQFSSYTLNKFLTMPYCVIAGINVDM

SEQ ID NO: 20441 - protein, 275 aa, Arabidopsis thaliana
  peptide (1)..(275): Ceres Seq. ID no. 12605745
MAEGEGTTEENYDVDIATTASSLGGSGVFHIINDIVGFVLYMHQQIPSVLQDMSLEFEGLQTEFMDLETNLAEPQVKPLVRRKLMSRKREVKNEIKKLEKLMKTISSLRSALQLMIREAPGIQKVVLILGGSPLRPQNAYELLFTQRRDHVLGYEGDFAKSKAAEALSKKTIRALISTGAGSTSYPGPMRLFILVHAPPTLNLPQHFLPKRDFRYNRKFVPSKLRFKCRTQDNATNSPPTNDLIWYFSYSQFSSYTLNKFLTMPYCVIAGINVDM

SEQ ID NO: 20442 - DNA, 1811 bp, Arabidopsis thaliana
  misc_feature (1)..(1811): Ceres Seq. ID no. 14302935
agttccttttccacttttaaccatcaccctataagtggttataactagtaacttgaaatagaaacactctatctctaaaagaggcaaccaaacaaacaaggtctagctttttataaccaaactctgcttctgaacagagttagtcaaagagagagaagccatggaagctatgaaggagactgtggaggagagcttgagagagatgagagagacgtttgcgagtgggaggacgaagagtctgaagtggaggaaggcacagatcggagctatatacgagatggttaaagacaacgaagacaagatctgcaatgctctgtttcaagatttgggcaaacacagtactgaagcttttagagatgagcttggtgttgtcttgcgaacagctactggtgcaatcaactgtcttgataaatgggccgtccccaaacatagcaaacttcctctgttgttctacccagcaaaagggaaagtcatatcggaaccctatgggacggttcttgttctgtctagctggaattttcctatatctttgtctctggatccattgattggggcaatagcagcaggaaataccgtgcttctcaagtcatctgaactaagccctaacgcatctgccttccttgccaagacaattccagcttatctcgatactaaagccatcaaagttatcgaaggaggacctgatgtcgctactatcctcttgcagcatcaatgggacaagatcttcttcaccgggagtcccaagattggaaggatcataatggctgcagcagcacagcatctgactcctgtgacattggagcttggtggaaaatgtcccaccattgttgatcatcacaccatttcaaagaacatcaagtcggttgtcaagaggattgctggaggaaaatggggatcttgcaatggacaagcttgtatctctgtagattacgttcttatcgaaaagagtttcgcgcctactctgattgatatgttgaagcctacgataaagtctttctttggcgaaaatcctaaagaatctggatgtctctcaaggattgcaaacaagcaccacgttcagagactgtctcgtcttcttagcgatcctcgtgtccaagcttccatcgtctatggtggttctatagacgaagataagctgtatgttgagccaacgatcttgttggaccctcctcttgattctgagatcatgaatgaagagatctttggtccaattctcccgattatcacggtacgtgacatccaagaaagcatagggatcattaatacaaaaccgaagccacttgccatttatgcattcacaaatgacgagaaccttaaaactagaattttgtcagaaacatcctcaggaagtgttaccttcaatgacgtcatgatccagtatatgtgtgatgcgttaccttttggaggagtgggagaaagtggaatagggaggtatcacgggaaatactcatttgattgtttcagtcacgagaaagcaataatggaaggaagcttaggtatggatcttgaagctcgataccctccatggaacaacttcaagctcaccttcatcagactcgcatttcgtgaagcttacttcaagcttatcctccttatgcttggtcttaaaagataaaagggggaaagtgagagacagagacacatacacacaaacagagacaatataagtgattgaattacatcacacttatgtttgcttatcatatcttcacctaataagtctcattccgaatgttttacatttctttcaagcttgagagattctatataaagtgatttgatatctatttctacgggatacgttcttagtg

SEQ ID NO: 20443 - protein, 484 aa, Arabidopsis thaliana
  peptide (1)..(484): Ceres Seq. ID no. 14302936
MEAMKETVEESLREMRETFASGRTKSLKWRKAQIGAIYEMVKDNEDKICNALFQDLGKHSTEAFRDELGVVLRTATGAINCLDKWAVPKHSKLPLLFYPAKGKVISEPYGTVLVLSSWNFPISLSLDPLIGAIAAGNTVLLKSSELSPNASAFLAKTIPAYLDTKAIKVIEGGPDVATILLQHQWDKIFFTGSPKIGRIIMAAAAQHLTPVTLELGGKCPTIVDHHTISKNIKSVVKRIAGGKWGSCNGQACISVDYVLIEKSFAPTLIDMLKPTIKSFFGENPKESGCLSRIANKHHVQRLSRLLSDPRVQASIVYGGSIDEDKLYVEPTILLDPPLDSEIMNEEIFGPILPIITVRDIQESIGIINTKPKPLAIYAFTNDENLKTRILSETSSGSVTFNDVMIQYMCDALPFGGVGESGIGRYHGKYSFDCFSHEKAIMEGSLGMDLEARYPPWNNFKLTFIRLAFREAYFKLILLMLGLKR

SEQ ID NO: 20444 - protein, 481 aa, Arabidopsis thaliana
  peptide (1)..(481): Ceres Seq. ID no. 14302937
MKETVEESLREMRETFASGRTKSLKWRKAQIGAIYEMVKDNEDKICNALFQDLGKHSTEAFRDELGVVLRTATGAINCLDKWAVPKHSKLPLLFYPAKGKVISEPYGTVLVLSSWNFPISLSLDPLIGAIAAGNTVLLKSSELSPNASAFLAKTIPAYLDTKAIKVIEGGPDVATILLQHQWDKIFFTGSPKIGRIIMAAAAQHLTPVTLELGGKCPTIVDHHTISKNIKSVVKRIAGGKWGSCNGQACISVDYVLIEKSFAPTLIDMLKPTIKSFFGENPKESGCLSRIANKHHVQRLSRLLSDPRVQASIVYGGSIDEDKLYVEPTILLDPPLDSEIMNEEIFGPILPIITVRDIQESIGIINTKPKPLAIYAFTNDENLKTRILSETSSGSVTFNDVMIQYMCDALPFGGVGESGIGRYHGKYSFDCFSHEKAIMEGSLGMDLEARYPPWNNFKLTFIRLAFREAYFKLILLMLGLKR

SEQ ID NO: 20445 - protein, 470 aa, Arabidopsis thaliana
  peptide (1)..(470): Ceres Seq. ID no. 14302938
MRETFASGRTKSLKWRKAQIGAIYEMVKDNEDKICNALFQDLGKHSTEAFRDELGVVLRTATGAINCLDKWAVPKHSKLPLLFYPAKGKVISEPYGTVLVLSSWNFPISLSLDPLIGAIAAGNTVLLKSSELSPNASAFLAKTIPAYLDTKAIKVIEGGPDVATILLQHQWDKIFFTGSPKIGRIIMAAAAQHLTPVTLELGGKCPTIVDHHTISKNIKSVVKRIAGGKWGSCNGQACISVDYVLIEKSFAPTLIDMLKPTIKSFFGENPKESGCLSRIANKHHVQRLSRLLSDPRVQASIVYGGSIDEDKLYVEPTILLDPPLDSEIMNEEIFGPILPIITVRDIQESIGIINTKPKPLAIYAFTNDENLKTRILSETSSGSVTFNDVMIQYMCDALPFGGVGESGIGRYHGKYSFDCFSHEKAIMEGSLGMDLEARYPPWNNFKLTFIRLAFREAYFKLILLMLGLKR

SEQ ID NO: 20446 - DNA, 1701 bp, Arabidopsis thaliana
  misc_feature (1)..(1701): Ceres Seq. ID no. 14302943
gcaccaggagctcactagtccccccccccccccggtctcctccaatcatgtcgtttcaaaatcctctaatttctcagtcctagtgctaaagctcttgctgggttcaagttgatttctcagtcatcgattgaaattttctcgggaaaaagttctcatcgtctaccatcgacaacgagaaaccagaaaatgcaaagtcttagtcaacttggaccttcagagattttccttgtcgccagaagagaaaaacccagtacgagagcacagctttggtttacgggaagactctcttttagacaagaaacaaatggggttcgtttaaagaatagagtagagtttagtccaagacctgtacctccaaatctgattgcagcagagaaagaagaagctaaagcagttcttactctattcttcaagaagcaaggtcttagcaacagtctctcttctcggttaatcaacaaatccgatcaattcattgaccatttagtgtccaggctccattctgttcacaaagctcgatacctcgtaggaagagaacttactacacttgagattcgagattctcttattccttacctcgaacaacttcatgaagaacatggtgatcttctcgctgagcttgttgtgagcttccctgatccaccagctgagcctagactcgttgcttcatcttcagttccggtcctaccacctcgtggtgacacagattctgcggcagacactcggaaactgagagctgtgtctcgagtcagcgaacttgacacagaaggtgcattacgtcctcagaccctttaccttcttgaccttggtttaaacctggagcagatcaaaacaatcactcgaaagttcgctgcctttccttattacagcctcgacggaaaaataaaacccgttgtggaattccttctagacctcggaattcctaaatcagatatccccacaatcctctgcaaacgcccacagatatgcggaatcagcctaacagataacctgaaaccgacaatggcctttcttgagacgcttggcattgacaagaaccaatgggcaaagatcatttcccgtttcccagccatcctcacttacagccgccagaaacttacttcaactgtcgagttcttatcccaaactggtctcacagaagaacagatagggagaatcctaacccgatgtccaaacatcatgagttacagtgtagaagacaagctccgtccaactatggagtactttagatcgctaaatgtcgatgttgcggttctcctacatcgatgtccccaaacgttcggattaagcatagagtcgaatttgaagccagtaactgagttcttcctcgaaaagggttttggtttagatgaaattggagtcatgatctctagatatggagctttgtacacattcagcttgaaagagaatgtcatgccgaaatgggattactttcagacaatggactatccgaaatccgagcttgtgaaattccctcagttttttgggtacagtttacaagagaggatcaagccgagatacgagctggttcagagaagtggagtgagactgctgttgaaccaggttttatcgctgtcgggaattgagttcgagaaagttgttaagaagaagatgatgaaacttgtgtctaataacgtaatcgatgaacaaagtagtggtggtttgttgtgaatgttttagttttagagtaatcaatttgccgag

SEQ ID NO: 20447 - protein, 493 aa, Arabidopsis thaliana
  peptide (1)..(493): Ceres Seq. ID no. 14302944
MQSLSQLGPSEIFLVARREKPSTRAQLWFTGRLSFRQETNGVRLKNRVEFSPRPVPPNLIAAEKEEAKAVLTLFFKKQGLSNSLSSRLINKSDQFIDHLVSRLHSVHKARYLVGRELTTLEIRDSLIPYLEQLHEEHGDLLAELVVSFPDPPAEPRLVASSSVPVLPPRGDTDSAADTRKLRAVSRVSELDTEGALRPQTLYLLDLGLNLEQIKTITRKFAAFPYYSLDGKIKPVVEFLLDLGIPKSDIPTILCKRPQICGISLTDNLKPTMAFLETLGIDKNQWAKIISRFPAILTYSRQKLTSTVEFLSQTGLTEEQIGRILTRCPNIMSYSVEDKLRPTMEYFRSLNVDVAVLLHRCPQTFGLSIESNLKPVTEFFLEKGFGLDEIGVMISRYGALYTFSLKENVMPKWDYFQTMDYPKSELVKFPQFFGYSLQERIKPRYELVQRSGVRLLLNQVLSLSGIEFEKVVKKKMMKLVSNNVIDEQSSGGLL

SEQ ID NO: 20448 - DNA, 863 bp, Arabidopsis thaliana
  misc_feature (1)..(863): Ceres Seq. ID no. 12606053
aaccggacaacatctcaaaacttgttctgtttttttttttttcatttcttaaacagaaaaatggttgcagcattctcttacactgcctgcaccaagctttctctattacatccttctatggttgctcaaatccgaccaagaacaacacaaaaggcgttcgtggtgacaaatccggaacaagacagtactcttgaagtacaagaaacagagacactcaaagaagagcaatcaacagagaagatgaagaagcagccaacaccattgagaccagtggagaaacagctgaacgtgaagagcaagggtatgggcgattttggtggtcagtggctaagcagtgtcacacgtcacgttaggatctacgctgcttatattgatccagagacttgtgagtttgaccagtcacaaatggataaactcactttgattcttgatcctactgaagaatttgtgtgggatgatgaaagctgtaacaaggtctattcttatttccaagaactcgtcgatcactacgagggagcaccattaacggagtacacattgagattgataggatcggacgtagaacattacataaggaagatgttgttcgatggagaaatacaatacaatatggatgcaagagttcttaatttcagtatgggaaagcctcgtgtacaattcaataccagtaacattgaaggtggtggagatggtcagcctcaagaggacgcttagtgaaacaaactctattttataatcatgtaatgggaatataaatatattgtagtatgctttttaattttgtctatcacaaagtaacatatgtatatatcatgacatatgctataattatttttgtaataatcaatcttaagtttcttttc

SEQ ID NO: 20449 - protein, 237 aa, Arabidopsis thaliana
  peptide (1)..(237): Ceres Seq. ID no. 12606054
NRTTSQNLFCFFFFHFLNRKMVAAFSYTACTKLSLLHPSMVAQIRPRTTQKAFVVTNPEQDSTLEVQETETLKEEQSTEKMKKQPTPLRPVEKQLNVKSKGMGDFGGQWLSSVTRHVRIYAAYIDPETCEFDQSQMDKLTLILDPTEEFVWDDESCNKVYSYFQELVDHYEGAPLTEYTLRLIGSDVEHYIRKMLFDGEIQYNMDARVLNFSMGKPRVQFNTSNIEGGGDGQPQEDA

SEQ ID NO: 20450 - protein, 217 aa, Arabidopsis thaliana
  peptide (1)..(217): Ceres Seq. ID no. 12606055
MVAAFSYTACTKLSLLHPSMVAQIRPRTTQKAFVVTNPEQDSTLEVQETETLKEEQSTEKMKKQPTPLRPVEKQLNVKSKGMGDFGGQWLSSVTRHVRIYAAYIDPETCEFDQSQMDKLTLILDPTEEFVWDDESCNKVYSYFQELVDHYEGAPLTEYTLRLIGSDVEHYIRKMLFDGEIQYNMDARVLNFSMGKPRVQFNTSNIEGGGDGQPQEDA

SEQ ID NO: 20451 - protein, 198 aa, Arabidopsis thaliana
  peptide (1)..(198): Ceres Seq. ID no. 12606056
MVAQIRPRTTQKAFVVTNPEQDSTLEVQETETLKEEQSTEKMKKQPTPLRPVEKQLNVKSKGMGDFGGQWLSSVTRHVRIYAAYIDPETCEFDQSQMDKLTLILDPTEEFVWDDESCNKVYSYFQELVDHYEGAPLTEYTLRLIGSDVEHYIRKMLFDGEIQYNMDARVLNFSMGKPRVQFNTSNIEGGGDGQPQEDA

SEQ ID NO: 20452 - DNA, 582 bp, Arabidopsis thaliana
  misc_feature (1)..(582): Ceres Seq. ID no. 13648103
gaaaataatcttcatagtctctcatccaatcttacaaactttctgatttcctttctacattcatcgaccaatggcagcaaacaaaactcttcctacgtatttttgcagaaactgcgagaatccactagctctcggtgaagatctcatctccaaaaaatttgtgggagcttcagggccagcgtttatgttttcacacgcgatgaacgtggtggttggaccgaagattgggaggaaactgataaccggatcgtatgtagtggcagatgtgatgtgcagtaagtgtggtgagacgttgggttggaaatatgttgagacattcgatcttaaacagaggtataaagaaggcatgtttgtcatcgagaagctcaagttgaccaaaagatattgaaacctagtcaagaagaataatactcttggagggttaagctaataaataaatgaaggaaacttgaggattgtatatgtatatataacctttgttgtataaatgtcatcactatattggttgttctctataaagggatttgaaaacaaagtaaaaaaaaaaaaaaaaaaaactcgagggggggcccggtacccaat

SEQ ID NO: 20453 - protein, 105 aa, Arabidopsis thaliana
  peptide (1)..(105): Ceres Seq. ID no. 13648104
MAANKTLPTYFCRNCENPLALGEDLISKKFVGASGPAFMFSHAMNVVVGPKIGRKLITGSYVVADVMCSKCGETLGWKYVETFDLKQRYKEGMFVIEKLKLTKRY

SEQ ID NO: 20454 - protein, 67 aa, Arabidopsis thaliana
  peptide (1)..(67): Ceres Seq. ID no. 13648105
MFSHAMNVVVGPKIGRKLITGSYVVADVMCSKCGETLGWKYVETFDLKQRYKEGMFVIEKLKLTKRY

SEQ ID NO: 20455 - protein, 62 aa, Arabidopsis thaliana
  peptide (1)..(62): Ceres Seq. ID no. 13648106
MNVVVGPKIGRKLITGSYVVADVMCSKCGETLGWKYVETFDLKQRYKEGMFVIEKLKLTKRY

SEQ ID NO: 20456 - DNA, 564 bp, Arabidopsis thaliana
  misc_feature (1)..(564): Ceres Seq. ID no. 13648495
tagtccccccccccccccccccaaaaagttttatcgattccaccaaattagggcgaacgcgaaatctgggtattgtaatttgaagcgatggcgacgactggaactgctgcggttgcgacgggaacttcgacggtgaagagaaaaccggtgtttgtgaaggtggaacagctaaagcctggaacgactggtcacacgttgactgttaaagtcattgaggctaatatcgtggttcctgttacccggaagactcgtccagcgagttctctgagtcgtccttctcagcctagtcgaatcgttgagtgtctcatcggtgacgaaactgggtgtatcctcttcactgctcgtaacgatcaaggttattgtttctccacttttctcttgctttatggatatagaaatggtgtcttcgtagtttattagagtgataagtcttatcctttgttgttctctcgtttgtcttaatcaatttctattttgagcaaaaaaaaaaaaaaaaaaaactcgagggggggcccggtacccaattgttaaacacaataaagtgggaactggaggggggaaagg

SEQ ID NO: 20457 - protein, 110 aa, Arabidopsis thaliana
  peptide (1)..(110): Ceres Seq. ID no. 13648496
MATTGTAAVATGTSTVKRKPVFVKVEQLKPGTTGHTLTVKVIEANIVVPVTRKTRPASSLSRPSQPSRIVECLIGDETGCILFTARNDQGYCFSTFLLLYGYRNGVFVVY

SEQ ID NO: 20458 - DNA, 3205 bp, Arabidopsis thaliana
  misc_feature (1)..(3205): Ceres Seq. ID no. 13648499
gatgcttcggtgttggtcagtcaccgtcgagagatcatgcgaaggaatgctcctcaggcggaggatactatcgctctctgcgtcgtcgttcagaaactttacttccggtaacaacggcgacgctattccgttctctaccttcacgaaaccttcttcttcaatcgctcccggagatttcctcgtccgtgaatggaaagactggtttaagcatcgagatgtgaaacagagccaccaattaatcgatcgaatctttgacatccttcgagctccttctaacgatggagacgatagagctttttatctccacctctccaatctccgacttcgtctcactgagaaattcgtcctcgacgtgctttcacacactcgttacgatatcctctgttgtctcaaattcttcgattgggctgctcgtcagcctgggtttcatcacacgcgtgctacttttcatgctatcttcaagatccttcgtggtgcgaagcttgtgactcttatgattgactttttggatcgaagtgttggttttgaaagttgccgtcattctcttcgtctctgtgatgctcttgttgttggttatgctgtagctggtcgtactgatatagctcttcagcattttggtaatatgagatttcgaggtttggatttggattcttttgggtatcatgtgcttttgaatgcacttgttgaggagaagtgttttgatagttttgatgtcatcttcgaccagatctccgtgcgtggcttcgtatgtgctgttacgcattcgattttggtgaagaagttttgcaagcaagggaagcttgatgaggctgaagattatcttcgagccttgctgcctaatgatcctgctggatgtggttctggcttaggtatattggttgatgctctatgttccaaacgaaagtttcaggaagctactaagttgttagacgagatcaaactggtgggaacagtgaatatggaccgtgcttataacatttggattagggcgcttattaaagctggattcttgaataaccctgcggatttcttgcagaagattagtcctttggaaggttgtgaactcgaagttttcaggtataactctatggtctttcaacttttgaaggagaacaatcttgatggtgtgtatgatattcttacggagatgatggtacgtggagtttcgccgaataagaaaacgatgaatgctgctttatgcttcttttgcaaagctggatttgtagatgaagccctcgagttataccggtcgaggtcagaaattgggtttgctcctaccgccatgtcttacaactatctgattcataccctttgtgccaatgaaagtgttgaacaagcttatgatgtcttgaaaggggcaattgaccgagggcattttcttggtggaaagacatttagtacactaaccaatgccttgtgctggaaggggaagcctgacatggcaagggagctggttattgctgccgctgaacgggacttattgcctaaacgtatagctggttgcaagattatatcagctctttgcgatgttgggaaagtggaggacgctcttatgattaatgagctattcaataaaagtggtgtagacacctcctttaaaatgttcaccagtttgatatatggctcaatcacactaatgaggggagacatagctgctaaacttatcatcaggatgcaggaaaagggctacaccccgacccgtagtctctatcgaaatgttattcaatgtgtttgtgagatggaaagtggtgaaaaaaacttctttactactttgctaaagtttcagttgtctctttgggaacacaaggttcaggcctacaacttattcattgaaggagctgggtttgcaggaaaaccaaaacttgcaagactagtgtatgatatgatggatagagatggtatcacgcccacagtagcttcaaacattctcatgcttcagagttatctaaaaaatgagaaaatcgccgatgctcttcactttttccatgacctgcgtgaacaaggtaagaccaaaaaaagactgtaccaagttatgattgttggtctctgtaaagcaaataaattggatgatgctatgcatttcttggaagaaatgaagggagaaggactacagcctagtatcgaatgttacgaagtaaacatacaaaaattgtgcaacgaagaaaagtatgatgaggcagttggattagtcaatgaatttaggaaaagtgggcgtcgtattacagctttcataggtaatgtccttttgcataacgcaatgaagagcaaaggggtgtatgaagcatggacacggatgagaaatatagaagataagatccctgagatgaagtcacttggtgagttgataggattattctcaggacgaatagatatggaagtagaactgaagcggttagatgaagttatagagaaatgctatcctcttgatatgtacacgtacaatatgctgttgagaatgattgtaatgaaccaggcggaagatgcatatgagatggttgaaagaatagctcggagaggatatgtgcctaatgaacggactgacatgatccttgaacgggctaaccgcatactagaggaacggaattcaaggtcaaacttagggaggaatggttggaatagtagacagaggcaacttgaatgatgaaaagtatgtcacagagaggtcagaattgttgaatagagagaacaagggagttgatttggattcagtatctgttttgggatttggatcatggacaacagatgaatgagaaaagccagattcttcttcttgaggctttatatgtcctggacgttgtaacttgcaggagcttttttatctctggattgcaaaagatcgatggtattttcccagaagctttttgtttttttttaagtaaagatcgatgtgtcactaaagacacttacagaattgggtagtatccattatgtacacaattgtttgtagtctttccaagaaacacacaagaattgggtagtatccattatgtacacaattgtttgtagtctttcctagaaacacacaagttttgttgtgcgacacaactactcagagagagatttcaacaattttttgtcatattctttatgtgttgcctgttggtaaggaaaatcaatggtggtcgcccgccttgtttcgaaaattggtgtttgtaattacatttgtttactagttctagtaatgatgaatcttcttattttgttg

SEQ ID NO: 20459 - protein, 879 aa, Arabidopsis thaliana
  peptide (1)..(879): Ceres Seq. ID no. 13648500
MLRCWSVTVERSCEGMLLRRRILSLSASSFRNFTSGNNGDAIPFSTFTKPSSSIAPGDFLVREWKDWFKHRDVKQSHQLIDRIFDILRAPSNDGDDRAFYLHLSNLRLRLTEKFVLDVLSHTRYDILCCLKFFDWAARQPGFHHTRATFHAIFKILRGAKLVTLMIDFLDRSVGFESCRHSLRLCDALVVGYAVAGRTDIALQHFGNMRFRGLDLDSFGYHVLLNALVEEKCFDSFDVIFDQISVRGFVCAVTHSILVKKFCKQGKLDEAEDYLRALLPNDPAGCGSGLGILVDALCSKRKFQEATKLLDEIKLVGTVNMDRAYNIWIRALIKAGFLNNPADFLQKISPLEGCELEVFRYNSMVFQLLKENNLDGVYDILTEMMVRGVSPNKKTMNAALCFFCKAGFVDEALELYRSRSEIGFAPTAMSYNYLIHTLCANESVEQAYDVLKGAIDRGHFLGGKTFSTLTNALCWKGKPDMARELVIAAAERDLLPKRIAGCKIISALCDVGKVEDALMINELFNKSGVDTSFKMFTSLIYGSITLMRGDIAAKLIIRMQEKGYTPTRSLYRNVIQCVCEMESGEKNFFTTLLKFQLSLWEHKVQAYNLFIEGAGFAGKPKLARLVYDMMDRDGITPTVASNILMLQSYLKNEKIADALHFFHDLREQGKTKKRLYQVMIVGLCKANKLDDAMHFLEEMKGEGLQPSIECYEVNIQKLCNEEKYDEAVGLVNEFRKSGRRITAFIGNVLLHNAMKSKGVYEAWTRMRNIEDKIPEMKSLGELIGLFSGRIDMEVELKRLDEVIEKCYPLDMYTYNMLLRMIVMNQAEDAYEMVERIARRGYVPNERTDMILERANRILEERNSRSNLGRNGWNSRQRQLE

SEQ ID NO: 20460 - protein, 864 aa, Arabidopsis thaliana
  peptide (1)..(864): Ceres Seq. ID no. 13648501
MLLRRRILSLSASSFRNFTSGNNGDAIPFSTFTKPSSSIAPGDFLVREWKDWFKHRDVKQSHQLIDRIFDILRAPSNDGDDRAFYLHLSNLRLRLTEKFVLDVLSHTRYDILCCLKFFDWAARQPGFHHTRATFHAIFKILRGAKLVTLMIDFLDRSVGFESCRHSLRLCDALVVGYAVAGRTDIALQHFGNMRFRGLDLDSFGYHVLLNALVEEKCFDSFDVIFDQISVRGFVCAVTHSILVKKFCKQGKLDEAEDYLRALLPNDPAGCGSGLGILVDALCSKRKFQEATKLLDEIKLVGTVNMDRAYNIWIRALIKAGFLNNPADFLQKISPLEGCELEVFRYNSMVFQLLKENNLDGVYDILTEMMVRGVSPNKKTMNAALCFFCKAGFVDEALELYRSRSEIGFAPTAMSYNYLIHTLCANESVEQAYDVLKGAIDRGHFLGGKTFSTLTNALCWKGKPDMARELVIAAAERDLLPKRIAGCKIISALCDVGKVEDALMINELFNKSGVDTSFKMFTSLIYGSITLMRGDIAAKLIIRMQEKGYTPTRSLYRNVIQCVCEMESGEKNFFTTLLKFQLSLWEHKVQAYNLFIEGAGFAGKPKLARLVYDMMDRDGITPTVASNILMLQSYLKNEKIADALHFFHDLREQGKTKKRLYQVMIVGLCKANKLDDAMHFLEEMKGEGLQPSIECYEVNIQKLCNEEKYDEAVGLVNEFRKSGRRITAFIGNVLLHNAMKSKGVYEAWTRMRNIEDKIPEMKSLGELIGLFSGRIDMEVELKRLDEVIEKCYPLDMYTYNMLLRMIVMNQAEDAYEMVERIARRGYVPNERTDMILERANRILEERNSRSNLGRNGWNSRQRQLE

SEQ ID NO: 20461 - protein, 715 aa, Arabidopsis thaliana
  peptide (1)..(715): Ceres Seq. ID no. 13648502
MIDFLDRSVGFESCRHSLRLCDALVVGYAVAGRTDIALQHFGNMRFRGLDLDSFGYHVLLNALVEEKCFDSFDVIFDQISVRGFVCAVTHSILVKKFCKQGKLDEAEDYLRALLPNDPAGCGSGLGILVDALCSKRKFQEATKLLDEIKLVGTVNMDRAYNIWIRALIKAGFLNNPADFLQKISPLEGCELEVFRYNSMVFQLLKENNLDGVYDILTEMMVRGVSPNKKTMNAALCFFCKAGFVDEALELYRSRSEIGFAPTAMSYNYLIHTLCANESVEQAYDVLKGAIDRGHFLGGKTFSTLTNALCWKGKPDMARELVIAAAERDLLPKRIAGCKIISALCDVGKVEDALMINELFNKSGVDTSFKMFTSLIYGSITLMRGDIAAKLIIRMQEKGYTPTRSLYRNVIQCVCEMESGEKNFFTTLLKFQLSLWEHKVQAYNLFIEGAGFAGKPKLARLVYDMMDRDGITPTVASNILMLQSYLKNEKIADALHFFHDLREQGKTKKRLYQVMIVGLCKANKLDDAMHFLEEMKGEGLQPSIECYEVNIQKLCNEEKYDEAVGLVNEFRKSGRRITAFIGNVLLHNAMKSKGVYEAWTRMRNIEDKIPEMKSLGELIGLFSGRIDMEVELKRLDEVIEKCYPLDMYTYNMLLRMIVMNQAEDAYEMVERIARRGYVPNERTDMILERANRILEERNSRSNLGRNGWNSRQRQLE

SEQ ID NO: 20462 - DNA, 1694 bp, Arabidopsis thaliana
  misc_feature (1)..(1694): Ceres Seq. ID no. 14313532
gcaccaggagctcactaatccccccccccccccccatcgcttcttccgaaagctttcacatttgatatcaaaatcgagaaacaaaaattgaaaacaatctgtttcaccaaaaaaagaacaaaatgcatgggttcgatttcaaagagatccaggagaagatctccgatagctttcgtccatggcaacgctcttttcaattctgggttcgagctactaatatctacacaggctacaaggtgtttcaacttcgagtaagtttagtgaaagatgcaaagaagcaagaggaaatgtgggaaagacaacatgaacaagctgctgataagatttacttcatgtgctctgatcttggtggtttcttccttaagattgctcaacttttagcaaaacctgacatggcaccagctgcgtgggtgaaaaagcttgtcactttgtgtgatcaagctcctgcgacgccgtttgatgcgattcaacttgttctagagaaggagttaggtaaaagcattggtgaaatctttgaaacgtttgatgaaaagcctcttggttctgcttctattgctcaggttcaacatcctggcattgaaagattgatgatgacagacataagaaacttgcaactattcgccttatacatgcagagaacagatatcaaatttgacctgcattccataacaaaggaaatggagaaacagattggttatgaatttgacttcaaaagggaggccaatgcaatggaaagaattcgatgttttctttatgagaacaacaaaaagtctcctgttttggtaccaagagttctgcgagatatggtgactaagagggttttggtgatggaatacattaatggaattccaatcctgagcattggtgatgagatggctaaaagagggataaatcctcatggtaagattgcagaggcagcaaagcacaatatacttaacagtttatcccgtgcgtatggccaaatgatactgaaaagtggtttctttcatgcggatccacatcctggaaatatcttgatttgcaaaggtcaagaggttgcattgctggactatggtcaagtgaaggaactacccaacaagttgagacttggttatgcaaatttggtcattgccatggctgataacaatgcttcacgagtatcacagagcttttgggaaatgggtttacatacagtggccaagtgtgagaatgagcagcaagaacttctgcggttagcacaaacactttttgatacaaagatgcctactggtcagacagttttgcaacctttctcagatgactcttcgattaaaaagatagccgttgagacatttccagaggaactgttctctgtacttcgcactgtggttctgttaagaggactcagtgttgggatgggagttaattattcgtgtgcagaacaatggagagcaatggccgaagaggctttacttgcatctggaagagtgacaagagatggcaaagaaagatctcgtagacgggcttctctacgaaggctacgcacaggaagttaggaaaaagataggagtatttctcatcacttagactctcccatgagcaggatctgagcttttttcatttattgttctttcttttgtgagaatttgaatgataggagaagttggataacacttgaatgtaattggctgatataaaattatgatggaagatttgtaaatcaagatttaattcgc

SEQ ID NO: 20463 - protein, 463 aa, Arabidopsis thaliana
  peptide (1)..(463): Ceres Seq. ID no. 14313533
MHGFDFKEIQEKISDSFRPWQRSFQFWVRATNIYTGYKVFQLRVSLVKDAKKQEEMWERQHEQAADKIYFMCSDLGGFFLKIAQLLAKPDMAPAAWVKKLVTLCDQAPATPFDAIQLVLEKELGKSIGEIFETFDEKPLGSASIAQVQHPGIERLMMTDIRNLQLFALYMQRTDIKFDLHSITKEMEKQIGYEFDFKREANAMERIRCFLYENNKKSPVLVPRVLRDMVTKRVLVMEYINGIPILSIGDEMAKRGINPHGKIAEAAKHNILNSLSRAYGQMILKSGFFHADPHPGNILICKGQEVALLDYGQVKELPNKLRLGYANLVIAMADNNASRVSQSFWEMGLHTVAKCENEQQELLRLAQTLFDTKMPTGQTVLQPFSDDSSIKKIAVETFPEELFSVLRTVVLLRGLSVGMGVNYSCAEQWRAMAEEALLASGRVTRDGKERSRRRASLRRLRTGS

SEQ ID NO: 20464 - protein, 408 aa, Arabidopsis thaliana
  peptide (1)..(408): Ceres Seq. ID no. 14313534
MWERQHEQAADKIYFMCSDLGGFFLKIAQLLAKPDMAPAAWVKKLVTLCDQAPATPFDAIQLVLEKELGKSIGEIFETFDEKPLGSASIAQVQHPGIERLMMTDIRNLQLFALYMQRTDIKFDLHSITKEMEKQIGYEFDFKREANAMERIRCFLYENNKKSPVLVPRVLRDMVTKRVLVMEYINGIPILSIGDEMAKRGINPHGKIAEAAKHNILNSLSRAYGQMILKSGFFHADPHPGNILICKGQEVALLDYGQVKELPNKLRLGYANLVIAMADNNASRVSQSFWEMGLHTVAKCENEQQELLRLAQTLFDTKMPTGQTVLQPFSDDSSIKKIAVETFPEELFSVLRTVVLLRGLSVGMGVNYSCAEQWRAMAEEALLASGRVTRDGKERSRRRASLRRLRTGS

SEQ ID NO: 20465 - protein, 393 aa, Arabidopsis thaliana
  peptide (1)..(393): Ceres Seq. ID no. 14313535
MCSDLGGFFLKIAQLLAKPDMAPAAWVKKLVTLCDQAPATPFDAIQLVLEKELGKSIGEIFETFDEKPLGSASIAQVQHPGIERLMMTDIRNLQLFALYMQRTDIKFDLHSITKEMEKQIGYEFDFKREANAMERIRCFLYENNKKSPVLVPRVLRDMVTKRVLVMEYINGIPILSIGDEMAKRGINPHGKIAEAAKHNILNSLSRAYGQMILKSGFFHADPHPGNILICKGQEVALLDYGQVKELPNKLRLGYANLVIAMADNNASRVSQSFWEMGLHTVAKCENEQQELLRLAQTLFDTKMPTGQTVLQPFSDDSSIKKIAVETFPEELFSVLRTVVLLRGLSVGMGVNYSCAEQWRAMAEEALLASGRVTRDGKERSRRRASLRRLRTGS

SEQ ID NO: 20466 - DNA, 1130 bp, Arabidopsis thaliana
  misc_feature (1)..(1130): Ceres Seq. ID no. 14307589
  misc_feature (1)..(1130): Ortholog of  Ceres SEQ ID NO 13584238 as cited in SEQ ID NO 64216
gaaaccagttgagaagtaaaattttctattgcagagagaaagagagttagagaaagagagagagagatgaaacttgtgcaagaagaataccgtaaaggaccgtggacagaacaggaggacatcctcttggtcaactttgtccacttgttcggagatcgaagatgggattttgtagcgaaagtttcaggtttgaaggtggagggagaaacataagaataggtataggtttgttttggaaaaatgggcggtctttggaaaggaccttccatttaaagaaatgacctggttttggttgtaggtttaaacagaacaggaaagagttgcaggttaaggtgggttaattacctgcatcctggtctcaaacgtggtaagatgactccacaagaagagcgtttagtccttgagcttcacgccaaatggggaaacaggtggtcaaaaattgcccggaaattaccggggagaacagataatgagataaagaactactggaggactcatatgaggaagaaggctcaagagaagaagcgacctatgtctcctacttcctcatcttcaaactgttgctcatcatctatgaccactactactactcaagacactggaggctccaacgggaaaatgaatcaagaaggcgaagacgggtactactccatggatgacatatggagagagattgatcagtctggagcaaacgttattaagccggtaaaagacaactactactcagagcaaagttgttacttgaatttccctcctctgggttgtccaacatgggaaagttccttggagtctatatggaacatggatgcagatgaaagtaagatgtcttcttttgctattgatcagtttcctctaagttttgaacatggtagtggtcgcctttagtctaggatttgattcatttggaatgtttatatgtgcagcatatatatgttatcaaacgacgactgtagtagtttcctatgacttacatcaaaaaacaccacccactgtactaatctcataagtagtcatcatcctatgcctttgtttagtttgtagagtgagtgaaaagatgtgtaatacaagtcagaactctaattccaaaataaatagacttttgaagcttctgtgaaagtttgtaagaaacc

SEQ ID NO: 20467 - protein, 170 aa, Arabidopsis thaliana
  peptide (1)..(170): Ceres Seq. ID no. 14307590
MTPQEERLVLELHAKWGNRWSKIARKLPGRTDNEIKNYWRTHMRKKAQEKKRPMSPTSSSSNCCSSSMTTTTTQDTGGSNGKMNQEGEDGYYSMDDIWREIDQSGANVIKPVKDNYYSEQSCYLNFPPLGCPTWESSLESIWNMDADESKMSSFAIDQFPLSFEHGSGRL

SEQ ID NO: 20468 - protein, 128 aa, Arabidopsis thaliana
  peptide (1)..(128): Ceres Seq. ID no. 14307591
MRKKAQEKKRPMSPTSSSSNCCSSSMTTTTTQDTGGSNGKMNQEGEDGYYSMDDIWREIDQSGANVIKPVKDNYYSEQSCYLNFPPLGCPTWESSLESIWNMDADESKMSSFAIDQFPLSFEHGSGRL

SEQ ID NO: 20469 - protein, 117 aa, Arabidopsis thaliana
  peptide (1)..(117): Ceres Seq. ID no. 14307592
MSPTSSSSNCCSSSMTTTTTQDTGGSNGKMNQEGEDGYYSMDDIWREIDQSGANVIKPVKDNYYSEQSCYLNFPPLGCPTWESSLESIWNMDADESKMSSFAIDQFPLSFEHGSGRL

SEQ ID NO: 20470 - DNA, 823 bp, Arabidopsis thaliana
  misc_feature (1)..(823): Ceres Seq. ID no. 12466413
  misc_feature (1)..(823): Ortholog of  Ceres SEQ ID NO 12556855 as cited in SEQ ID NO 1
  misc_feature (1)..(823): Ortholog of  Ceres SEQ ID NO 15178869 as cited in SEQ ID NO 0
actcaaaagtgtgtgtgtgtcaaaatctctagcaccgatttttctaaataacgtcgtctcacagtcacacacacacagctctaaaatccctctacgaggtttttcttcaaactcgccgaaaaatctaatctttacgaagacccagatcggcggatctagagttgaaatggcgagacacacggcggcgctgaagatcgggctagctttactggggctgagcatggctggttacattcttggtccgcctctctactggcatctcactgaggctttggccgccgtttccgcctcctcttgtccttcttgcccctgtgaatgctctacctattccgctgtcaccattcccaaagagctcagtaatgcttcttttgctgattgtgcaaagcacgatccagaggtgaacgaagacactgagaagaactatgctgaacttcttaccgaggaactgaagctgcgtgaagcagaatctttagagaaacacaaacgagcagacatggggctattggaggccaagaaggtaacttcttcataccaaaaggaagcagataagtgcaactcgggtatggaaacatgcgaagaagctcgagaaaaagcagaattagcactcgccgagcagaaaaagctaacatctaggtgggaagagagagctcgccaaaaaggatggagagaaggttccaccaagccaaatgttaaatccaaaagcaatgttcaggttgcttaggatacccaaggatcagcaaaaagatcttagttacaaaccactcgtgtaattgtttgtgaattggatgctaacaatatagtgtcaactattattatactttcc

SEQ ID NO: 20471 - protein, 239 aa, Arabidopsis thaliana
  peptide (1)..(239): Ceres Seq. ID no. 12466414
LKSVCVSKSLAPIFLNNVVSQSHTHSSKIPLRGFSSNSPKNLIFTKTQIGGSRVEMARHTAALKIGLALLGLSMAGYILGPPLYWHLTEALAAVSASSCPSCPCECSTYSAVTIPKELSNASFADCAKHDPEVNEDTEKNYAELLTEELKLREAESLEKHKRADMGLLEAKKVTSSYQKEADKCNSGMETCEEAREKAELALAEQKKLTSRWEERARQKGWREGSTKPNVKSKSNVQVA

SEQ ID NO: 20472 - protein, 184 aa, Arabidopsis thaliana
  peptide (1)..(184): Ceres Seq. ID no. 12466415
MARHTAALKIGLALLGLSMAGYILGPPLYWHLTEALAAVSASSCPSCPCECSTYSAVTIPKELSNASFADCAKHDPEVNEDTEKNYAELLTEELKLREAESLEKHKRADMGLLEAKKVTSSYQKEADKCNSGMETCEEAREKAELALAEQKKLTSRWEERARQKGWREGSTKPNVKSKSNVQVA

SEQ ID NO: 20473 - protein, 166 aa, Arabidopsis thaliana
  peptide (1)..(166): Ceres Seq. ID no. 12466416
MAGYILGPPLYWHLTEALAAVSASSCPSCPCECSTYSAVTIPKELSNASFADCAKHDPEVNEDTEKNYAELLTEELKLREAESLEKHKRADMGLLEAKKVTSSYQKEADKCNSGMETCEEAREKAELALAEQKKLTSRWEERARQKGWREGSTKPNVKSKSNVQVA

SEQ ID NO: 20474 - DNA, 935 bp, Arabidopsis thaliana
  misc_feature (1)..(935): Ceres Seq. ID no. 13593310
  misc_feature (828)..(828): n is a, c, t, g, unknown, or other
aatttcattttcaatgttaccaacacgagctcagattttcatacaccaatttttctatatgcatcgttatacacagaagcagtcgcggatctcaatttcaggtgtttgcgattccgatttaggtttgatcggttgaaattttttccgatggtggatcattaccaagttctaggcgttacgagaaacgcgacgaagaaggaggttaaagatgcgtttaggagattggcgattaagtatcatccggataagcacgctcagtctccggagcatgttcgtcataacgccaccgtgcggtttaagcttgtatcggaggcgtacgaagttttgaatgatgatctgaaacgcgcgtcttataacgctggtagcgattctgattgctttcgccgtacgagcggttcgtatagtaatccgtatggaaatcgtggtggcagagcgcaaggttctggttacggttatggttatggttactctacgaggaatcgtcaggcctctagcttcagcagcgggtttgattcgacgtttcgttatttgactacgcgagcgtttctattgaatctcgcattagctggtggtctgtactttgcgtttactgcgattgatacaagcggagaaacactatggaaaatgcgtaactcaggggtgagtatcatattttccatcaatgatcgtgttaagctattggctgtgttgataatttgcattcttgcctttttttatcctgtgatatacatacattggtgtttttaactggggtttttttcctgttgatggatgcattttagtgtatgagttctcaaatttatcaaattgaacttcttgtgaactaanaaaaaaaaaaaaaaaaaaaaaaaaaaaaaaaaaaaaaaaaaaaaaaaaaaaaaaaaaaaaaaaaaaaaaaggtttttcgatcccgccaacctcgagggggggcccgg

SEQ ID NO: 20475 - protein, 248 aa, Arabidopsis thaliana
  peptide (1)..(248): Ceres Seq. ID no. 13593311
NFIFNVTNTSSDFHTPIFLYASLYTEAVADLNFRCLRFRFRFDRLKFFPMVDHYQVLGVTRNATKKEVKDAFRRLAIKYHPDKHAQSPEHVRHNATVRFKLVSEAYEVLNDDLKRASYNAGSDSDCFRRTSGSYSNPYGNRGGRAQGSGYGYGYGYSTRNRQASSFSSGFDSTFRYLTTRAFLLNLALAGGLYFAFTAIDTSGETLWKMRNSGVSIIFSINDRVKLLAVLIICILAFFYPVIYIHWCF

SEQ ID NO: 20476 - protein, 199 aa, Arabidopsis thaliana
  peptide (1)..(199): Ceres Seq. ID no. 13593312
MVDHYQVLGVTRNATKKEVKDAFRRLAIKYHPDKHAQSPEHVRHNATVRFKLVSEAYEVLNDDLKRASYNAGSDSDCFRRTSGSYSNPYGNRGGRAQGSGYGYGYGYSTRNRQASSFSSGFDSTFRYLTTRAFLLNLALAGGLYFAFTAIDTSGETLWKMRNSGVSIIFSINDRVKLLAVLIICILAFFYPVIYIHWCF

SEQ ID NO: 20477 - DNA, 1002 bp, Arabidopsis thaliana
  misc_feature (1)..(1002): Ceres Seq. ID no. 12333459
  misc_feature (1)..(1002): Ortholog of  Ceres SEQ ID NO 15176155 as cited in SEQ ID NO 0
acattttcagctgctcataaaccctaaaaatcctctctttttctcaaccttgattcttagccatggagttctggggaattgaagttaaatcaggaaagccagttacagtgactcctgaagaaggcattcttatccacgtttctcaggcatcgcttggagaatgtaaaaacaagaagggagagtttgtgcctttacatgtaaaggttgggaaccagaacttggttctgggaactctatcgactgagaacatccctcagcttttctgtgatttggtattcgacaaggagtttgagctttctcacacttggggaaaaggaagtgtttactttgttggatacaaaactcccaacattgagccacaaggctattctgaggaagaagaggaagaagaggaagaagaggaagaagttcctgctgggaatgctgccaaggctgtagctaaaccaaaggctaagcctgcagaagtgaagccagctgttgatgatgaagaggatgagtctgattctgacggaatggatgaagatgattctgatggtgaggattctgaggaagaagagcctacacctaagaagcctgcatcaagcaagaagagagctaatgaaactacccctaaagcacctgtgtcagcaaagaaggcgaaagtagcagttactcctcagaaaacagatgagaagaagaaagggggaaaggctgcaaaccagagcccaaagtcggccagtcaagtctcatgtggttcatgcaagaagactttcaactcagggaatgcacttgagtctcacaacaaggccaagcacgctgctgccaagtgaagtggtttcttattagagcttgtgatttctatggaattttgcctgtagtctttatgaaaccttcggattttcttatattttcttttgataacaagagtcttaatgaaagagagccagttggagtcttattaccactatatttcaacattctatcttggctcaaatgtgttaattttagattcacgttttcacc

SEQ ID NO: 20478 - protein, 248 aa, Arabidopsis thaliana
  peptide (1)..(248): Ceres Seq. ID no. 12333460
MEFWGIEVKSGKPVTVTPEEGILIHVSQASLGECKNKKGEFVPLHVKVGNQNLVLGTLSTENIPQLFCDLVFDKEFELSHTWGKGSVYFVGYKTPNIEPQGYSEEEEEEEEEEEEVPAGNAAKAVAKPKAKPAEVKPAVDDEEDESDSDGMDEDDSDGEDSEEEEPTPKKPASSKKRANETTPKAPVSAKKAKVAVTPQKTDEKKKGGKAANQSPKSASQVSCGSCKKTFNSGNALESHNKAKHAAAK

SEQ ID NO: 20479 - DNA, 1173 bp, Arabidopsis thaliana
  misc_feature (1)..(1173): Ceres Seq. ID no. 13592859
aaaacagagcaagcaaaaaccctttaatcattcattcagtcaccaaatctcttgttctgtttttctgtctctctgcttcagtgttcttcgcggcctttaccagtttttcagttctttgacgagcttctttcattggtcctgaactcagggttagagcagcatttgcatatatacaaggtgttttggtgacaattgatagactctaagatgggttctgggaatttgattaaggcaataattagattgaagaagagtaaacaaggaactgaaaagaaaaaactagtgctgtgaaaccaaaaaaaggttccaagaagaagggtacatcactagttactcgtagtgaggattgggctgctactcggattcagactgcttttaaagcctataaggctagaaaaagcttacggcgtctaaaaggaattgcaagagcaaagttatcaactgagaaacaatctgtgaagaaccaagctgtggtcacattgaggtatcttcactcatggagtaaaatacagtcagagataaaggctcgccgagtttgcatggtaaccgaatggcgactgaagaataaaagattagagcatcagcaaaagcttgaggcaaagcttcatgatgttgaggttgaatggaatggtgggtcagagacaaaagatgaaatcttggagaggatacttcaaagggaagaagcgacgattaagcgagaaagagccttggcatatgctttctctcatcagtggaaagctgatggtaagactcagtggttgggaagttatgagctaggaaacactaattggggttggagctggaaagagcgttggatatctgctcggccttgggaagtaagatattcagtgactcctaagaaaccaaagagctcaaagacagactcaaattcaccagcaaagagaacagtgtcattatcatcagttccagccaaaactccgtttcctggagctagaaacacagtgaaaccgcggagattgtcatttccaggtgcttgaagtgaagttaaactttgtttgcatctaaagagtatacacgtacacttgaagatttgagggtatatttatttggtctatgttctgtctctggtgtgatgtaaatacatgtatttgttatgtaggcaacgacctttgtgatttttcgtttgttttaatacatgctactgtttgtctc

SEQ ID NO: 20480 - protein, 152 aa, Arabidopsis thaliana
  peptide (1)..(152): Ceres Seq. ID no. 13592860
MVTEWRLKNKRLEHQQKLEAKLHDVEVEWNGGSETKDEILERILQREEATIKRERALAYAFSHQWKADGKTQWLGSYELGNTNWGWSWKERWISARPWEVRYSVTPKKPKSSKTDSNSPAKRTVSLSSVPAKTPFPGARNTVKPRRLSFPGA

SEQ ID NO: 20481 - DNA, 1205 bp, Arabidopsis thaliana
  misc_feature (1)..(1205): Ceres Seq. ID no. 13592803
agatttcaaattttcatttcttgagtgataatttcagttattgatctgtgcgttcatcaatggaggtttcttctttctccactgtacccagatactgtaactcacgctcctttgttccagaattgtctcgtttcaggggattcaaagttcacttatgggaccaatctcttgttcctcttcatttcagcattcgaaaacgaaagaacacccctcgttatttgatttcttgcagtcagaagaaagatgtcactgttgttgatggaagttgtatggatgagatctatgataagttggcggaacgtcttgtccctacagcagcggcaatgtttagccccaatcttaaacgtttggtcggtttggctggtcctcctggtgccgggaaaagtacagtagcaaatgaagttgtgcgtcgtgtaaataagctatggcctcagaaagctgcttcttttgatgctgaggttaatccaccggatgttgctatagtacttcccatggatggtttccatttgtatcgttcgcaactcgatgctatggaggatcccaaagaagcccatgcgagaagaggggctccgtggacttttgatcctgcactactgcttaactgtttaaagaagctgaaaaacgagggctcagtttatgtgccatcattcgatcatggagttggggatccagttgaagatgatatctttgttagcctccagcataaagtggtaattgtagaaggaaactacatcttgttagaagaagggtcttggaaagacatctcagatatgtttgatgagaaatggttcatcgatgtgaatctcgatacagcaatgcaacgtgttgaaaaccggcatatctcaactggtaaacccccagatgttgctaaatggcgggtggattataatgaccgacccaacgcagagctgataataaagtcaaagacaaacgctgatctactgatcagatctatgaacatttgaatctactttcaagggggctattggacgaaacagaataagatgaataacaaaagacaatgttgcgcttcaagggaagattgcctttggtctacaatgtctttttcttgcaacggaaacttccaataagcaatttgttcgcagtaaactgtgtatgctagtgttctctgcatactcacggattttgttcagacaatgtgttttatacttctaaattagaagttctaatgcataaagtgtttg

SEQ ID NO: 20482 - protein, 301 aa, Arabidopsis thaliana
  peptide (1)..(301): Ceres Seq. ID no. 15221162
MEVSSFSTVPRYCNSRSFVPELSRFRGFKVHLWDQSLVPLHFSIRKRKNTPRYLISCSQKKDVTVVDGSCMDEIYDKLAERLVPTAAAMFSPNLKRLVGLAGPPGAGKSTVANEVVRRVNKLWPQKAASFDAEVNPPDVAIVLPMDGFHLYRSQLDAMEDPKEAHARRGAPWTFDPALLLNCLKKLKNEGSVYVPSFDHGVGDPVEDDIFVSLQHKVVIVEGNYILLEEGSWKDISDMFDEKWFIDVNLDTAMQRVENRHISTGKPPDVAKWRVDYNDRPNAELIIKSKTNADLLIRSMNI

SEQ ID NO: 20483 - protein, 231 aa, Arabidopsis thaliana
  peptide (1)..(231): Ceres Seq. ID no. 15221163
MDEIYDKLAERLVPTAAAMFSPNLKRLVGLAGPPGAGKSTVANEVVRRVNKLWPQKAASFDAEVNPPDVAIVLPMDGFHLYRSQLDAMEDPKEAHARRGAPWTFDPALLLNCLKKLKNEGSVYVPSFDHGVGDPVEDDIFVSLQHKVVIVEGNYILLEEGSWKDISDMFDEKWFIDVNLDTAMQRVENRHISTGKPPDVAKWRVDYNDRPNAELIIKSKTNADLLIRSMNI

SEQ ID NO: 20484 - protein, 213 aa, Arabidopsis thaliana
  peptide (1)..(213): Ceres Seq. ID no. 15221164
MFSPNLKRLVGLAGPPGAGKSTVANEVVRRVNKLWPQKAASFDAEVNPPDVAIVLPMDGFHLYRSQLDAMEDPKEAHARRGAPWTFDPALLLNCLKKLKNEGSVYVPSFDHGVGDPVEDDIFVSLQHKVVIVEGNYILLEEGSWKDISDMFDEKWFIDVNLDTAMQRVENRHISTGKPPDVAKWRVDYNDRPNAELIIKSKTNADLLIRSMNI

SEQ ID NO: 20485 - DNA, 1058 bp, Arabidopsis thaliana
  misc_feature (1)..(1058): Ceres Seq. ID no. 13646157
agaacatcctaatcgaaaaaaaatcttttcatattctcggttagtagaaactaggaaaagagatgaatagaggagtgttggagagttcgccggttcaacatctcacggcggctggaaaccctaattggtggaataatgtcagccgcggcttgaggccaccaacgccgttgatgagtcacgagccgccgtctaccaccgcttttattccaagtctcttgccaaacttcttctcttctccgacttcctcttcatcttcttcaccttctttccctactcctaatagtaaccctaacttctcttcttggcttgaaatgagtgatctgcctcttgatcagccatggagccttagtcaactcctcttgggtggattgatgatgggagaggaagagaaaatggagatgatgaaccatcatcatcatcaaaatcaacaccaaagttaccaagcgaagaggatacaaaattgggaagaacaagttttgaggcaccaagcttccatgaaacaagagagtagcaataataatagttatggaataatgtcctcaccaaactcacctccaaacaaatcttgtgctacaattatcaacaccaatgaagacaacaacaataacattcacagtggtcttaacttgtccgagtgtaatagctcagagatgattgggtcttcttttgctaataagaaaccaaaacttcaagttccttcatcacaatcaactctcaaggtgagaaaggagaaacttggaggcagaatagcatctcttcaccagctagtatctccctttggcaagactgacacagcctctgtcttgtcggaggctattggatacattagattcctccacagtcaaattgaggctttaagtctaccatactttggtactccctcgaggaacaatatgatgcaccaacatgcacaaagaaatatgaatggtatatttcctgaggaccctggtcaggtacgcacatatatttttttactttctagttttatatactttactttttattggatcaattaaacccaaatctcaatttaaaaaaaataaatacttgccagcttt

SEQ ID NO: 20486 - protein, 317 aa, Arabidopsis thaliana
  peptide (1)..(317): Ceres Seq. ID no. 15219040
MNRGVLESSPVQHLTAAGNPNWWNNVSRGLRPPTPLMSHEPPSTTAFIPSLLPNFFSSPTSSSSSSPSFPTPNSNPNFSSWLEMSDLPLDQPWSLSQLLLGGLMMGEEEKMEMMNHHHHQNQHQSYQAKRIQNWEEQVLRHQASMKQESSNNNSYGIMSSPNSPPNKSCATIINTNEDNNNNIHSGLNLSECNSSEMIGSSFANKKPKLQVPSSQSTLKVRKEKLGGRIASLHQLVSPFGKTDTASVLSEAIGYIRFLHSQIEALSLPYFGTPSRNNMMHQHAQRNMNGIFPEDPGQVRTYIFLLSSFIYFTFYWIN

SEQ ID NO: 20487 - protein, 281 aa, Arabidopsis thaliana
  peptide (1)..(281): Ceres Seq. ID no. 15219041
MSHEPPSTTAFIPSLLPNFFSSPTSSSSSSPSFPTPNSNPNFSSWLEMSDLPLDQPWSLSQLLLGGLMMGEEEKMEMMNHHHHQNQHQSYQAKRIQNWEEQVLRHQASMKQESSNNNSYGIMSSPNSPPNKSCATIINTNEDNNNNIHSGLNLSECNSSEMIGSSFANKKPKLQVPSSQSTLKVRKEKLGGRIASLHQLVSPFGKTDTASVLSEAIGYIRFLHSQIEALSLPYFGTPSRNNMMHQHAQRNMNGIFPEDPGQVRTYIFLLSSFIYFTFYWIN

SEQ ID NO: 20488 - protein, 234 aa, Arabidopsis thaliana
  peptide (1)..(234): Ceres Seq. ID no. 15219042
MSDLPLDQPWSLSQLLLGGLMMGEEEKMEMMNHHHHQNQHQSYQAKRIQNWEEQVLRHQASMKQESSNNNSYGIMSSPNSPPNKSCATIINTNEDNNNNIHSGLNLSECNSSEMIGSSFANKKPKLQVPSSQSTLKVRKEKLGGRIASLHQLVSPFGKTDTASVLSEAIGYIRFLHSQIEALSLPYFGTPSRNNMMHQHAQRNMNGIFPEDPGQVRTYIFLLSSFIYFTFYWIN

SEQ ID NO: 20489 - DNA, 1221 bp, Arabidopsis thaliana
  misc_feature (1)..(1221): Ceres Seq. ID no. 12562215
  misc_feature (1)..(1221): Ortholog of  Ceres SEQ ID NO 13595548 as cited in SEQ ID NO 51024
  misc_feature (1)..(1221): Ortholog of  Ceres SEQ ID NO 13582350 as cited in SEQ ID NO 56734
  misc_feature (1)..(1221): Ortholog of  Ceres SEQ ID NO 12476493 as cited in SEQ ID NO 58163
  misc_feature (1)..(1221): Ortholog of  Ceres SEQ ID NO 13597295 as cited in SEQ ID NO 63743
  misc_feature (1)..(1221): Ortholog of  Ceres SEQ ID NO 12617090 as cited in SEQ ID NO 64005
  misc_feature (1)..(1221): Ortholog of  Ceres SEQ ID NO 13597439 as cited in SEQ ID NO 64081
  misc_feature (1)..(1221): Ortholog of  Ceres SEQ ID NO 13597233 as cited in SEQ ID NO 64370
  misc_feature (1)..(1221): Ortholog of  Ceres SEQ ID NO 13623850 as cited in SEQ ID NO 0
  misc_feature (1)..(1221): Ortholog of  Ceres SEQ ID NO 14309162 as cited in SEQ ID NO 0
acatcaaagcaattaacaaatacacaacttgtaacttcaaatagattactttcaaagaagagagagagaaagaaagatggagaagaacatgaagtttccagtagtagacttgtccaaagctccaaattggggggaagagagagaccaaaccatggctctaatcaatgaagcttgtgagaattggggcttctttgagatagtgaaccatggattaccacatgacttaatggacaagatcgagaagatgacaaaggaccattacaagacatgccaagaacaaaagttcaatgacatgctcaagtccaaaggtttggataatcttgagacagaagtcgaagatgtcgattgggaaagcactttctacgttcgtcacctccctcaatccaatctcaatgacatttcagatgtgtctgatgaatacaggacggccatgaaagactttggtaagagactggagaatcttgctgaggatttgttggatctactgtgtgagaatctagggttagagaaagggggtatttgagaaagtgtttcatggaacaaaaggcccaacctttgggacaaaggtgagcaattatccaccatgtcctaaaccagagatgatcaaaggtcttagggcccacactgatgcaggaggcatcatcttgttgtttcaagacgacaaggtcagtggtctccagcttcttaaagatggtgactggattgatgttcctcctctcaaccactctattgtcatcaatcttggtgaccaacttgaggtgataaccaacgggaagtataagagtgtgctgcaccgtgtggtgactcaacaagaaggaaacaggatgtcggttgcatcgttttacaacccgggaagcgatgcggagatctcaccagctacttcgcttgtcgagaaagattccgagtacccgagtttcgtctttgatgactacatgaagctttatgcaggggtcaagtttcagcccaaggagccacggttcgcagcaatgaagaatgcttctgcagttacagaactgagtcctacagcagccgtagagactttctaaaaatggatttgagattcaagtgaagcagagaaagaaagatgattttgtgtgttatgtcaataagttaaaacttgtattagtgttgattaattgttggtcaattggtgtgttttaaagtgtggggtgtttatgtttatggaagatgataataattataaaaatctaaattctaagc

SEQ ID NO: 20490 - protein, 148 aa, Arabidopsis thaliana
  peptide (1)..(148): Ceres Seq. ID no. 12562216
MIKGLRAHTDAGGIILLFQDDKVSGLQLLKDGDWIDVPPLNHSIVINLGDQLEVITNGKYKSVLHRVVTQQEGNRMSVASFYNPGSDAEISPATSLVEKDSEYPSFVFDDYMKLYAGVKFQPKEPRFAAMKNASAVTELSPTAAVETF

SEQ ID NO: 20491 - protein, 148 aa, Arabidopsis thaliana
  peptide (1)..(148): Ceres Seq. ID no. 12562217
MEKNMKFPVVDLSKAPNWGEERDQTMALINEACENWGFFEIVNHGLPHDLMDKIEKMTKDHYKTCQEQKFNDMLKSKGLDNLETEVEDVDWESTFYVRHLPQSNLNDISDVSDEYRTAMKDFGKRLENLAEDLLDLLCENLGLEKGGI

SEQ ID NO: 20492 - protein, 144 aa, Arabidopsis thaliana
  peptide (1)..(144): Ceres Seq. ID no. 12562218
MKFPVVDLSKAPNWGEERDQTMALINEACENWGFFEIVNHGLPHDLMDKIEKMTKDHYKTCQEQKFNDMLKSKGLDNLETEVEDVDWESTFYVRHLPQSNLNDISDVSDEYRTAMKDFGKRLENLAEDLLDLLCENLGLEKGGI

SEQ ID NO: 20493 - DNA, 569 bp, Arabidopsis thaliana
  misc_feature (1)..(569): Ceres Seq. ID no. 12337669
gttgggtttcttctccctttctacatcctctctcttctcttcctctatactttcatctaatggccggcctgagatggagagagtggtggaacacgatggccttccccacccggcgtatctggaatcgtttcaccgttcgcgtcgggtttcgacacagcggacttttgagattacaacatgacgtgagttcttgcgagtatgaagacatacacataatgtggaatttgttacacaagaacgaagatcttacacgcgtaccaatccaacaacaacaacaacaacaacagaggaagaaaccttgttggaatcttcttggttcgtatctttgccaaagattctgatccgttttatgatataaaccaaaccattgttgtatttgagagagccttgacgggtcccttgcagtgtggtgtggttttattgacaaatttcgcaaataatgaatccgaggttgcagagttttaattagctgttatatattccattgcatacctctatgtacttatcatcacatgagtgttgtatatatattacaaaatgcttcacatagtttgatactacctatgttc

SEQ ID NO: 20494 - protein, 112 aa, Arabidopsis thaliana
  peptide (1)..(112): Ceres Seq. ID no. 12337670
WVSSPFLHPLSSLPLYFHLMAGLRWREWWNTMAFPTRRIWNRFTVRVGFRHSGLLRLQHDVSSCEYEDIHIMWNLLHKNEDLTRVPIQQQQQQQQRKKPCWNLLGSYLCQRF

SEQ ID NO: 20495 - protein, 93 aa, Arabidopsis thaliana
  peptide (1)..(93): Ceres Seq. ID no. 12337671
MAGLRWREWWNTMAFPTRRIWNRFTVRVGFRHSGLLRLQHDVSSCEYEDIHIMWNLLHKNEDLTRVPIQQQQQQQQRKKPCWNLLGSYLCQRF

SEQ ID NO: 20496 - protein, 81 aa, Arabidopsis thaliana
  peptide (1)..(81): Ceres Seq. ID no. 12337672
MAFPTRRIWNRFTVRVGFRHSGLLRLQHDVSSCEYEDIHIMWNLLHKNEDLTRVPIQQQQQQQQRKKPCWNLLGSYLCQRF

SEQ ID NO: 20497 - DNA, 1768 bp, Arabidopsis thaliana
  misc_feature (1)..(1768): Ceres Seq. ID no. 12327642
acaaaatagaattgatctctcttcttcattctctctcttctcgatctacccaaagtagcgggagcgaatagtaaaacaatgaccgatcaccaccaccaccaccataaccaccacgcgcggctgagccgcctccgtacaacaacacagctcctccgtcaaacaacatcttctttctcttcccaccctctcactttcatcttcctcactttcctcctcttctctttccattctctcgtcgatcattgctctctcctcttaacatctttcgtcgacagtgacccttctcttcgctctctcctctctcgactccctcttaactctcgctcccataccccgacgcgcttcaatcatcaccgacgtgctccgtttcttcagctcacgcgccttggtaccctcgacgacgacttcttctccacagacgaacacgatcctcatcgccgatcgcttcaaggctcttcctttcgttcacccatcaacgccaccactgtattcctctccggatttgagagcatttctggcttctctcgtcctatcatcgataacggacttctccttcctcagatcattcgctccggtatcgttttgcggcagcttgagaaggaagaccatggcggcgatgaagacgagacggaattggatgaatctgagctcgatcgtgaaagtgagaagaaagataaagactttgagagttttgtggatctgaagatgatttttaaaggattggagctaggacgtagtgacgcagcggctctgttcttcttggtgagctttttatcagctgcgtatggatgggtgattctagggtttacaactgtttactcattggtgttggcgattatgtttgttactgtaatcaacgatttgcttggtaggtttccttcgtttcttggggttttttggagaggttcaagattggggtttaagagagttacaggatttgttttaatgagatgggcagtgagagatgctttgacacagcttcttggtttatggtacttcggagaggttgaagatcagtactcgtttttcaggctctttgtgaggttaaagctgatgcctttcactgttatgccgccatggattagaggttttgagaaggagatatctggtttcttgttcgcttggtttctacttgatacacttgttggtttgatattagctgttgatgcgtttgttgctattgtggattcgagaaggagaggaagggagatagtgaaggaaggtttatatttgatatctcttttgttgcatcaggctgtgcagctgaagtgtcttgaagcgattctttgtgggtctttcttcagatgggttttgattcgaatggtagggaaaagctttgcttctgtgatccaatctgcgttggaagtttacttcatggcggcttggttagtgttctacttagcagctaagtgtaaagatgcacacgcagatggtaggaggtttgggagaagagaaatggagagcttgatcgatgggctgagatgataatgaattgtggatctgtaggatgagctttttgtttccaaaggagcaaaccttggcttcgatgcttaatgccagtggcgacatctctgtgctactagttgtcatgacttaggttcctttggttttagaattacagttgattgataagaattgctagcaattcgatgtatgtacgcacctaggattacttgggagctgtgaaagagggagaatgatacaactactgtgtataatcatttgcaagattttcctttgtatatatcttgctgcagtttttgatatc

SEQ ID NO: 20498 - protein, 468 aa, Arabidopsis thaliana
  peptide (1)..(468): Ceres Seq. ID no. 12327643
MTDHHHHHHNHHARLSRLRTTTQLLRQTTSSFSSHPLTFIFLTFLLFSFHSLVDHCSLLLTSFVDSDPSLRSLLSRLPLNSRSHTPTRFNHHRRAPFLQLTRLGTLDDDFFSTDEHDPHRRSLQGSSFRSPINATTVFLSGFESISGFSRPIIDNGLLLPQIIRSGIVLRQLEKEDHGGDEDETELDESELDRESEKKDKDFESFVDLKMIFKGLELGRSDAAALFFLVSFLSAAYGWVILGFTTVYSLVLAIMFVTVINDLLGRFPSFLGVFWRGSRLGFKRVTGFVLMRWAVRDALTQLLGLWYFGEVEDQYSFFRLFVRLKLMPFTVMPPWIRGFEKEISGFLFAWFLLDTLVGLILAVDAFVAIVDSRRRGREIVKEGLYLISLLLHQAVQLKCLEAILCGSFFRWVLIRMVGKSFASVIQSALEVYFMAAWLVFYLAAKCKDAHADGRRFGRREMESLIDGLR

SEQ ID NO: 20499 - protein, 259 aa, Arabidopsis thaliana
  peptide (1)..(259): Ceres Seq. ID no. 12327644
MIFKGLELGRSDAAALFFLVSFLSAAYGWVILGFTTVYSLVLAIMFVTVINDLLGRFPSFLGVFWRGSRLGFKRVTGFVLMRWAVRDALTQLLGLWYFGEVEDQYSFFRLFVRLKLMPFTVMPPWIRGFEKEISGFLFAWFLLDTLVGLILAVDAFVAIVDSRRRGREIVKEGLYLISLLLHQAVQLKCLEAILCGSFFRWVLIRMVGKSFASVIQSALEVYFMAAWLVFYLAAKCKDAHADGRRFGRREMESLIDGLR

SEQ ID NO: 20500 - DNA, 964 bp, Arabidopsis thaliana
  misc_feature (1)..(964): Ceres Seq. ID no. 13491587
  misc_feature (1)..(964): Ortholog of  Ceres SEQ ID NO 15169711 as cited in SEQ ID NO 54274
tccaaacttcgtctcccccaattgaacgagcaaaagttgcagagcacacacacacactttcaagtttcaatacagagatggcgaggcactgagccagagcgtgagaaccgtgaagatgaaaccgaagtcaacgaagatgaagataccggagctcaggtagctccgatcgttaggcttgaagaggttgcagtcaccaccggcgaagaagatgaagacgccgtcctcgatctgaaatcgaagatgtatcgatttgataaagaagggaaccaatggaagagaggagctggaactgtgaaattattgaagcataaggaaactggaaaagttcgtcttgttatgagacaatctaaaaccctaaagatctgtgccaatcacctcatttcgtctgggatgagtgttcaggaacatagtgggaatgaaaagtcttgtttatggcacgctactgatttctccgacggcgagttgaaagatgagcttttctgcattcgatttgcttccattgagaattgcaaaacatttatggagaagttcactgaaatagctgaaagccagcaagtagggaaagagagcacagagggcgatgaggcagctggtttaatagagaatctatcggttgaagaaaagaaaagtgtggagcaagccaaggaagcagaagagaaagagcctgcaaaggaagataaagaaacaaaaaaggagaaggtagaagaagagaagaaaacagagacaagcacttaaatgatcaaattaaaattggtttttggtaacacaaagtgtgctttgctttgttttaatatattatacttggcactgaacatgatggtagcttcaaaagtttgagtcttgcgctgtgttagagaaagttgaatcttaagtttttttatgttcttgtaagtgtttgactattgtgtggtctatttactgtgtcgttttggtttaagataatagtatttggcctcaaattagt

SEQ ID NO: 20501 - protein, 244 aa, Arabidopsis thaliana
  peptide (1)..(244): Ceres Seq. ID no. 13491588
SKLRLPQLNEQKLQSTHTHFQVSIQRWRGTEPERENREDETEVNEDEDTGAQVAPIVRLEEVAVTTGEEDEDAVLDLKSKMYRFDKEGNQWKRGAGTVKLLKHKETGKVRLVMRQSKTLKICANHLISSGMSVQEHSGNEKSCLWHATDFSDGELKDELFCIRFASIENCKTFMEKFTEIAESQQVGKESTEGDEAAGLIENLSVEEKKSVEQAKEAEEKEPAKEDKETKKEKVEEEKKTETST

SEQ ID NO: 20502 - protein, 164 aa, Arabidopsis thaliana
  peptide (1)..(164): Ceres Seq. ID no. 13491589
MYRFDKEGNQWKRGAGTVKLLKHKETGKVRLVMRQSKTLKICANHLISSGMSVQEHSGNEKSCLWHATDFSDGELKDELFCIRFASIENCKTFMEKFTEIAESQQVGKESTEGDEAAGLIENLSVEEKKSVEQAKEAEEKEPAKEDKETKKEKVEEEKKTETST

SEQ ID NO: 20503 - protein, 132 aa, Arabidopsis thaliana
  peptide (1)..(132): Ceres Seq. ID no. 13491590
MRQSKTLKICANHLISSGMSVQEHSGNEKSCLWHATDFSDGELKDELFCIRFASIENCKTFMEKFTEIAESQQVGKESTEGDEAAGLIENLSVEEKKSVEQAKEAEEKEPAKEDKETKKEKVEEEKKTETST

SEQ ID NO: 20504 - DNA, 1616 bp, Arabidopsis thaliana
  misc_feature (1)..(1616): Ceres Seq. ID no. 14307863
aaaaaagaagatctcactctcaccgccttcatttcctcgatctccgtcttcctccttctccgtctgtcgcagagcatcgctcgaattagggtttctgctgagagaagatgagggaaattattagcattcatatcggacaagccgggatccaagtcggaaattcctgctgggagctttactgtctcgaacatggaatccagcccgacggaatgatgccgagtgatactacagttggtgttgcacacgatgcgttcaatactttctttagcgagactggagctgggaagcatgttcctagggctgtcttcgttgatctcgagcctaccgttatcgacgaagttcgtactggtacttaccgtcaacttttccatccagagcagctcatttctgggaaagaagatgctgctaacaacttcgctagaggacattacactgttggaaaggaaattgtggatctatgtcttgaccgtgtgaggaagcttgccgacaactgtactggcttacaagggtttttggtgttcaatgctgttggtggtggaactggttctggattgggttctctgttgctagagcgtttgtctgtagattacggaaaaaagtctaagcttggttttaccatatacccttctcctcaggtttctactgctgttgtagaaccttacaacagtgttctctcaacgcattcccttcttgaacatacggatgtagctgtcctcttggataacgaagccatctatgacatttgccgcagatccctagatatcgagaggccaacctacacaaacttgaacaggttgatatcacagatcatttcatccttgacaacatctttgaggtttgatggtgccatcaacgtggatatcactgagttccagaccaatcttgtcccatatccccgtatccatttcatgctgtcatcttatgcaccagtcatctcagccgccaaggcttaccacgagcagctatcagtccctgagatcaccaatgccgtgtttgagccagcgagcatgatggcaaagtgtgacccaaggcacggaaagtacatggcatgttgtttgatgtaccgaggagatgttgttcccaaagatgttaatgctgccgttggcaccatcaagacaaagaggactgttcagtttgttgactggtgcccaactgggttcaaatgtggaatcaactaccaacctccaacagttgttccaggtggtgacctcgctaaggttcagagagctgtatgcatgatcagtaacaacacagcagttgcagaggtgttctcacggatcgaccacaagtttgatctcatgtatgcgaagagggcattcgtgcactggtacgttggtgaaggaatggaggaaggtgaattcgatgacaagaccaacgtcaaggccgcctggggtaaggtcggcgcgcacgctggcgagtatggtgcggaggccctggagaggatgttcctgtccttccccaccaccaagacctacttcccgcacttcgacctgagccacggctctgcccaggttaagggccacggcaagaaggtggccgacgcgctgaccaacgccgtggcgcacgtggacgacatgcccaacgcgctgtccgccctgagcgacctgcacgcgcac

SEQ ID NO: 20505 - protein, 503 aa, Arabidopsis thaliana
  peptide (1)..(503): Ceres Seq. ID no. 14307864
MREIISIHIGQAGIQVGNSCWELYCLEHGIQPDGMMPSDTTVGVAHDAFNTFFSETGAGKHVPRAVFVDLEPTVIDEVRTGTYRQLFHPEQLISGKEDAANNFARGHYTVGKEIVDLCLDRVRKLADNCTGLQGFLVFNAVGGGTGSGLGSLLLERLSVDYGKKSKLGFTIYPSPQVSTAVVEPYNSVLSTHSLLEHTDVAVLLDNEAIYDICRRSLDIERPTYTNLNRLISQIISSLTTSLRFDGAINVDITEFQTNLVPYPRIHFMLSSYAPVISAAKAYHEQLSVPEITNAVFEPASMMAKCDPRHGKYMACCLMYRGDVVPKDVNAAVGTIKTKRTVQFVDWCPTGFKCGINYQPPTVVPGGDLAKVQRAVCMISNNTAVAEVFSRIDHKFDLMYAKRAFVHWYVGEGMEEGEFDDKTNVKAAWGKVGAHAGEYGAEALERMFLSFPTTKTYFPHFDLSHGSAQVKGHGKKVADALTNAVAHVDDMPNALSALSDLHAH

SEQ ID NO: 20506 - protein, 469 aa, Arabidopsis thaliana
  peptide (1)..(469): Ceres Seq. ID no. 14307865
MMPSDTTVGVAHDAFNTFFSETGAGKHVPRAVFVDLEPTVIDEVRTGTYRQLFHPEQLISGKEDAANNFARGHYTVGKEIVDLCLDRVRKLADNCTGLQGFLVFNAVGGGTGSGLGSLLLERLSVDYGKKSKLGFTIYPSPQVSTAVVEPYNSVLSTHSLLEHTDVAVLLDNEAIYDICRRSLDIERPTYTNLNRLISQIISSLTTSLRFDGAINVDITEFQTNLVPYPRIHFMLSSYAPVISAAKAYHEQLSVPEITNAVFEPASMMAKCDPRHGKYMACCLMYRGDVVPKDVNAAVGTIKTKRTVQFVDWCPTGFKCGINYQPPTVVPGGDLAKVQRAVCMISNNTAVAEVFSRIDHKFDLMYAKRAFVHWYVGEGMEEGEFDDKTNVKAAWGKVGAHAGEYGAEALERMFLSFPTTKTYFPHFDLSHGSAQVKGHGKKVADALTNAVAHVDDMPNALSALSDLHAH

SEQ ID NO: 20507 - protein, 468 aa, Arabidopsis thaliana
  peptide (1)..(468): Ceres Seq. ID no. 14307866
MPSDTTVGVAHDAFNTFFSETGAGKHVPRAVFVDLEPTVIDEVRTGTYRQLFHPEQLISGKEDAANNFARGHYTVGKEIVDLCLDRVRKLADNCTGLQGFLVFNAVGGGTGSGLGSLLLERLSVDYGKKSKLGFTIYPSPQVSTAVVEPYNSVLSTHSLLEHTDVAVLLDNEAIYDICRRSLDIERPTYTNLNRLISQIISSLTTSLRFDGAINVDITEFQTNLVPYPRIHFMLSSYAPVISAAKAYHEQLSVPEITNAVFEPASMMAKCDPRHGKYMACCLMYRGDVVPKDVNAAVGTIKTKRTVQFVDWCPTGFKCGINYQPPTVVPGGDLAKVQRAVCMISNNTAVAEVFSRIDHKFDLMYAKRAFVHWYVGEGMEEGEFDDKTNVKAAWGKVGAHAGEYGAEALERMFLSFPTTKTYFPHFDLSHGSAQVKGHGKKVADALTNAVAHVDDMPNALSALSDLHAH

SEQ ID NO: 20508 - DNA, 1305 bp, Arabidopsis thaliana
  misc_feature (1)..(1305): Ceres Seq. ID no. 14307843
  misc_feature (1)..(1305): Ortholog of  Ceres SEQ ID NO 13638331 as cited in SEQ ID NO 58047
aaaaattgaaaattgaaaataaaaccttccaaagtagcatcctttatcgctgcaatggcgatgagagagctctcgcagcttaacagagacagcgacggtgatgaagaagtatgggtcaaacactattcatccaaccatcagatacttctcgtcggcgaaggagatttctcattctctcacagcttagccactctcttcggctctgcttccaatatctgcgcttcctctctcgattcatacgatgttgtggttagaaagtacaagaaggcaagatcaaaccttaaaactttgaagagacttggagctttacttttacatggagttgatgctaccacactgcattttcaccctgaccttcgttatagaagatttgatcgcgtcatcttcaacttccctcacgccggtttccacggcagagagtctgattcctctcttatacggaagcatagagaactggtgtttggatttttcaatggtgcaagccgtttactaagagctaatggggaagttcatgtctctcacaagaacaaagcacctttttctgagtggaatctcgaggagctcgctagcagatgctttcttgtgttgattcaacgtgtggccttcgagaagaacaattaccctggttatgagaataagagaggagatgggcgtagatgtgaccaacctttccttttgggagagtgcagtactttcaagttcagattctctcgtgtcgctaaggaactttatgcagagaaagtgagatcgagagaatctgaacagacttcactctctgctttgttctatgcccatctctcaaaagaagcgggaattcctgatggtgtgctcaacattgtaactggttttggatcaactgctggagctgccattgcctcccatatggacgtagacaaagttagtttcactgggtcaacagatgttggaaggaagataatgcaagccgcagccgcaagtaatctcaaaaaagtttcccttgaattaggcgggaaatcgccacttctcatattcaacgacgctgatattgacaaagccgccgatcttgcgcttctcggttgcttttacaacaagggtgaaatttgcgtggcgagctctcgtgtgtttgttcaagaaggtatatacgataaggttgtggagaagttagtagagaaggctaaagattggaccgttggtgatccttttgattccactgctcgacaaggaccttatcgtatataatatatatctaccccatatgtaatttgtaatgtgcctttgactgtgatgagttatctctccctctctaccaactttcttcatatatat

SEQ ID NO: 20509 - protein, 387 aa, Arabidopsis thaliana
  peptide (1)..(387): Ceres Seq. ID no. 14307844
MAMRELSQLNRDSDGDEEVWVKHYSSNHQILLVGEGDFSFSHSLATLFGSASNICASSLDSYDVVVRKYKKARSNLKTLKRLGALLLHGVDATTLHFHPDLRYRRFDRVIFNFPHAGFHGRESDSSLIRKHRELVFGFFNGASRLLRANGEVHVSHKNKAPFSEWNLEELASRCFLVLIQRVAFEKNNYPGYENKRGDGRRCDQPFLLGECSTFKFRFSRVAKELYAEKVRSRESEQTSLSALFYAHLSKEAGIPDGVLNIVTGFGSTAGAAIASHMDVDKVSFTGSTDVGRKIMQAAAASNLKKVSLELGGKSPLLIFNDADIDKAADLALLGCFYNKGEICVASSRVFVQEGIYDKVVEKLVEKAKDWTVGDPFDSTARQGPYRI

SEQ ID NO: 20510 - protein, 385 aa, Arabidopsis thaliana
  peptide (1)..(385): Ceres Seq. ID no. 14307845
MRELSQLNRDSDGDEEVWVKHYSSNHQILLVGEGDFSFSHSLATLFGSASNICASSLDSYDVVVRKYKKARSNLKTLKRLGALLLHGVDATTLHFHPDLRYRRFDRVIFNFPHAGFHGRESDSSLIRKHRELVFGFFNGASRLLRANGEVHVSHKNKAPFSEWNLEELASRCFLVLIQRVAFEKNNYPGYENKRGDGRRCDQPFLLGECSTFKFRFSRVAKELYAEKVRSRESEQTSLSALFYAHLSKEAGIPDGVLNIVTGFGSTAGAAIASHMDVDKVSFTGSTDVGRKIMQAAAASNLKKVSLELGGKSPLLIFNDADIDKAADLALLGCFYNKGEICVASSRVFVQEGIYDKVVEKLVEKAKDWTVGDPFDSTARQGPYRI

SEQ ID NO: 20511 - DNA, 3885 bp, Arabidopsis thaliana
  misc_feature (1)..(3885): Ceres Seq. ID no. 12388487
aaaccatcctctcctttctctctctagatttttatcccctttccctctctctctctctctctcctagggttttcgtctctctcgttcactgttaatagtcttaacggagaggtttgattagcctccgggaagattctactgcgaactttggacacatctctctctgccatggcggctgagaagttaagggacttgagccagccgattgacgtcggtgtgctcgatgccactgttgcggccttctttgttaccggatctaaagaagagagagctgctgcggaccagattttgcgggatttgcaggctaatccagatatgtggcttcaagttgtccacattctacaaaatacaaacagcttggataccaagttctttgctctgcaggttctagaaggtgttataaagtatagatggaatgcactgcctgttgaacaacgagatggaatgaaaaattacatctcagaggttattgtacagctctcgagtaatgaagcatctttcagatcagaaaggctctatgtcaacaagctaaatgtcattttggtccagatcgtgaaacatgattggccggcaaagtggacaagcttcattcctgatctagttgcagctgctaaaactagcgaaactatctgcgaaaattgcatggccattttgaaactcctaagtgaagaggtttttgatttctcaagaggagaaatgactcagcagaagattaaagagctgaaacaatctctaaacagtgagtttaaactcattcatgagttatgcctatatgtcctctcagcttctcaaagacaggatcttatacgtgcaacactgtctgcattgcatgcctatctttcctggattccattgggttacatttttgagtctactttgcttgagaccctccttaaattttttcctgtgccagcatataggaacctcactattcaatgtctgaccgaggtcgcagctcttaatttcggggacttctacaatgttcaatatgtcaaaatgtataccatatttatagggcagctgcggataattctcccaccgagtacaaagatccctgaggcatattccagtggaagtggtgaagaacaagcatttatccagaacctggcactatttttcacttcctttttcaagtttcatattcgagtcctagaatcaacgccagaagttgtctctttgttactcgctggtctagaatatctcattaatatatcttatgttgacgacactgaagtatttaaggtttgtttggactattggaactcgttggtgttggagctatttgatgcgcatcataattctgataaccctgcagtaagtgcaagcctgatgggtttgcagcctttccttcctggtatggttgatggccttggttctcaagtcatgcagcggcgtcaactttattctcacccaatgtccaaattaagagggttaatgattaaccgcatggcgaagcctgaagaagtgcttattgttgaagatgaaaatgggaacatcgttcgtgaaaccatgaaggacaatgatgttcttgtccaatataagataatgcgggagacattaatctacctctcacaccttgaccatgatgataccgagaagcagatgttgaggaagctaaacaaacaattaagtggggaggaatgggcatggaacaatttgaacactttgtgctgggctattgggtctatttccggatctatggcagaagatcaggaaaacaggtttttggtgatggtcattcgtgatttgttgaatttatgtgaaattaccaagggaaaagacaataaagccgttattgcaagcaacatcatgtatgtcgttggccagtatccaagattcttaagggcccattggaagtttttgaagacagttgtgaacaagttgtttgaattcatgcatgaaacacatcctggtgttcaggacatggcctgtgatacattcttgaaaatagttcaaaagtgcaagcgaaaattcgttattgtacaggttggagagaatgaaccatttgtatctgaacttctaacaggccttgcaacaactgttcaagatcttgagcctcatcaaatacactcattttatgaatcagttggtaatatgatccaagcagaatcagatcctcagaagagagatgaatatctccagaggttgatggcactccccaaccagaaatgggcagaaatcataggacaggcacgccacagtgtagaattcctcaaggatcaagttgtgatacgtacagtgctaaacatcctacagactaatactagtgctgctacttcactgggaacatacttcttatcccaaatttccttgattttcttggatatgttgaatgtatacagaatgtacagtgagcttgtgtcaaccaacattactgagggaggaccatatgcttccaagacatcttttgtaaaactcttaagatcggttaagagggaaacacttaagctgatagaaacctttttagacaaagctgaagaccagccacacatagggaaacaatttgtgccgccaatgatggaatcagtacttggtgactatgcgaggaatgtgcctgatgctagggaatccgaagttctttcactctttgcaacgattataaacaagtacaaggcaacaatgttagacgacgtgcctcacatatttgaagctgtattccagtgtacattggagatgataactaagaactttgaagattatccagaacaccgcctcaagtttttctcattactccgtgctattgctacgttttgtttccctgccttgataaagttatcaagtccgcaactgaagctagtgatggattcaattatctgggcatttagacatactgagagaaatattgctgaaaccgggcttaatcttttgcttgagatgctgaaaaactttcagcaatctgaattttgtaatcaattctaccggtcatactttatgcaaatcgagcaagaaatatttgccgttttgaccgataccttccataagcctggcttcaagctacatgtgttggtgctgcagcaactgttttgcctgcctgagagcggtgctttgacagaacccttgtgggatgctacaaccgttccttacccgtatccggacaacgttgcatttgttcgcgaatacaccattaagctactgagctcttcattcccaaacatgactgcagcagaggtcacacaatttgtgaatggactatacgagtctagaaatgacccgtctggatttaagaataacattcgtgacttccttgtacagtctaaggagttttccgctcaggataacaaagatctctatgctgaggaagcagctgcacagagagagagagaacgtcaaagaatgctttcaattcctgggcttattgctcctaatgagattcaagacgagatggtggactcataaaattaagaagggtgcaacaagaagaagcttcctgtgttcaatgggctggattttttgtaatcataggtttttgaaaacaggaaagagttcaaggagagattaatttccccgaccgtatctctactaccgtattccgaagcttctcaattcgattttgaggattggaaaagctaagaaaacagagatctttttggggataaattagtgtcttgtttggttaattaattgggtttaatgtagatttaaacattagggaccttctctagttatctcatatggttggctcctttttgctttgacctttttttgggggtttgtttctattactcagtgattcgtgttttaggtgcaagatatttttttagactctatctttgtcaccccctagggggtttaaaattgtaagattgacttgtggtgatgtttctcattaaaatcgtccactttaaagtgtgctttgacaattttatcaaacaaaactttgaattt

SEQ ID NO: 20512 - protein, 1075 aa, Arabidopsis thaliana
  peptide (1)..(1075): Ceres Seq. ID no. 12388488
MAAEKLRDLSQPIDVGVLDATVAAFFVTGSKEERAAADQILRDLQANPDMWLQVVHILQNTNSLDTKFFALQVLEGVIKYRWNALPVEQRDGMKNYISEVIVQLSSNEASFRSERLYVNKLNVILVQIVKHDWPAKWTSFIPDLVAAAKTSETICENCMAILKLLSEEVFDFSRGEMTQQKIKELKQSLNSEFKLIHELCLYVLSASQRQDLIRATLSALHAYLSWIPLGYIFESTLLETLLKFFPVPAYRNLTIQCLTEVAALNFGDFYNVQYVKMYTIFIGQLRIILPPSTKIPEAYSSGSGEEQAFIQNLALFFTSFFKFHIRVLESTPEVVSLLLAGLEYLINISYVDDTEVFKVCLDYWNSLVLELFDAHHNSDNPAVSASLMGLQPFLPGMVDGLGSQVMQRRQLYSHPMSKLRGLMINRMAKPEEVLIVEDENGNIVRETMKDNDVLVQYKIMRETLIYLSHLDHDDTEKQMLRKLNKQLSGEEWAWNNLNTLCWAIGSISGSMAEDQENRFLVMVIRDLLNLCEITKGKDNKAVIASNIMYVVGQYPRFLRAHWKFLKTVVNKLFEFMHETHPGVQDMACDTFLKIVQKCKRKFVIVQVGENEPFVSELLTGLATTVQDLEPHQIHSFYESVGNMIQAESDPQKRDEYLQRLMALPNQKWAEIIGQARHSVEFLKDQVVIRTVLNILQTNTSAATSLGTYFLSQISLIFLDMLNVYRMYSELVSTNITEGGPYASKTSFVKLLRSVKRETLKLIETFLDKAEDQPHIGKQFVPPMMESVLGDYARNVPDARESEVLSLFATIINKYKATMLDDVPHIFEAVFQCTLEMITKNFEDYPEHRLKFFSLLRAIATFCFPALIKLSSPQLKLVMDSIIWAFRHTERNIAETGLNLLLEMLKNFQQSEFCNQFYRSYFMQIEQEIFAVLTDTFHKPGFKLHVLVLQQLFCLPESGALTEPLWDATTVPYPYPDNVAFVREYTIKLLSSSFPNMTAAEVTQFVNGLYESRNDPSGFKNNIRDFLVQSKEFSAQDNKDLYAEEAAAQRERERQRMLSIPGLIAPNEIQDEMVDS

SEQ ID NO: 20513 - protein, 1026 aa, Arabidopsis thaliana
  peptide (1)..(1026): Ceres Seq. ID no. 12388489
MWLQVVHILQNTNSLDTKFFALQVLEGVIKYRWNALPVEQRDGMKNYISEVIVQLSSNEASFRSERLYVNKLNVILVQIVKHDWPAKWTSFIPDLVAAAKTSETICENCMAILKLLSEEVFDFSRGEMTQQKIKELKQSLNSEFKLIHELCLYVLSASQRQDLIRATLSALHAYLSWIPLGYIFESTLLETLLKFFPVPAYRNLTIQCLTEVAALNFGDFYNVQYVKMYTIFIGQLRIILPPSTKIPEAYSSGSGEEQAFIQNLALFFTSFFKFHIRVLESTPEVVSLLLAGLEYLINISYVDDTEVFKVCLDYWNSLVLELFDAHHNSDNPAVSASLMGLQPFLPGMVDGLGSQVMQRRQLYSHPMSKLRGLMINRMAKPEEVLIVEDENGNIVRETMKDNDVLVQYKIMRETLIYLSHLDHDDTEKQMLRKLNKQLSGEEWAWNNLNTLCWAIGSISGSMAEDQENRFLVMVIRDLLNLCEITKGKDNKAVIASNIMYVVGQYPRFLRAHWKFLKTVVNKLFEFMHETHPGVQDMACDTFLKIVQKCKRKFVIVQVGENEPFVSELLTGLATTVQDLEPHQIHSFYESVGNMIQAESDPQKRDEYLQRLMALPNQKWAEIIGQARHSVEFLKDQVVIRTVLNILQTNTSAATSLGTYFLSQISLIFLDMLNVYRMYSELVSTNITEGGPYASKTSFVKLLRSVKRETLKLIETFLDKAEDQPHIGKQFVPPMMESVLGDYARNVPDARESEVLSLFATIINKYKATMLDDVPHIFEAVFQCTLEMITKNFEDYPEHRLKFFSLLRAIATFCFPALIKLSSPQLKLVMDSIIWAFRHTERNIAETGLNLLLEMLKNFQQSEFCNQFYRSYFMQIEQEIFAVLTDTFHKPGFKLHVLVLQQLFCLPESGALTEPLWDATTVPYPYPDNVAFVREYTIKLLSSSFPNMTAAEVTQFVNGLYESRNDPSGFKNNIRDFLVQSKEFSAQDNKDLYAEEAAAQRERERQRMLSIPGLIAPNEIQDEMVDS

SEQ ID NO: 20514 - protein, 983 aa, Arabidopsis thaliana
  peptide (1)..(983): Ceres Seq. ID no. 12388490
MKNYISEVIVQLSSNEASFRSERLYVNKLNVILVQIVKHDWPAKWTSFIPDLVAAAKTSETICENCMAILKLLSEEVFDFSRGEMTQQKIKELKQSLNSEFKLIHELCLYVLSASQRQDLIRATLSALHAYLSWIPLGYIFESTLLETLLKFFPVPAYRNLTIQCLTEVAALNFGDFYNVQYVKMYTIFIGQLRIILPPSTKIPEAYSSGSGEEQAFIQNLALFFTSFFKFHIRVLESTPEVVSLLLAGLEYLINISYVDDTEVFKVCLDYWNSLVLELFDAHHNSDNPAVSASLMGLQPFLPGMVDGLGSQVMQRRQLYSHPMSKLRGLMINRMAKPEEVLIVEDENGNIVRETMKDNDVLVQYKIMRETLIYLSHLDHDDTEKQMLRKLNKQLSGEEWAWNNLNTLCWAIGSISGSMAEDQENRFLVMVIRDLLNLCEITKGKDNKAVIASNIMYVVGQYPRFLRAHWKFLKTVVNKLFEFMHETHPGVQDMACDTFLKIVQKCKRKFVIVQVGENEPFVSELLTGLATTVQDLEPHQIHSFYESVGNMIQAESDPQKRDEYLQRLMALPNQKWAEIIGQARHSVEFLKDQVVIRTVLNILQTNTSAATSLGTYFLSQISLIFLDMLNVYRMYSELVSTNITEGGPYASKTSFVKLLRSVKRETLKLIETFLDKAEDQPHIGKQFVPPMMESVLGDYARNVPDARESEVLSLFATIINKYKATMLDDVPHIFEAVFQCTLEMITKNFEDYPEHRLKFFSLLRAIATFCFPALIKLSSPQLKLVMDSIIWAFRHTERNIAETGLNLLLEMLKNFQQSEFCNQFYRSYFMQIEQEIFAVLTDTFHKPGFKLHVLVLQQLFCLPESGALTEPLWDATTVPYPYPDNVAFVREYTIKLLSSSFPNMTAAEVTQFVNGLYESRNDPSGFKNNIRDFLVQSKEFSAQDNKDLYAEEAAAQRERERQRMLSIPGLIAPNEIQDEMVDS

SEQ ID NO: 20515 - DNA, 666 bp, Arabidopsis thaliana
  misc_feature (1)..(666): Ceres Seq. ID no. 13575779
aagggtttcgtcagagacagaagtgagagaggaggaaaaatgccggcgggacacggagtgagggcgagaacaagagatctgttcgcgagaccattcaggaagaagggttatattccactctccacttacctcagaaccttcaaggtcggcgattacgtcgatgtcaaggttaatggagctatccacaagggtatgcctcataagttctaccatggtcgtactggtcgcatctggaatgtcactaagcgtgccgttggtgttgaagtcaacaaacagattgggaacagaatcataaggaagaggatacatgtgcgtgtggagcatgtgcaacagtcaaggtgtgctgaggagtttaaactcagaaagaagcagaacgatgtgcttaaggctgatgctaaagccagaggagagactatcagcaccaagagacagcctaaaggtcctaaaccgggtttcatggtcgaaggtatgacattggagactgtcactcccattccttacgatgttgtcaacgatctcaagggtggttattgagttttttccattttattatcattctctactcagaatttttgcacttgcttttttaatgatgtttttgtatcaaacaagagtgaattctatatggtatgagttcatattttgttaggaaagatggtttatccc

SEQ ID NO: 20516 - protein, 177 aa, Arabidopsis thaliana
  peptide (1)..(177): Ceres Seq. ID no. 13575780
KGFVRDRSERGGKMPAGHGVRARTRDLFARPFRKKGYIPLSTYLRTFKVGDYVDVKVNGAIHKGMPHKFYHGRTGRIWNVTKRAVGVEVNKQIGNRIIRKRIHVRVEHVQQSRCAEEFKLRKKQNDVLKADAKARGETISTKRQPKGPKPGFMVEGMTLETVTPIPYDVVNDLKGGY

SEQ ID NO: 20517 - protein, 164 aa, Arabidopsis thaliana
  peptide (1)..(164): Ceres Seq. ID no. 13575781
MPAGHGVRARTRDLFARPFRKKGYIPLSTYLRTFKVGDYVDVKVNGAIHKGMPHKFYHGRTGRIWNVTKRAVGVEVNKQIGNRIIRKRIHVRVEHVQQSRCAEEFKLRKKQNDVLKADAKARGETISTKRQPKGPKPGFMVEGMTLETVTPIPYDVVNDLKGGY

SEQ ID NO: 20518 - protein, 113 aa, Arabidopsis thaliana
  peptide (1)..(113): Ceres Seq. ID no. 13575782
MPHKFYHGRTGRIWNVTKRAVGVEVNKQIGNRIIRKRIHVRVEHVQQSRCAEEFKLRKKQNDVLKADAKARGETISTKRQPKGPKPGFMVEGMTLETVTPIPYDVVNDLKGGY

SEQ ID NO: 20519 - DNA, 1252 bp, Arabidopsis thaliana
  misc_feature (1)..(1252): Ceres Seq. ID no. 13490446
ctctgaaacggacatcgagaaattccaggagtgagttttgacaatcggagagaaatggggtcgacagaaaaagagcagacgacgcaacatcacccgcctcacatcagcagtctcgtcgtacgtccctccggaagcaacgacagagaagacggccgcaacgccgccggagactatgagcccggagaagtctctcgtgaccggccttcgtttaatcgctcggatcggtataagggtgacaatggtggacatagaactcgggcaagttctagctcaccaggccgtcgtggatatgaagatcacaagcatggctctgatcttaatcattcaggcgttccacctcgtggccgtgagttaagcagcagaagggaagcacctgggagacacagagactattccccacccttagctagaggtggagctggtgctcgtccttatcgaagaggtttagatgggcctgaacctccacatggaagggatggcatgagcagaaataatatatcaaaggtgcaaccaagagaaggagattggtactgtcttgatccattatgcagaaacttgaactttgcgagacgcgagtcctgctacaaatgcaagaggcatcgttatgcaccggctaatagtcctccactgcctcgccttcttcctcctcccatgaatcattccccaagaagagactttaatggctacagatctcctccgcgtggctggcccagagactacccgccgccaaggcatgaccatcccacatggagagacagagaacgagaccgtccgcattactcagaccatgagtaccctcctagcagaaggatagcatctgactgggcccatacagagccgctcccaaaacctcattatgacagacgaccacctctcagtccacctcgtggtggcagatggggacgagttttgagagagaggagcagatccccgccattgagagatgttccaccaccgccattgagagatggtccaccaccgtcattgagaggaggcggtccaccgctgcacagagattaccgccgtgacagtcactttgacagagaaagacgagacgatgggcgtggcggcagaggcagaatgggaaactcttactgatgcaaaaactgtgtatgtcttgggattttggtttagacagttcaaattttcgcggaatgtgaccttgtattacaccttagattctttgttcttgttagcaaaactcttgtgccattagtgcaaaaaccaaacaaatgagaagcaattttggtgc

SEQ ID NO: 20520 - protein, 347 aa, Arabidopsis thaliana
  peptide (1)..(347): Ceres Seq. ID no. 13490447
MGSTEKEQTTQHHPPHISSLVVRPSGSNDREDGRNAAGDYEPGEVSRDRPSFNRSDRYKGDNGGHRTRASSSSPGRRGYEDHKHGSDLNHSGVPPRGRELSSRREAPGRHRDYSPPLARGGAGARPYRRGLDGPEPPHGRDGMSRNNISKVQPREGDWYCLDPLCRNLNFARRESCYKCKRHRYAPANSPPLPRLLPPPMNHSPRRDFNGYRSPPRGWPRDYPPPRHDHPTWRDRERDRPHYSDHEYPPSRRIASDWAHTEPLPKPHYDRRPPLSPPRGGRWGRVLRERSRSPPLRDVPPPPLRDGPPPSLRGGGPPLHRDYRRDSHFDRERRDDGRGGRGRMGNSY

SEQ ID NO: 20521 - protein, 205 aa, Arabidopsis thaliana
  peptide (1)..(205): Ceres Seq. ID no. 13490448
MSRNNISKVQPREGDWYCLDPLCRNLNFARRESCYKCKRHRYAPANSPPLPRLLPPPMNHSPRRDFNGYRSPPRGWPRDYPPPRHDHPTWRDRERDRPHYSDHEYPPSRRIASDWAHTEPLPKPHYDRRPPLSPPRGGRWGRVLRERSRSPPLRDVPPPPLRDGPPPSLRGGGPPLHRDYRRDSHFDRERRDDGRGGRGRMGNSY

SEQ ID NO: 20522 - DNA, 1259 bp, Arabidopsis thaliana
  misc_feature (1)..(1259): Ceres Seq. ID no. 13592961
  misc_feature (1)..(1259): Ortholog of  Ceres SEQ ID NO 15226378 as cited in SEQ ID NO 62741
  misc_feature (1)..(1259): Ortholog of  Ceres SEQ ID NO 13597389 as cited in SEQ ID NO 63426
  misc_feature (1)..(1259): Ortholog of  Ceres SEQ ID NO 15169639 as cited in SEQ ID NO 64624
  misc_feature (1)..(1259): Ortholog of  Ceres SEQ ID NO 14303071 as cited in SEQ ID NO 67114
  misc_feature (1)..(1259): Ortholog of  Ceres SEQ ID NO 13595998 as cited in SEQ ID NO 68161
agattctcatgtgttgatgaaactagttagcctctttttatctactctttttgtcactatcataagctcggaatcgcagtgccggaacttcgagtcgatcatcagtttcggtgattcgattgccgacactggaaacttgctcggtctctcagatcataacaatcttcctatgagcgcgtttccaccgtacggagaaactttcttccaccacccaaccggtcgtttctcagacggtcgcctcattattgacttcatcgctgaatttttggggcttccttatgtgcctccttacttcggatctacaaatggaaactttgagaaaggagttaattttgccgtagcctcagcaactgcattggaaagttctttcttagaagagagaggataccattgtcctcacaacatcagtttaggagttcagcttaacatcttcaaggagagtttaccaaatctatgtggcttaccatcagattgtagagatatgattggaaatggtttgattctcatgggagagattggagctaatgattacaatttcccattcttccaactcagacccttggacgaggtcaaagagctcgttccattggtgattaatacgatatcttctgcaatcacggagttgattggtatgggaggaagaacatttctggtgcccggagggttccctctcggatgctcagtagcatttttgacattacaccaaacatcaaacatggaagaatatgatcctttaacaggatgtttgaaatggctgaacaagtttggagaataccacagtgagcggcttcaggaagaactcaacagactcaggaagcttaaccctcacgtcaacatcatatatgctgactactacaatgcttcattgcgccttggccgagaaccaagtaaatacggattcataaacagacacttgtcagcttgttgcggtgtaggagggccgtacaacttcaacttaagtagaagttgtgggagtgtaggagtggaagcttgtagtgatccttcaaagtatgtggcctgggatggccttcatatgactgaggctgcacacaaatcgatggctgatggattagtcaaaggaccatatgcgattcctcctttcgattggtcatgtctcagctcaatgattaagaagaaggaagtcgttggaaacacaatattctttgatgaatagtagacacaagctaagttgatttcaaaatgtaaaatatctgaataaaaagatctaaggataaaaaatttctaataataaccaattt

SEQ ID NO: 20523 - protein, 390 aa, Arabidopsis thaliana
  peptide (1)..(390): Ceres Seq. ID no. 13592962
DSHVLMKLVSLFLSTLFVTIISSESQCRNFESIISFGDSIADTGNLLGLSDHNNLPMSAFPPYGETFFHHPTGRFSDGRLIIDFIAEFLGLPYVPPYFGSTNGNFEKGVNFAVASATALESSFLEERGYHCPHNISLGVQLNIFKESLPNLCGLPSDCRDMIGNGLILMGEIGANDYNFPFFQLRPLDEVKELVPLVINTISSAITELIGMGGRTFLVPGGFPLGCSVAFLTLHQTSNMEEYDPLTGCLKWLNKFGEYHSERLQEELNRLRKLNPHVNIIYADYYNASLRLGREPSKYGFINRHLSACCGVGGPYNFNLSRSCGSVGVEACSDPSKYVAWDGLHMTEAAHKSMADGLVKGPYAIPPFDWSCLSSMIKKKEVVGNTIFFDE

SEQ ID NO: 20524 - protein, 385 aa, Arabidopsis thaliana
  peptide (1)..(385): Ceres Seq. ID no. 13592963
MKLVSLFLSTLFVTIISSESQCRNFESIISFGDSIADTGNLLGLSDHNNLPMSAFPPYGETFFHHPTGRFSDGRLIIDFIAEFLGLPYVPPYFGSTNGNFEKGVNFAVASATALESSFLEERGYHCPHNISLGVQLNIFKESLPNLCGLPSDCRDMIGNGLILMGEIGANDYNFPFFQLRPLDEVKELVPLVINTISSAITELIGMGGRTFLVPGGFPLGCSVAFLTLHQTSNMEEYDPLTGCLKWLNKFGEYHSERLQEELNRLRKLNPHVNIIYADYYNASLRLGREPSKYGFINRHLSACCGVGGPYNFNLSRSCGSVGVEACSDPSKYVAWDGLHMTEAAHKSMADGLVKGPYAIPPFDWSCLSSMIKKKEVVGNTIFFDE

SEQ ID NO: 20525 - protein, 334 aa, Arabidopsis thaliana
  peptide (1)..(334): Ceres Seq. ID no. 13592964
MSAFPPYGETFFHHPTGRFSDGRLIIDFIAEFLGLPYVPPYFGSTNGNFEKGVNFAVASATALESSFLEERGYHCPHNISLGVQLNIFKESLPNLCGLPSDCRDMIGNGLILMGEIGANDYNFPFFQLRPLDEVKELVPLVINTISSAITELIGMGGRTFLVPGGFPLGCSVAFLTLHQTSNMEEYDPLTGCLKWLNKFGEYHSERLQEELNRLRKLNPHVNIIYADYYNASLRLGREPSKYGFINRHLSACCGVGGPYNFNLSRSCGSVGVEACSDPSKYVAWDGLHMTEAAHKSMADGLVKGPYAIPPFDWSCLSSMIKKKEVVGNTIFFDE

SEQ ID NO: 20526 - DNA, 489 bp, Arabidopsis thaliana
  misc_feature (1)..(489): Ceres Seq. ID no. 12337178
aattctgcagaagacgcgtcttctttcttcttcggtaaaaatcagaagcgaagaagagatcaaatcaatctgatcgtagatgggttgtttcagttgcttcgacggaacccaaaaggaacagcgtaaggaagaagagagacaagcctccgccggagctcgtgccaaagccgccgaagctgcccagcaacggaaagagcagtttgataagtctgcagctggaagagctgcacaagctcaattacaacaaatggctaaacaatctgcaaatactaacaaaggagagcctgttcttaagtggcaaatgacgtagtgatgagtcctggtttcaaaaggaatcaatttgtgcgatttggttctttgtaaattgtgtgttcttcaatgtttgcaatactttggttatgtgaattgaagcttattttcttccttattcatctgattatcttttgacttttgtaaaacaaaaaagaaataacagagtacaatgttaag

SEQ ID NO: 20527 - protein, 76 aa, Arabidopsis thaliana
  peptide (1)..(76): Ceres Seq. ID no. 12337179
MGCFSCFDGTQKEQRKEEERQASAGARAKAAEAAQQRKEQFDKSAAGRAAQAQLQQMAKQSANTNKGEPVLKWQMT

SEQ ID NO: 20528 - protein, 41 aa, Arabidopsis thaliana
  peptide (1)..(41): Ceres Seq. ID no. 12337180
NSAEDASSFFFGKNQKRRRDQINLIVDGLFQLLRRNPKGTA

SEQ ID NO: 20529 - DNA, 708 bp, Arabidopsis thaliana
  misc_feature (1)..(708): Ceres Seq. ID no. 12600643
aaagaaattaaaagtgttcttgttgctgtagaacacaaacagaacaaacaaaaaatcaattgaagagtctctcagtcgttaggggaagcaaatagagaaatggctagctttactgcctccgcttccaccgtctccgccgctcgtccggctctccttctcaagcctaccgtcgccatctctgctcctgttcttggtttgcctccaatgggtaagaagaagggaggagtgagatgttcaatggagacaaagcaaggaaacgtctcagtcatgggggctggagtttcagctgcagcaacagctgctttgacggcggtgatgagcaatcccgcgatggctttggttgatgagaggatgtcaacagaaggaacaggattaccctttggtctaagcaacaacctcttgggttggattctgtttggagtctttggtttgatctggactttcttcttcgtctacacttcatctctcgaggaggatgaagaatctggtctttcactctgaaggaagaatcaatctttcgtcttctcatttccattttcatgtgagaacatgaatcaaaagtgttcacccttctagtttcttgtaattgttaagtaaagactaaaaactattttcatgtgtgtttactttcccccattctctttatcttgtcataacattgataaggaggagattatgtgattattaaatatcatgcatgacatgttc

SEQ ID NO: 20530 - protein, 133 aa, Arabidopsis thaliana
  peptide (1)..(133): Ceres Seq. ID no. 12600644
MASFTASASTVSAARPALLLKPTVAISAPVLGLPPMGKKKGGVRCSMETKQGNVSVMGAGVSAAATAALTAVMSNPAMALVDERMSTEGTGLPFGLSNNLLGWILFGVFGLIWTFFFVYTSSLEEDEESGLSL

SEQ ID NO: 20531 - protein, 98 aa, Arabidopsis thaliana
  peptide (1)..(98): Ceres Seq. ID no. 12600645
MGKKKGGVRCSMETKQGNVSVMGAGVSAAATAALTAVMSNPAMALVDERMSTEGTGLPFGLSNNLLGWILFGVFGLIWTFFFVYTSSLEEDEESGLSL

SEQ ID NO: 20532 - protein, 87 aa, Arabidopsis thaliana
  peptide (1)..(87): Ceres Seq. ID no. 12600646
METKQGNVSVMGAGVSAAATAALTAVMSNPAMALVDERMSTEGTGLPFGLSNNLLGWILFGVFGLIWTFFFVYTSSLEEDEESGLSL

SEQ ID NO: 20533 - DNA, 546 bp, Arabidopsis thaliana
  misc_feature (1)..(546): Ceres Seq. ID no. 12329459
aacatactttttacaatcacatttttgaagaactttcattccataaatctacagatctttgtgtatcaagtaaagagatgtcaggaagaggaaagggaggaaaaggattgggaaagggaggagcctattcgtcgtcttgctcgtagaggtggtgtcaagcgtatcagtggtctcatctacgaagagaccagaggtgtcctcaagatcttcctcgagaatgttatccgtgacgccgttacctacactgagcacgccaggaggaagacggtgaccgccatggatgttgtctacgctttgaagaggcaaggtcgtactctctacggtttcggaggttaatccgatttgggggattagggtttatgcaagtttggggatttcttcttgtttctgagatccgtgttaaatggtttgaattagtcaaaagtaaattcaggagttagtttttgtttctcgtttttcgttgttgttagccaatgtgatgtagtagttaattatcttttgcaagctttgtgctaagaaaatctaatgagaatgatccatttgctt

SEQ ID NO: 20534 - protein, 111 aa, Arabidopsis thaliana
  peptide (1)..(111): Ceres Seq. ID no. 12329460
NILFTITFLKNFHSINLQIFVYQVKRCQEEEREEKDWEREEPIRRLARRGGVKRISGLIYEETRGVLKIFLENVIRDAVTYTEHARRKTVTAMDVVYALKRQGRTLYGFGG

SEQ ID NO: 20535 - DNA, 595 bp, Arabidopsis thaliana
  misc_feature (1)..(595): Ceres Seq. ID no. 12321778
accaaaaacacatttctataaactcagaaacaaacaaaagatcaagaagaaacatggtgatgattaagaccacaatggtttccctttttgctctagcggcggttctcctaatgattctagccccggcggcagaagccgtgacgtgctcgccaatgcagctaagcccatgtgcaacggcgataacgtcgtcttctccaccatcggctttgtgctgtgcaaagctgaaggagcagaggccatgcttatgtggttacatgagaaaccctagcctccgtcgcttcgtcagcactcccaacgctcgtaaagtctctaaaagttgcaaactccccatcccaaggtgttaaaaagtcagaaaagtgtttgctgtttatgatcatcctatatatgtttgaatcctacttttggtgtgtgtttaaggatgtttatttatgaccactataagtagtagagttaaataagtaagtggtactcttggtgatgctttgtatgcatcttatttaaatttttgctatcttattctggttgttgttgatatatatatatatacatgatggtgtaataactgagatgatataatatatgaaaattatatttc

SEQ ID NO: 20536 - protein, 113 aa, Arabidopsis thaliana
  peptide (1)..(113): Ceres Seq. ID no. 12321779
QKHISINSETNKRSRRNMVMIKTTMVSLFALAAVLLMILAPAAEAVTCSPMQLSPCATAITSSSPPSALCCAKLKEQRPCLCGYMRNPSLRRFVSTPNARKVSKSCKLPIPRC

SEQ ID NO: 20537 - protein, 96 aa, Arabidopsis thaliana
  peptide (1)..(96): Ceres Seq. ID no. 12321780
MVMIKTTMVSLFALAAVLLMILAPAAEAVTCSPMQLSPCATAITSSSPPSALCCAKLKEQRPCLCGYMRNPSLRRFVSTPNARKVSKSCKLPIPRC

SEQ ID NO: 20538 - protein, 94 aa, Arabidopsis thaliana
  peptide (1)..(94): Ceres Seq. ID no. 12321781
MIKTTMVSLFALAAVLLMILAPAAEAVTCSPMQLSPCATAITSSSPPSALCCAKLKEQRPCLCGYMRNPSLRRFVSTPNARKVSKSCKLPIPRC

SEQ ID NO: 20539 - DNA, 459 bp, Arabidopsis thaliana
  misc_feature (1)..(459): Ceres Seq. ID no. 12423159
aagatttacatacgaaaggatcgtcgaaatgtttgtgattggagtggtgatggtgctattggcggttcttccagccgttctgccgccgcttccgccgccgccgatgatattgatgggaattccggtggtgctgatgctaatgcttatttacttagccatttattatccacctcatcaagctcattttctctcttcatcttcctttgacactacttctaggcatgtaatgtgatggtagtgagacaatgagtcgatgatccagatgactcaactcacatatgtgaatgcgtcgtcgtttgatgataattgtgaatccatgcagtttctatatgattaaaatttagaccctttttatgttttttcttttcttttcgttttagggtgattcgagttggatcgtctggtaagagtcattgtaaaatttgaagtgtaatttctaattttctaatcagttgaacc

SEQ ID NO: 20540 - protein, 76 aa, Arabidopsis thaliana
  peptide (1)..(76): Ceres Seq. ID no. 12423160
RFTYERIVEMFVIGVVMVLLAVLPAVLPPLPPPPMILMGIPVVLMLMLIYLAIYYPPHQAHFLSSSSFDTTSRHVM

SEQ ID NO: 20541 - protein, 68 aa, Arabidopsis thaliana
  peptide (1)..(68): Ceres Seq. ID no. 12423161
KIYIRKDRRNVCDWSGDGAIGGSSSRSAAASAAADDIDGNSGGADANAYLLSHLLSTSSSSFSLFIFL

SEQ ID NO: 20542 - protein, 67 aa, Arabidopsis thaliana
  peptide (1)..(67): Ceres Seq. ID no. 12423162
MFVIGVVMVLLAVLPAVLPPLPPPPMILMGIPVVLMLMLIYLAIYYPPHQAHFLSSSSFDTTSRHVM

SEQ ID NO: 20543 - DNA, 629 bp, Arabidopsis thaliana
  misc_feature (1)..(629): Ceres Seq. ID no. 12370021
gaacctccgatttgactgcaccgtcggagctcgacgctgagctaagcttaaccaagagctgtcgtatattacactagcagtgaagatcgaatcttaaaaccatggcttctccgaccaattcacagaaaacagtttcggatgacgaggaagttgattactccatcaaaccggagttctatgattcagatattgatgataaagatgagctttggatggataagaagagagatggtcgtacttctgatgctcttcttagctgtccagcttgtttcaccactgtctgcttagagtgtcagaggcacgagcagtatgtgacacagtacagagcagtctttgtggtcaattgcaaagtaggtacagacacagttttgcaacagaatacaatgcccttaaaggttggtaaaagaaggagagattccgagatgcaagaaactggttctgaagatagcgaaaaagttaacccggtcttttgctcagcttgttccacagagatcggagtagttgacagtgaagagatctaccatttctttaatgtcattccaagcgagccttaaaacaacctggttttatgagttatttgtaacgagttctaaacaggtgattaggattaaagtttcgattgtttgcgt

SEQ ID NO: 20544 - protein, 150 aa, Arabidopsis thaliana
  peptide (1)..(150): Ceres Seq. ID no. 12370022
MASPTNSQKTVSDDEEVDYSIKPEFYDSDIDDKDELWMDKKRDGRTSDALLSCPACFTTVCLECQRHEQYVTQYRAVFVVNCKVGTDTVLQQNTMPLKVGKRRRDSEMQETGSEDSEKVNPVFCSACSTEIGVVDSEEIYHFFNVIPSEP

SEQ ID NO: 20545 - protein, 113 aa, Arabidopsis thaliana
  peptide (1)..(113): Ceres Seq. ID no. 12370023
MDKKRDGRTSDALLSCPACFTTVCLECQRHEQYVTQYRAVFVVNCKVGTDTVLQQNTMPLKVGKRRRDSEMQETGSEDSEKVNPVFCSACSTEIGVVDSEEIYHFFNVIPSEP

SEQ ID NO: 20546 - DNA, 570 bp, Arabidopsis thaliana
  misc_feature (1)..(570): Ceres Seq. ID no. 12336087
aagaagaccttctctcatcatcattattataggaagttaggaactatggcttatgaagagagaagatcatcgatcctggattcattctcgctatcgccactaccatacccagttcttttgatcctagccgttgcttcagtgttcttgttgagttcatggtacttcagcttggaagaagcagccgaatcagcggaagagcagataaattttgcgcttctcttgattcctctgtttcttatagtcttggtccggtggttatcttccatggagaaccctgatgcgcttctcgggatgttttcaagcagtcgtcggacaacttacgtgagtcccggagccggaggtgacggtggaagctcgccgtggggagtggcggcgttgatagttttgttgcttgtattgcttcagtatcaatcaagtttcttggagatgtggtctggttaatgatattgataggtttttttgattttcacgtgttttgttttgtcgtctagtagcacgatgatgtaaaaatttggtcattacttacgaattacgaggtttaaaatctcgtgacggtactacatgttatcc

SEQ ID NO: 20547 - protein, 146 aa, Arabidopsis thaliana
  peptide (1)..(146): Ceres Seq. ID no. 12336088
KKTFSHHHYYRKLGTMAYEERRSSILDSFSLSPLPYPVLLILAVASVFLLSSWYFSLEEAAESAEEQINFALLLIPLFLIVLVRWLSSMENPDALLGMFSSSRRTTYVSPGAGGDGGSSPWGVAALIVLLLVLLQYQSSFLEMWSG

SEQ ID NO: 20548 - protein, 131 aa, Arabidopsis thaliana
  peptide (1)..(131): Ceres Seq. ID no. 12336089
MAYEERRSSILDSFSLSPLPYPVLLILAVASVFLLSSWYFSLEEAAESAEEQINFALLLIPLFLIVLVRWLSSMENPDALLGMFSSSRRTTYVSPGAGGDGGSSPWGVAALIVLLLVLLQYQSSFLEMWSG

SEQ ID NO: 20549 - DNA, 560 bp, Arabidopsis thaliana
  misc_feature (1)..(560): Ceres Seq. ID no. 12322366
aacaaccaaaaacattcatttgtcattttgtctcctcttttgttttctctgatcactagtatggctgtattcagagtcttgcttgcttctcttctcatatctcttcttgtcctcgacttcgtccatgccgatatggtgacgtcgaatgacgcccctaaaatcgattgcaacagcaggtgccaagagcggtgcagtctttcgagtaggccaaatctttgtcacagagcgtgcgggacttgctgcgctaggtgcaactgcgtggcaccgggcacatccggaaactacgacaaatgtccgtgctatggtagcctaaccacccacggaggacgcagaaagtgtccttaaaaactctgtcgctgttttatttgatttcgtttataatactttacttttatgagagtaattgtggttattttcttgggaattattaaaaagcaaaagaaagagaatgttatacgtcatgtgcaactcttcgatctttgttttagtgtttatccaatttgtacttgttggtttggttcctggttaacattaggtctgaaaaggtattgtttttcatc

SEQ ID NO: 20550 - protein, 114 aa, Arabidopsis thaliana
  peptide (1)..(114): Ceres Seq. ID no. 12322367
NNQKHSFVILSPLLFSLITSMAVFRVLLASLLISLLVLDFVHADMVTSNDAPKIDCNSRCQERCSLSSRPNLCHRACGTCCARCNCVAPGTSGNYDKCPCYGSLTTHGGRRKCP

SEQ ID NO: 20551 - protein, 94 aa, Arabidopsis thaliana
  peptide (1)..(94): Ceres Seq. ID no. 12322368
MAVFRVLLASLLISLLVLDFVHADMVTSNDAPKIDCNSRCQERCSLSSRPNLCHRACGTCCARCNCVAPGTSGNYDKCPCYGSLTTHGGRRKCP

SEQ ID NO: 20552 - protein, 70 aa, Arabidopsis thaliana
  peptide (1)..(70): Ceres Seq. ID no. 12322369
MVTSNDAPKIDCNSRCQERCSLSSRPNLCHRACGTCCARCNCVAPGTSGNYDKCPCYGSLTTHGGRRKCP

SEQ ID NO: 20553 - DNA, 1577 bp, Arabidopsis thaliana
  misc_feature (1)..(1577): Ceres Seq. ID no. 13494050
  misc_feature (1)..(1577): Ortholog of  Ceres SEQ ID NO 12605597 as cited in SEQ ID NO 20378
  misc_feature (1)..(1577): Ortholog of  Ceres SEQ ID NO 15177308 as cited in SEQ ID NO 52713
aaaagctccgttattcaagattattccgataatgcagtcactctccaccccacacaccatctctcttcttctccccagaacctctccgtctcgtctttctccctctcttcactcccttgctttccccactcgattacggtctctttcctattcttctcaaacgtcgatcctccccgatgccggcgatgatttcattgtcggtgactgtctcgtctacgaggacggcgtcttcgaagacccttaccttgataaggaggtcactcaggttgcgaagcaggagcgcaagaagaatcggcgtggcggggctaagagattagatgaatccgagattgagcccgagaacctcgtgccagaggaatggagggatattcaggcggaggtgaatctgacgaagaaggacaagcgcaaaatagcgcaggagatggagttcggggttcgggtggagaagaagaggcaagggctaattccgctgaggaaagttgacttgaatgactttctcacgtacaaggaagccaagttggctcaattgaggcctgtcattctcgataaaccgggaaatttctccgacgacagtggagcgtcaagcgatggagagaccgctgtatcatctcccagcgagcgagtggctcctaagaaccctagatgggcagtttacggaaagggattcgaccacgttgccaagttcttcaatagcgacaagtacgatcccagcgacaagaaatccgacggccctcgaaagctgctttcaaaagaagagaagtttatgctcaatagccggaatcctgacctagccgttgccacatcaaaaaaatggcttcctcttcacacactggcagcatgtggagagttttatctggttgattccttgctaaagcacaatcttgatatcaatgcaaccgatgtgggcggcttgacagtacttcaccgagcaatcattggtaagaagcaggctattactaactacctgctgagggaatcggcaaatccatttgttcttgatgacgaaggtgcgaccttgatgcactatgctgtgcaaacagcatcagctcccacaataaaacttctcctactgtataacgctgatataaacgctcaggacagggacgggtggactccactgcacgttgcagtacaggccagaagaagcgacattgtaaagcttcttttgataaaaggggcggacatagaagtgaagaacaaggatgggttaactccgcttgggctttgcctctaccttggaagagagataaggacgtatgaggtgatgaagctgttgaaagagtttccacttagcagacacaagaagagattggtaacaacagatgaagatattgaatagtcctttcaatttcagcttgaagtacactcacttatgagaacctgagaaaaggagatggaggtaaaggtgatgattagggcattggaacctcggagtcggagtgggtccactgtctcacttccttaaatttggtttgctgttagtcttatccatcgattttggatatttatcacaacttgatccattcttaaagaaaatatctgaaaataaataaaaagtaatacatatatatatatat

SEQ ID NO: 20554 - protein, 445 aa, Arabidopsis thaliana
  peptide (1)..(445): Ceres Seq. ID no. 13494051
KAPLFKIIPIMQSLSTPHTISLLLPRTSPSRLSPSLHSLAFPTRLRSLSYSSQTSILPDAGDDFIVGDCLVYEDGVFEDPYLDKEVTQVAKQERKKNRRGGAKRLDESEIEPENLVPEEWRDIQAEVNLTKKDKRKIAQEMEFGVRVEKKRQGLIPLRKVDLNDFLTYKEAKLAQLRPVILDKPGNFSDDSGASSDGETAVSSPSERVAPKNPRWAVYGKGFDHVAKFFNSDKYDPSDKKSDGPRKLLSKEEKFMLNSRNPDLAVATSKKWLPLHTLAACGEFYLVDSLLKHNLDINATDVGGLTVLHRAIIGKKQAITNYLLRESANPFVLDDEGATLMHYAVQTASAPTIKLLLLYNADINAQDRDGWTPLHVAVQARRSDIVKLLLIKGADIEVKNKDGLTPLGLCLYLGREIRTYEVMKLLKEFPLSRHKKRLVTTDEDIE

SEQ ID NO: 20555 - protein, 435 aa, Arabidopsis thaliana
  peptide (1)..(435): Ceres Seq. ID no. 13494052
MQSLSTPHTISLLLPRTSPSRLSPSLHSLAFPTRLRSLSYSSQTSILPDAGDDFIVGDCLVYEDGVFEDPYLDKEVTQVAKQERKKNRRGGAKRLDESEIEPENLVPEEWRDIQAEVNLTKKDKRKIAQEMEFGVRVEKKRQGLIPLRKVDLNDFLTYKEAKLAQLRPVILDKPGNFSDDSGASSDGETAVSSPSERVAPKNPRWAVYGKGFDHVAKFFNSDKYDPSDKKSDGPRKLLSKEEKFMLNSRNPDLAVATSKKWLPLHTLAACGEFYLVDSLLKHNLDINATDVGGLTVLHRAIIGKKQAITNYLLRESANPFVLDDEGATLMHYAVQTASAPTIKLLLLYNADINAQDRDGWTPLHVAVQARRSDIVKLLLIKGADIEVKNKDGLTPLGLCLYLGREIRTYEVMKLLKEFPLSRHKKRLVTTDEDIE

SEQ ID NO: 20556 - protein, 305 aa, Arabidopsis thaliana
  peptide (1)..(305): Ceres Seq. ID no. 13494053
MEFGVRVEKKRQGLIPLRKVDLNDFLTYKEAKLAQLRPVILDKPGNFSDDSGASSDGETAVSSPSERVAPKNPRWAVYGKGFDHVAKFFNSDKYDPSDKKSDGPRKLLSKEEKFMLNSRNPDLAVATSKKWLPLHTLAACGEFYLVDSLLKHNLDINATDVGGLTVLHRAIIGKKQAITNYLLRESANPFVLDDEGATLMHYAVQTASAPTIKLLLLYNADINAQDRDGWTPLHVAVQARRSDIVKLLLIKGADIEVKNKDGLTPLGLCLYLGREIRTYEVMKLLKEFPLSRHKKRLVTTDEDIE

SEQ ID NO: 20557 - DNA, 1187 bp, Arabidopsis thaliana
  misc_feature (1)..(1187): Ceres Seq. ID no. 12422485
agtggagaagaagactcgagtcatctgcagaaaagattcccgatcggattggatcatataagattttagggatttggaaaaaatcttgagctatggaggcgaatgcggcggtggacggaacggggaatccgatccctacgtcggcggttttaacagcttcggcgaagcatataggaatcaggtgtatgccggaaaacatggcgttcctgaaatgtaagaagaatgatcctaacccagagaaatgcctcgagaagggacgtgacgtcactcgctgtgttcttggcctgtacgtttcttctacttcattctcgtttcaatttctctacaagttcttaatttagctgatcttagtcatataacaatttttgggctctttctgttaaaacttgatgaagattgaggataatgtcacattgtagaattaggggtttgatcatatagtttaagaaatgaagaatctttagactttttttgatgtggattacagtgtatttttttaagaccatgaacatacactaagctaagttcatcgagttatgaacatttctagaacttgagtaatctttgtatattatggatcatgatcaaatatttggcctatttgaaagtaattcatggcacacttgtgtttgtaggagcctttatttccgtagattgaaaactgaacccaaaagccctatacaactagccatttgtttagtatctaggaagcagttgtttgactcttgtgtagttagtgatatagtgatggatatcttgagagttcactaactttgcggaggatgatgcattgtccataacaatctgaagttgagtagtttgcagttggtgacttagattgttcttaaaactggtgaaatgattgatattgcaggctgaaggatcttcaccagagatgcccaaaggagatggatgcttacgttggatgcatgtattactacaccaacgagtttgagttgtgtcggaaagagcaagaagcttttgagaaagtgtgtccgttgaaatgagaaagtcaagtttttatctgtctcctaataagcaaatgttcattttgactctggagcgttactctaatcactcttccatcgctgcctgcttcttttccttttctggtaatggaagacctttaaaccatgtaatattgtcgtgtttcctttgtccagttctcccgagggaaacgattttgg

SEQ ID NO: 20558 - protein, 82 aa, Arabidopsis thaliana
  peptide (1)..(82): Ceres Seq. ID no. 12422486
MEANAAVDGTGNPIPTSAVLTASAKHIGIRCMPENMAFLKCKKNDPNPEKCLEKGRDVTRCVLGLYVSSTSFSFQFLYKFLI

SEQ ID NO: 20559 - protein, 65 aa, Arabidopsis thaliana
  peptide (1)..(65): Ceres Seq. ID no. 12422487
MDHDQIFGLFESNSWHTCVCRSLYFRRLKTEPKSPIQLAICLVSRKQLFDSCVVSDIVMDILRVH

SEQ ID NO: 20560 - protein, 61 aa, Arabidopsis thaliana
  peptide (1)..(61): Ceres Seq. ID no. 12422488
MRKSSFYLSPNKQMFILTLERYSNHSSIAACFFSFSGNGRPLNHVILSCFLCPVLPRETIL

SEQ ID NO: 20561 - DNA, 1529 bp, Arabidopsis thaliana
  misc_feature (1)..(1529): Ceres Seq. ID no. 13646595
gataagatgacccgtctttactccaagctcgttcggagctaaccctcacctcctcagctttagccctaattttctgtccttcttcatcctcttccgccataatctttctcaccagagatgccacttcttcccttccgatgactctctccgacggtaactccgatgtacgaacggccacaccgatctcctcagtcaataacgtggcattcatccactgctccgcataaagaggccaagcgatgatcggaactcctttagtcaaactttccaaagccgaactccaaccgcagtgagacaagaacccaccgaacgatctatggctcaagatctcaacttgtggtgcccattgcgtaaccacaatccccacaccacgcgtgcggtccaagaaaccttcaggtagactggcacttacctgttcatcatcgctggagatcgccccgagatatgaagcgggcctacgtagaacccaaacgaacctttgaccacttaactctaaacccaaagcgagttccactgtttgctcaaacgtcaacgttccaccgctccctaaacacacaaacaccactgacctttcccgttgctcgtctagccactcgaatatactattgggtttgtctacatgctggttagtcctaacaattggcccaataggataaaccggtactttcatgacccggctcaattcttcgtcctctctaagcgcagcgagagtgtttccttgtaactcctcccaagtatttaccaaaacaccatcgctcataggtacatctaagccagctcgtacacactctttatattgctggcccgaccggtctaacatcgtttccatcagctccttcggtccgaccggtttacaacccggtatcttcaaaggctccttaatatcaacatactcaccttccactaccgtatctaacaccggcaagtacaccatgactgccaagaaccacgcatgagttggaacgtaaacgtatttagccgtcatgcctacgtcatcggctacggacatcagttccgtacccaaaaagtcaacaatcatgaccgttggttttcgtttcattaatttcacggcatctcgtaccgcgggcttcatggctcgcatcttcaccaccatcttagtgaaaattgtagcatctggctccacgaggttgtctacatccaccgagggaatttccgtaatttgacagattgttctagccgcggctgcatgtatggcttcggtttctgtcggtgaaggagccggaggtgaccgcgagaatggtgacgtggatgtttaggacggaggagagacggttgccgagctccaggatagggatgaggtgacccaagccagggctagccactagaagcgcgtgaggctggtccatgatcgatggtcgaccacttaattttctttttagttgctagtttctgtgtagcaaaatcattgtggattggatttcggtataggccatttaacaagtgatatttattatcaaaaaaaaaaaaaaaaaaaacagagagaactagtctcgagggggggcccggta

SEQ ID NO: 20562 - protein, 95 aa, Arabidopsis thaliana
  peptide (1)..(95): Ceres Seq. ID no. 13646596
MTRLNSSSSLSAARVFPCNSSQVFTKTPSLIGTSKPARTHSLYCWPDRSNIVSISSFGPTGLQPGIFKGSLISTYSPSTTVSNTGKYTMTAKNHA

SEQ ID NO: 20563 - protein, 66 aa, Arabidopsis thaliana
  peptide (1)..(66): Ceres Seq. ID no. 13646597
MPTSSATDISSVPKKSTIMTVGFRFINFTASRTAGFMARIFTTILVKIVASGSTRLSTSTEGISVI

SEQ ID NO: 20564 - protein, 61 aa, Arabidopsis thaliana
  peptide (1)..(61): Ceres Seq. ID no. 13646598
MKRAYVEPKRTFDHLTLNPKRVPLFAQTSTFHRSLNTQTPLTFPVARLATRIYYWVCLHAG

SEQ ID NO: 20565 - DNA, 1597 bp, Arabidopsis thaliana
  misc_feature (1)..(1597): Ceres Seq. ID no. 13646499
ggtagttggaattttccagtttttggtttgtttctgtatctgtggtttaaaaaagtggagaagaagctttttagtgcttttctatggcgaggattctccgaaacgtttattcacttagaagctctctgttttcgtcagagttacttagaagaagtgtggttggaacatcgtttcagctccgaggctttgctgccaaagctaaaaagaaatccaagtcagatggaaatggatcatctgaagaaggtatgtcgaaaaaggagattgctcttcagcaagcacttgatcagattaccagttcatttggcaaagggtccataatgtatctcggtcgtgctgtttctcctagaaatgtcccggttttctctaccggatcttttgcccttgatgtagctttgggagttggtggccttcctaaggggcgtgttgtggagatatatggtcctgaagcatcgggaaagacaacacttgctcttcatgttattgcagaagcacaaaaacaaggaggaacctgtgtctttgtagatgctgagcatgctcttgattcgtcacttgctaaggcaatcggtgtaaatacagaaaatctgcttctatcacagcctgattgtggcgaacaggcccttagtcttgtggatactttaatccgaagtggttcagttgatgttattgtagttgacagtgtggctgctcttgtacctaaaggagaacttgagggcgagatgggtgatgcacatatggctatgcaagccagattgatgagccaagctttgcgtaaattgagccattctttatcgttatcgcaaacacttctgatctttataaatcaggtgagatcaaaactatctacgtttggaggatttggaggtccaacagaagttacttgtggtggaaatgctttgaagttttatgcttctatgcgtttgaatatcaagcgaattggacttatcaagaaaggcgaagagacaacgggaagtcaagtctccgtgaagatagtgaagaacaaactcgctccgccgtttagaactgctcagtttgagcttgaattcggcaaaggaatctgcaagatcacggagataatcgacctgagcataaagcacaagttcatcgcgaaaaacggaacattctacaatctcaacggtaaaaactaccatggaaaagaggctttaaagagattccttaaacagaacgaatctgatcaagaagagctcatgaagaagctccaagacaagctcatcgccgatgaagctgcagataaggaaactgaatctgaatctgaggaagaagattccctgagagttgtggtttcacctgacaacacagatgatgaatcaccagctcttgttgttggagctgctgcagtggttgttgaggcagcatgattagcgacctccggtttagtataatattcttcctttggcctagagttttccggtttaacgcggtttggattcggtttccttctcctcatgtaatttatgtgctagttaaatcacatttacatataaccgttgttgtgggtgagaaaattttgtagtttttatggggaaatttaatgttaacgaaaagccagaatattttaatgttattgatcaattttact

SEQ ID NO: 20566 - protein, 430 aa, Arabidopsis thaliana
  peptide (1)..(430): Ceres Seq. ID no. 13646500
MARILRNVYSLRSSLFSSELLRRSVVGTSFQLRGFAAKAKKKSKSDGNGSSEEGMSKKEIALQQALDQITSSFGKGSIMYLGRAVSPRNVPVFSTGSFALDVALGVGGLPKGRVVEIYGPEASGKTTLALHVIAEAQKQGGTCVFVDAEHALDSSLAKAIGVNTENLLLSQPDCGEQALSLVDTLIRSGSVDVIVVDSVAALVPKGELEGEMGDAHMAMQARLMSQALRKLSHSLSLSQTLLIFINQVRSKLSTFGGFGGPTEVTCGGNALKFYASMRLNIKRIGLIKKGEETTGSQVSVKIVKNKLAPPFRTAQFELEFGKGICKITEIIDLSIKHKFIAKNGTFYNLNGKNYHGKEALKRFLKQNESDQEELMKKLQDKLIADEAADKETESESEEEDSLRVVVSPDNTDDESPALVVGAAAVVVEAA

SEQ ID NO: 20567 - protein, 376 aa, Arabidopsis thaliana
  peptide (1)..(376): Ceres Seq. ID no. 13646501
MSKKEIALQQALDQITSSFGKGSIMYLGRAVSPRNVPVFSTGSFALDVALGVGGLPKGRVVEIYGPEASGKTTLALHVIAEAQKQGGTCVFVDAEHALDSSLAKAIGVNTENLLLSQPDCGEQALSLVDTLIRSGSVDVIVVDSVAALVPKGELEGEMGDAHMAMQARLMSQALRKLSHSLSLSQTLLIFINQVRSKLSTFGGFGGPTEVTCGGNALKFYASMRLNIKRIGLIKKGEETTGSQVSVKIVKNKLAPPFRTAQFELEFGKGICKITEIIDLSIKHKFIAKNGTFYNLNGKNYHGKEALKRFLKQNESDQEELMKKLQDKLIADEAADKETESESEEEDSLRVVVSPDNTDDESPALVVGAAAVVVEAA

SEQ ID NO: 20568 - protein, 352 aa, Arabidopsis thaliana
  peptide (1)..(352): Ceres Seq. ID no. 13646502
MYLGRAVSPRNVPVFSTGSFALDVALGVGGLPKGRVVEIYGPEASGKTTLALHVIAEAQKQGGTCVFVDAEHALDSSLAKAIGVNTENLLLSQPDCGEQALSLVDTLIRSGSVDVIVVDSVAALVPKGELEGEMGDAHMAMQARLMSQALRKLSHSLSLSQTLLIFINQVRSKLSTFGGFGGPTEVTCGGNALKFYASMRLNIKRIGLIKKGEETTGSQVSVKIVKNKLAPPFRTAQFELEFGKGICKITEIIDLSIKHKFIAKNGTFYNLNGKNYHGKEALKRFLKQNESDQEELMKKLQDKLIADEAADKETESESEEEDSLRVVVSPDNTDDESPALVVGAAAVVVEAA

SEQ ID NO: 20569 - DNA, 1391 bp, Arabidopsis thaliana
  misc_feature (1)..(1391): Ceres Seq. ID no. 14302793
acgattttgcctttgagttcatgtagtttacttaacttttgacgcaacgctacttcggaaagatctaaggatgaaattgttcataaaataagatcatctccctccgcttttctcttgaagtctctagtgtcttgcgtttttgaaatggcgatggtgaaaaactcctatatattattcgctcgtttatgcgtagagctttttcaagagcttccccctcttccatcagatgaatctcacggcgaaattacaactgtagagagacagtttttgcgtaattgtcaaatggagcttgaaaacttgtccctcaaaacagagctaccacttgtttatgttgatgaatcaaaatattggagattcatcaaaactgttagggttttggctgaggtttttaacaatatgaagactactcgaacaacacggaaaagtatcattcaggtgcttatgaatcccatcttaccatctgagagaagcaccgatacaatgaatttatttctgtccaccattgaaaaactagctgacttgcagttttctgatgaagatttcaatcagctttttcttcatttacagttggagaataagtacaatgacaaagtcgaagtgaagcttaggaaagaagcagaagatgcacttgctagaaaaattaaggaagtagtagatttgacggaacggttacttcaagtcgaagccttggagcaaaaacataaagcaaagttgcagcttaggacagaaactgaaaccgcggtagccatagaacgtgattatatgcgttggaaggctgaaattttcgagagcgaattcaacaatcaattggtactcaggagagaatcagaaattgcacttgataaagaaaggaaagagctggagggtattaaaaatctgcttgaaacttgtttcacaggacaaaagaacctgaaatcgcaggtgataacatggaaagacaagtacgaccaagagtcaagtattaggaaagaaaaagaggttgctctttctactaagaaactagaactcgagattttcaaacagctagccggatcgtacaaacaagatgcagatgcgatgcgacaagagagagacaatgctctcaaaacagtacaagagatagtggacgagcaacaacctccaccatcatttatctgccctatcacacaggatgtcatgaaaaatccacacatggctgctgatggattcacatacgaattagaagctattcaaaaatggattaacacaggtcacaggacgtcgccgatgactaatctcaaactttcacatttcagctttttccctaaccgagctctccgctctgcaattgaggagttgggacgttgattcttcttgtttttcaaaccggtttactcaagttgatattgggccgataatggacccatgaaacg

SEQ ID NO: 20570 - protein, 393 aa, Arabidopsis thaliana
  peptide (1)..(393): Ceres Seq. ID no. 14302794
MAMVKNSYILFARLCVELFQELPPLPSDESHGEITTVERQFLRNCQMELENLSLKTELPLVYVDESKYWRFIKTVRVLAEVFNNMKTTRTTRKSIIQVLMNPILPSERSTDTMNLFLSTIEKLADLQFSDEDFNQLFLHLQLENKYNDKVEVKLRKEAEDALARKIKEVVDLTERLLQVEALEQKHKAKLQLRTETETAVAIERDYMRWKAEIFESEFNNQLVLRRESEIALDKERKELEGIKNLLETCFTGQKNLKSQVITWKDKYDQESSIRKEKEVALSTKKLELEIFKQLAGSYKQDADAMRQERDNALKTVQEIVDEQQPPPSFICPITQDVMKNPHMAADGFTYELEAIQKWINTGHRTSPMTNLKLSHFSFFPNRALRSAIEELGR

SEQ ID NO: 20571 - protein, 391 aa, Arabidopsis thaliana
  peptide (1)..(391): Ceres Seq. ID no. 14302795
MVKNSYILFARLCVELFQELPPLPSDESHGEITTVERQFLRNCQMELENLSLKTELPLVYVDESKYWRFIKTVRVLAEVFNNMKTTRTTRKSIIQVLMNPILPSERSTDTMNLFLSTIEKLADLQFSDEDFNQLFLHLQLENKYNDKVEVKLRKEAEDALARKIKEVVDLTERLLQVEALEQKHKAKLQLRTETETAVAIERDYMRWKAEIFESEFNNQLVLRRESEIALDKERKELEGIKNLLETCFTGQKNLKSQVITWKDKYDQESSIRKEKEVALSTKKLELEIFKQLAGSYKQDADAMRQERDNALKTVQEIVDEQQPPPSFICPITQDVMKNPHMAADGFTYELEAIQKWINTGHRTSPMTNLKLSHFSFFPNRALRSAIEELGR

SEQ ID NO: 20572 - protein, 347 aa, Arabidopsis thaliana
  peptide (1)..(347): Ceres Seq. ID no. 14302796
MELENLSLKTELPLVYVDESKYWRFIKTVRVLAEVFNNMKTTRTTRKSIIQVLMNPILPSERSTDTMNLFLSTIEKLADLQFSDEDFNQLFLHLQLENKYNDKVEVKLRKEAEDALARKIKEVVDLTERLLQVEALEQKHKAKLQLRTETETAVAIERDYMRWKAEIFESEFNNQLVLRRESEIALDKERKELEGIKNLLETCFTGQKNLKSQVITWKDKYDQESSIRKEKEVALSTKKLELEIFKQLAGSYKQDADAMRQERDNALKTVQEIVDEQQPPPSFICPITQDVMKNPHMAADGFTYELEAIQKWINTGHRTSPMTNLKLSHFSFFPNRALRSAIEELGR

SEQ ID NO: 20573 - DNA, 3060 bp, Arabidopsis thaliana
  misc_feature (1)..(3060): Ceres Seq. ID no. 13593379
  misc_feature (1)..(3060): Ortholog of  Ceres SEQ ID NO 13600595 as cited in SEQ ID NO 629
gagagagagagagctcactagtccccccccccccccccccacttcaatggcagagtcaattcgaactttttcgcttcaatggcggatactgtcactgatcatcgctttacttgtgtactttccgattgtgtcgggaaattactttaaaccgttcaatgtgagctacgaccaccgggctttaatcatcgccggcaagaggcgcatgcttgtctcagctggaattcactaccctcgagccactcctgagatgtggtctgatctcatcgcaaagagtaaagaaggtggagctgatgtgattcaaacttatgtgttttggaatgggcacgagcctgtaaagggtcagtataactttgaaggaagatatgaccttgtcaaatttgtgaagcttattggttcaagtggtctttatctccatctacgcataggtccttatgtttgtgctgagtggaactttggggggttcccagtgtggctgcgggatattcctggcattgagtttcgaacagataatgaaccttttaagaaagagatgcaaaagtttgtaacaaagattgtggatttgatgcgagaagcaaagctcttctgttggcaaggaggtcccataatcatgctgcagatcgagaatgaatatggggatgttgaaaaatcttacgggcagaagggaaaggattacgtcaaatgggcagctagcatggctctagggcttggtgctggagttccgtgggttatgtgcaaacaaacggacgctccagagaatattattgatgcatgcaatggatactattgtgatggttttaaaccaaattcgcggacgaagccaatactttggacagaggattgggatggatggtacacgaagtggggtggaagtttgcctcaccgacctgctgaagatcttgcatttgcagttgcacgattttatcagcgtggaggaagctttcaaaattattatatgtattttggtggaacaaactttggtcgaacttctggtggtcctttctatatcacaagctatgattatgatgctcctcttgatgaatatggtctgaggagcgagccaaaatgggggcatctaaaggatcttcatgctgccataaaactttgtgaacctgcccttgtcgcggcagatgcacctcagtatagaaaactgggatcaaatcaggaggcacatatttatcatggcgatggtgagactggaggaaaggtgtgcgctgcatttctcgcaaacattgatgagcataaatctgcacatgtgaagtttaatggccagtcatatactttaccaccttggtcagtgagtgtattgccagactgtcgacatgtggccttcaacactgccaaggtaggagcacaaacttctgttaaaacagtgaagtctgcaaggccatctttaggtagtatgtctatactgcaaaaagtcgtgaggcaagataatgtttcttatatctcaaaatcatggatggctctgaaagaacctattggcatatggggtgaaaacaatttcactttccaaggattattggagcatttgaatgttacaaaagaccggtctgattacctgtggcataagacaagaataagcgtatctgaagatgatatctcgttctggaagataaatggagctaacccaacagtgtcaattgatagcatgagggatgtgttgcgtgtgtttgttaacaaacaactctcaggcagtattgttggtcactgggtgaaggcagtgcagcctgtacgatttatacagggaaacaatgatttacttctgttgactcaaacagttggtttacagaattatggtgctttcttggagaaggatggagccggttttagaggcaaagctaagcttactggattcaagaatggagatttagacctgtcaaaatcgtcatggacgtatcaggtgggattgaagggcgaggctgataaaatatatactgttgaacacaatgaaaaagctgagtggagtactttggagaccgacgcttcaccttcgatctttatgtggtacaagacatactttgaccccccagccggaacagatcctgttgttcttgatctggaaagtatgggaaaggggcaagcttgggtcaatggacaccatattggaaggtattggaatatcatttcccaaaaggatggatgtgacagaacctgtgattatcgtggagcctacaattcagataagtgcacaacaaattgtggaaagcctacacaaaccaggtaccatataccgcgttcgtggttaaagccgtccagtaatctacttgtgctctttgaagagactgggggaaacccatttaagatatcggttaagacagttactgctgggattctgtgcggtcaagtcttggaatcgcattacccacctctgcggaaatggtccacaccagattacataaacggaacgactttgataaacagtgtggcaccagaagtgcatctgcattgtgaagatggscatgtcatatcctccatagaatttgctagctatgggactccaagaggtagctgcgacgggttttctatcgggaaatgtcatgcatccaactcattatcaatcgtctctgaggcttgtaaaggacgcaacagctgcttcatcgaggtgtcaaatactgcttttatcagtgacccatgtagcggaactctaaagactttaacggttatggcacgatgttccccgtctcaaaacatgagtgacctcagtttttagacaccgggaagcggctcagaacgatgaacagctgtttctctaaaaaacaagagaccattgatattgattaaagaagaacatgtcccatcacaagctttctgtgacctttatatttcaaagtctgaactctgaacaattgtgtttgctcttgttcattggtgtatccaaactctacttggaaccaattaacagactcaaaaccatctctaaggtttctgcttgtacagtatgttgtttgaaatttgaatataagaaaatagtcgaagttgatgttaaaaaaaaaaaaaaaaaaaaaaaaaaaaaaaaaaagaaaaaaaaaaaaaaaaaaaactcgagggggggcccggtac

SEQ ID NO: 20574 - protein, 902 aa, Arabidopsis thaliana
  peptide (1)..(902): Ceres Seq. ID no. 15221218
  misc_feature (819)..(819): Xaa is any aa, unknown or other
RERELTSPPPPPPTSMAESIRTFSLQWRILSLIIALLVYFPIVSGNYFKPFNVSYDHRALIIAGKRRMLVSAGIHYPRATPEMWSDLIAKSKEGGADVIQTYVFWNGHEPVKGQYNFEGRYDLVKFVKLIGSSGLYLHLRIGPYVCAEWNFGGFPVWLRDIPGIEFRTDNEPFKKEMQKFVTKIVDLMREAKLFCWQGGPIIMLQIENEYGDVEKSYGQKGKDYVKWAASMALGLGAGVPWVMCKQTDAPENIIDACNGYYCDGFKPNSRTKPILWTEDWDGWYTKWGGSLPHRPAEDLAFAVARFYQRGGSFQNYYMYFGGTNFGRTSGGPFYITSYDYDAPLDEYGLRSEPKWGHLKDLHAAIKLCEPALVAADAPQYRKLGSNQEAHIYHGDGETGGKVCAAFLANIDEHKSAHVKFNGQSYTLPPWSVSVLPDCRHVAFNTAKVGAQTSVKTVKSARPSLGSMSILQKVVRQDNVSYISKSWMALKEPIGIWGENNFTFQGLLEHLNVTKDRSDYLWHKTRISVSEDDISFWKINGANPTVSIDSMRDVLRVFVNKQLSGSIVGHWVKAVQPVRFIQGNNDLLLLTQTVGLQNYGAFLEKDGAGFRGKAKLTGFKNGDLDLSKSSWTYQVGLKGEADKIYTVEHNEKAEWSTLETDASPSIFMWYKTYFDPPAGTDPVVLDLESMGKGQAWVNGHHIGRYWNIISQKDGCDRTCDYRGAYNSDKCTTNCGKPTQTRYHIPRSWLKPSSNLLVLFEETGGNPFKISVKTVTAGILCGQVLESHYPPLRKWSTPDYINGTTLINSVAPEVHLHCEDXHVISSIEFASYGTPRGSCDGFSIGKCHASNSLSIVSEACKGRNSCFIEVSNTAFISDPCSGTLKTLTVMARCSPSQNMSDLSF

SEQ ID NO: 20575 - protein, 887 aa, Arabidopsis thaliana
  peptide (1)..(887): Ceres Seq. ID no. 15221219
  misc_feature (804)..(804): Xaa is any aa, unknown or other
MAESIRTFSLQWRILSLIIALLVYFPIVSGNYFKPFNVSYDHRALIIAGKRRMLVSAGIHYPRATPEMWSDLIAKSKEGGADVIQTYVFWNGHEPVKGQYNFEGRYDLVKFVKLIGSSGLYLHLRIGPYVCAEWNFGGFPVWLRDIPGIEFRTDNEPFKKEMQKFVTKIVDLMREAKLFCWQGGPIIMLQIENEYGDVEKSYGQKGKDYVKWAASMALGLGAGVPWVMCKQTDAPENIIDACNGYYCDGFKPNSRTKPILWTEDWDGWYTKWGGSLPHRPAEDLAFAVARFYQRGGSFQNYYMYFGGTNFGRTSGGPFYITSYDYDAPLDEYGLRSEPKWGHLKDLHAAIKLCEPALVAADAPQYRKLGSNQEAHIYHGDGETGGKVCAAFLANIDEHKSAHVKFNGQSYTLPPWSVSVLPDCRHVAFNTAKVGAQTSVKTVKSARPSLGSMSILQKVVRQDNVSYISKSWMALKEPIGIWGENNFTFQGLLEHLNVTKDRSDYLWHKTRISVSEDDISFWKINGANPTVSIDSMRDVLRVFVNKQLSGSIVGHWVKAVQPVRFIQGNNDLLLLTQTVGLQNYGAFLEKDGAGFRGKAKLTGFKNGDLDLSKSSWTYQVGLKGEADKIYTVEHNEKAEWSTLETDASPSIFMWYKTYFDPPAGTDPVVLDLESMGKGQAWVNGHHIGRYWNIISQKDGCDRTCDYRGAYNSDKCTTNCGKPTQTRYHIPRSWLKPSSNLLVLFEETGGNPFKISVKTVTAGILCGQVLESHYPPLRKWSTPDYINGTTLINSVAPEVHLHCEDXHVISSIEFASYGTPRGSCDGFSIGKCHASNSLSIVSEACKGRNSCFIEVSNTAFISDPCSGTLKTLTVMARCSPSQNMSDLSF

SEQ ID NO: 20576 - protein, 835 aa, Arabidopsis thaliana
  peptide (1)..(835): Ceres Seq. ID no. 15221220
  misc_feature (752)..(752): Xaa is any aa, unknown or other
MLVSAGIHYPRATPEMWSDLIAKSKEGGADVIQTYVFWNGHEPVKGQYNFEGRYDLVKFVKLIGSSGLYLHLRIGPYVCAEWNFGGFPVWLRDIPGIEFRTDNEPFKKEMQKFVTKIVDLMREAKLFCWQGGPIIMLQIENEYGDVEKSYGQKGKDYVKWAASMALGLGAGVPWVMCKQTDAPENIIDACNGYYCDGFKPNSRTKPILWTEDWDGWYTKWGGSLPHRPAEDLAFAVARFYQRGGSFQNYYMYFGGTNFGRTSGGPFYITSYDYDAPLDEYGLRSEPKWGHLKDLHAAIKLCEPALVAADAPQYRKLGSNQEAHIYHGDGETGGKVCAAFLANIDEHKSAHVKFNGQSYTLPPWSVSVLPDCRHVAFNTAKVGAQTSVKTVKSARPSLGSMSILQKVVRQDNVSYISKSWMALKEPIGIWGENNFTFQGLLEHLNVTKDRSDYLWHKTRISVSEDDISFWKINGANPTVSIDSMRDVLRVFVNKQLSGSIVGHWVKAVQPVRFIQGNNDLLLLTQTVGLQNYGAFLEKDGAGFRGKAKLTGFKNGDLDLSKSSWTYQVGLKGEADKIYTVEHNEKAEWSTLETDASPSIFMWYKTYFDPPAGTDPVVLDLESMGKGQAWVNGHHIGRYWNIISQKDGCDRTCDYRGAYNSDKCTTNCGKPTQTRYHIPRSWLKPSSNLLVLFEETGGNPFKISVKTVTAGILCGQVLESHYPPLRKWSTPDYINGTTLINSVAPEVHLHCEDXHVISSIEFASYGTPRGSCDGFSIGKCHASNSLSIVSEACKGRNSCFIEVSNTAFISDPCSGTLKTLTVMARCSPSQNMSDLSF

SEQ ID NO: 20577 - DNA, 684 bp, Arabidopsis thaliana
  misc_feature (1)..(684): Ceres Seq. ID no. 13646615
ttgttcgagatgatccgagtacataaagcccgtcctgagcgacatgaccctcctcttcagcgtcaattgcgcaagttgtcccggtattgatcgactcagccattctcgacaagatgaagttcaccaacagcatcacacattccgctcttggactggtaaccattctaccaggcctcgctgttgcccagaactctggaaagttcaacgtcctcacttacaacgttgccggtctgccggcattcctcaacaacaacgaagttccaggagataaggcgacaaactcgcgactcattggagctgcgttgggcagagagggtcacgatattgttcatgtccaagaggacttcaactatcatgcctacatctacgagaccgacactcatcctgtcaggactcccacttctggaggagttcccttcggtgatggcctgaacacgctggccaactacgactatacgaccttcacccgcacgaagtggaacaagtgctctctcaactcaggtgactgcctgacgcccaagggcttcaccttcatgcgcatgcctaccatcggcttcgagcttcacctgtacaacctacacgcggacgctgggtaggttcatcgacaagcgtgtactggttcttcgactaatgaccatcttagctcgaacagcgacgatgtcgcagcgcgatctgcaggtatcg

SEQ ID NO: 20578 - protein, 160 aa, Arabidopsis thaliana
  peptide (1)..(160): Ceres Seq. ID no. 13646616
MKFTNSITHSALGLVTILPGLAVAQNSGKFNVLTYNVAGLPAFLNNNEVPGDKATNSRLIGAALGREGHDIVHVQEDFNYHAYIYETDTHPVRTPTSGGVPFGDGLNTLANYDYTTFTRTKWNKCSLNSGDCLTPKGFTFMRMPTIGFELHLYNLHADAG

SEQ ID NO: 20579 - DNA, 2280 bp, Arabidopsis thaliana
  misc_feature (1)..(2280): Ceres Seq. ID no. 13646415
ccccgaatccgattcttagtcaattttttgaattcgtcaatcatattcttcttcttcttcttcctctgattcccccagaaaaaccctagcttcctccctcatttccccccaaatctcacgacttatttatgctcgggggagactaatcaaaggtcaaaatccattagggagggaatcgaatctcgatcgatctcaatttcttctgagaaaagaaaaaatgtcatcggagattgaggtggtggaagaaatccaatcgaatcccaaggagaatggggaatcgagttctaaagggattgaagaagagagcttgaagaacgatgtctatactgctgccgcttatggtgatttggagaagcttcatagattggttgagtgtgagggttcctctgtttccgagcctgatgctcttggctactatgctcttcagtggtctgccttgaacaaccgcgtcgccgttgcccagtaccttatcgagcatggtggagatgtaaacgcgacggatcatactggacagactgcattgcattggagtgctgttcgtggtgcgatacaagttgcagaactgttactacaagagggtgcaagagtagatgcaacggatatgtatggctatcaggcaacacatgttgccgcacagtatggccagactgcttttctttgtcacgttgtctcaaagtggaatgctgatcctgacgtgcctgataatgatggaagaagccccttgcattgggctgcatataaaggttttgcagattccattcgcctacttttatttctagatgcatatagaggacgacaagacaaagaaggttgcactcctctgcattgggctgccatccgaggtaatttggaggcttgcactgtcttggtgcaggctggaaagaaagaggatttgatgattactgacaagactgggctaacccctgcgcaacttgctgctgaaaagaatcacagacaagtttcctttttccttggtaatgctagaagcctgcttgaaaagcgttgcgacggaagcagtccccttggaagattgtcaaagttgggactcgctccagttctttggatcatgatcctgctgcttctgctcgtatatacaaattcggttgttttggcatccaatctgccaaagttaacgactgggattggtgcgcttgcatggctgggattcattcttgcaactgcaggattatttttgttttaccgctgtagcaggaaggatccaggttacatcagaatgaatatccatgatccgcaaaccatgaaagatgatgaaccacttttaaaaatagagctaaacaatcctgctttgcttgctgggaattggacacagctctgtgcaacatgcaagattatcagacctcttcgagctaagcactgttccacctgtgatcgttgtgtagagcaatttgatcaccattgtccatgggtatcaaattgtgttggaaaaaaaaacaagtgggaattttttctttttcttcttcttgaaghtctagcgatgctgataactggtggcgtcactcttgcaagaatcttgagtgacccttcagctccatcatcttttggagcatggatgagtcatgtcgctagtaatcatgtgggtgctttatcctttctgctagtggaattctgcctcttcttttctgtcgccgtcttaacagtcatacaagcgtctcagatatcaaggaacataaccacaaatgaaatggccaacgccctgcggtacagctacctaagaggtccaggtggtcggtttaggaatccttatgatctcgggtgcagaagaaactgctcggatttcttagtaaaaggttataacgaagatattgagtgtcatgaagaagacgcaacacagagaccagagggtattagcatgatgcagatgcagcggaatccaaatcttcaaaatggcaatggccatgttgctatcgatgttaacccgacacataattcacagtcagcacatgttcattctgccaactgcagccatagccataatagtaagtcaaagagtgacaatgttcctttgggtttgggacttggtcttagtcgcaacccaacccgacctgttgtatcgccataatatggcccgtgtcccaaatgtgcatttgtgttgtaagaaacacgtgttttctctcctcgagtcattgattacatcattatccgtttcatgtgaagatagtaatactcccttgttttcaattttctatgcaaaaattaaatgtcatgtttcttatcaaaaaaaaaaaaaaaaaaaactcgagggggggcccggtacccaat

SEQ ID NO: 20580 - protein, 620 aa, Arabidopsis thaliana
  peptide (1)..(620): Ceres Seq. ID no. 15219051
  misc_feature (424)..(424): Xaa is any aa, unknown or other
MSSEIEVVEEIQSNPKENGESSSKGIEEESLKNDVYTAAAYGDLEKLHRLVECEGSSVSEPDALGYYALQWSALNNRVAVAQYLIEHGGDVNATDHTGQTALHWSAVRGAIQVAELLLQEGARVDATDMYGYQATHVAAQYGQTAFLCHVVSKWNADPDVPDNDGRSPLHWAAYKGFADSIRLLLFLDAYRGRQDKEGCTPLHWAAIRGNLEACTVLVQAGKKEDLMITDKTGLTPAQLAAEKNHRQVSFFLGNARSLLEKRCDGSSPLGRLSKLGLAPVLWIMILLLLLVYTNSVVLASNLPKLTTGIGALAWLGFILATAGLFLFYRCSRKDPGYIRMNIHDPQTMKDDEPLLKIELNNPALLAGNWTQLCATCKIIRPLRAKHCSTCDRCVEQFDHHCPWVSNCVGKKNKWEFFLFLLLEXLAMLITGGVTLARILSDPSAPSSFGAWMSHVASNHVGALSFLLVEFCLFFSVAVLTVIQASQISRNITTNEMANALRYSYLRGPGGRFRNPYDLGCRRNCSDFLVKGYNEDIECHEEDATQRPEGISMMQMQRNPNLQNGNGHVAIDVNPTHNSQSAHVHSANCSHSHNSKSKSDNVPLGLGLGLSRNPTRPVVSP

SEQ ID NO: 20581 - protein, 492 aa, Arabidopsis thaliana
  peptide (1)..(492): Ceres Seq. ID no. 15219052
  misc_feature (296)..(296): Xaa is any aa, unknown or other
MYGYQATHVAAQYGQTAFLCHVVSKWNADPDVPDNDGRSPLHWAAYKGFADSIRLLLFLDAYRGRQDKEGCTPLHWAAIRGNLEACTVLVQAGKKEDLMITDKTGLTPAQLAAEKNHRQVSFFLGNARSLLEKRCDGSSPLGRLSKLGLAPVLWIMILLLLLVYTNSVVLASNLPKLTTGIGALAWLGFILATAGLFLFYRCSRKDPGYIRMNIHDPQTMKDDEPLLKIELNNPALLAGNWTQLCATCKIIRPLRAKHCSTCDRCVEQFDHHCPWVSNCVGKKNKWEFFLFLLLEXLAMLITGGVTLARILSDPSAPSSFGAWMSHVASNHVGALSFLLVEFCLFFSVAVLTVIQASQISRNITTNEMANALRYSYLRGPGGRFRNPYDLGCRRNCSDFLVKGYNEDIECHEEDATQRPEGISMMQMQRNPNLQNGNGHVAIDVNPTHNSQSAHVHSANCSHSHNSKSKSDNVPLGLGLGLSRNPTRPVVSP

SEQ ID NO: 20582 - protein, 394 aa, Arabidopsis thaliana
  peptide (1)..(394): Ceres Seq. ID no. 15219053
  misc_feature (198)..(198): Xaa is any aa, unknown or other
MITDKTGLTPAQLAAEKNHRQVSFFLGNARSLLEKRCDGSSPLGRLSKLGLAPVLWIMILLLLLVYTNSVVLASNLPKLTTGIGALAWLGFILATAGLFLFYRCSRKDPGYIRMNIHDPQTMKDDEPLLKIELNNPALLAGNWTQLCATCKIIRPLRAKHCSTCDRCVEQFDHHCPWVSNCVGKKNKWEFFLFLLLEXLAMLITGGVTLARILSDPSAPSSFGAWMSHVASNHVGALSFLLVEFCLFFSVAVLTVIQASQISRNITTNEMANALRYSYLRGPGGRFRNPYDLGCRRNCSDFLVKGYNEDIECHEEDATQRPEGISMMQMQRNPNLQNGNGHVAIDVNPTHNSQSAHVHSANCSHSHNSKSKSDNVPLGLGLGLSRNPTRPVVSP

SEQ ID NO: 20583 - DNA, 2085 bp, Arabidopsis thaliana
  misc_feature (1)..(2085): Ceres Seq. ID no. 14309934
ttctcctgttctaactgaggggtcgaggacaaagctcctcattgagttctccttcagtggggtttgatgcgaggtgctgccaaggtcatttcctcttgctgtgctccgcctctcgttcagataaagcggtcgggataagtttgtaaattgcttgtcaaatcaggacaagattctgaattaggggaacctaccgcatagtttgctcatcagacaggccgaaggacaatgtcatcgcctaacaattctgtcagcgcggcactgtcagaaacgacccccgtgtttcagttgagagtatggcaactgattgccattgctgtcgggatagtcatggcgatcctgctcgtcattgcgctttgcctttcgctccagaggaaaaagaagacagtgaaagggtttgacaacagttcgctggctgagatccctatcgtttctaaggaaatcaatgttgacagagttggtgctcagagtctacatgacagtgaagcgcccttcatgccagtgcgggataagtatacgcagaccaaaggtgcagggcagttgggagagagtagatccgtcgacgccgataccttcagccagttcagctcagtgtacaacgtagagaaggctgggagctcatactctgaagattacagtcacagcagctctggtccagctaggaaaggtagctcaccatatgcatattcagcatcaccgctggttggcctgcctgagttatcacatctaggctggggccactggtttaccttgagggacctggagtgtgcaacgaatcggtttgcaaagagtaatgttcttggggagggtggctatggagttgtctacaagggtcgtctggtaaatgggaccgagattgccgtgaagaagatccttaataatctggggcaggcagagaaggaatttagagttgaagttgaagccatcggccatgttcggcataagaatctggtccgccttctgggatactgcgtggaagggatacataggatgcttgtctatgaatatgtcaataatggcaacctagaacaatggcttcatggcatgaatcaacacggtgtccttagttgggaaaatcgtatgaaaattctccttggcactgcaaaagctctcgcgtaccttcatgaggccatagatcccaaagttgtacacagagatatcaagtcaagtaatatcttaattgacgatgaattcaacagcaaggtttctgattttgggttggctaaacttctgaattctgacaaaagtcatatcaatacaagagtgatgggaacatatgggtatgtagcacctgaatatgcaaacagtgggatgctaaatgaaaagagtgatatttacagtttcggagtggtgctgttagaatgtgcgaccgctagggatccagtcgattactctaagcctgcagatgaggtgaatctcatagagtggcttaaaatgatggtcaccagtaagagggcagaggaggtagtggatccaaacctcaatgttaagccaccaaaacgtgccctcaagcggacaatcctggttggtttcaagtgtgtcgatcctgacgctgacaagaggccaaagatgagtcacgttgtccagatgcttgaagcagttcagaatgcatatcatgaagatcaaagcaagctcagccaggtgggatcacagcagtcgctagaggagacctcaaacagcgctgatgcctgaacctcctattctgaacaagcacatcaaataggaccctgaatcatctgatagcaacattgatttgatcattgctcggcacttaatagagtgagcggtgatcggatttacagtttgggtttgcatatactggaggtggtggttaaatcaattagtagcaagttgtttctaaaaggttcatgtcttttacccttaggatatgtatagttttcctgtaggggagcatagaagcaccttcatctttatttgttgttcgagttacaaggagggactaacctcaggcatataactacagtcactggatttcgttacccatgtgtagtgactttttggaaagtcgttattaccctagagatatgaaaacatgaatttctgcaatgaagtactaccccgttctcg

SEQ ID NO: 20584 - protein, 487 aa, Arabidopsis thaliana
  peptide (1)..(487): Ceres Seq. ID no. 14309935
MSSPNNSVSAALSETTPVFQLRVWQLIAIAVGIVMAILLVIALCLSLQRKKKTVKGFDNSSLAEIPIVSKEINVDRVGAQSLHDSEAPFMPVRDKYTQTKGAGQLGESRSVDADTFSQFSSVYNVEKAGSSYSEDYSHSSSGPARKGSSPYAYSASPLVGLPELSHLGWGHWFTLRDLECATNRFAKSNVLGEGGYGVVYKGRLVNGTEIAVKKILNNLGQAEKEFRVEVEAIGHVRHKNLVRLLGYCVEGIHRMLVYEYVNNGNLEQWLHGMNQHGVLSWENRMKILLGTAKALAYLHEAIDPKVVHRDIKSSNILIDDEFNSKVSDFGLAKLLNSDKSHINTRVMGTYGYVAPEYANSGMLNEKSDIYSFGVVLLECATARDPVDYSKPADEVNLIEWLKMMVTSKRAEEVVDPNLNVKPPKRALKRTILVGFKCVDPDADKRPKMSHVVQMLEAVQNAYHEDQSKLSQVGSQQSLEETSNSADA

SEQ ID NO: 20585 - protein, 453 aa, Arabidopsis thaliana
  peptide (1)..(453): Ceres Seq. ID no. 14309936
MAILLVIALCLSLQRKKKTVKGFDNSSLAEIPIVSKEINVDRVGAQSLHDSEAPFMPVRDKYTQTKGAGQLGESRSVDADTFSQFSSVYNVEKAGSSYSEDYSHSSSGPARKGSSPYAYSASPLVGLPELSHLGWGHWFTLRDLECATNRFAKSNVLGEGGYGVVYKGRLVNGTEIAVKKILNNLGQAEKEFRVEVEAIGHVRHKNLVRLLGYCVEGIHRMLVYEYVNNGNLEQWLHGMNQHGVLSWENRMKILLGTAKALAYLHEAIDPKVVHRDIKSSNILIDDEFNSKVSDFGLAKLLNSDKSHINTRVMGTYGYVAPEYANSGMLNEKSDIYSFGVVLLECATARDPVDYSKPADEVNLIEWLKMMVTSKRAEEVVDPNLNVKPPKRALKRTILVGFKCVDPDADKRPKMSHVVQMLEAVQNAYHEDQSKLSQVGSQQSLEETSNSADA

SEQ ID NO: 20586 - protein, 398 aa, Arabidopsis thaliana
  peptide (1)..(398): Ceres Seq. ID no. 14309937
MPVRDKYTQTKGAGQLGESRSVDADTFSQFSSVYNVEKAGSSYSEDYSHSSSGPARKGSSPYAYSASPLVGLPELSHLGWGHWFTLRDLECATNRFAKSNVLGEGGYGVVYKGRLVNGTEIAVKKILNNLGQAEKEFRVEVEAIGHVRHKNLVRLLGYCVEGIHRMLVYEYVNNGNLEQWLHGMNQHGVLSWENRMKILLGTAKALAYLHEAIDPKVVHRDIKSSNILIDDEFNSKVSDFGLAKLLNSDKSHINTRVMGTYGYVAPEYANSGMLNEKSDIYSFGVVLLECATARDPVDYSKPADEVNLIEWLKMMVTSKRAEEVVDPNLNVKPPKRALKRTILVGFKCVDPDADKRPKMSHVVQMLEAVQNAYHEDQSKLSQVGSQQSLEETSNSADA

SEQ ID NO: 20587 - DNA, 3300 bp, Arabidopsis thaliana
  misc_feature (1)..(3300): Ceres Seq. ID no. 15168977
attcccagtcatctccactctccagcagtcctcacgttccttctctctctcccccccgctttaggtttgcctgtgttgggtagagtcgtatagcgaggagaagaggcttggtgccaagaaactggcatttcgatttggggagtggctaaattcgtcgctgtggaatcatggttctggagtcgtacacaaatctgctagatatgtgttgtgaagatgtgtttgacttccaacaacctttaagatctcttcgtcatgtggtgaactctcctggcatcatatctgaccctgattgggaaagtagtaatgatggcaactcagttggttctatgcctttttgttttaagagaaagattattgttgcaaatttccttcctgtgatctgtgcaaaaaatgaagctaccggagaatggtcctttgccatggatgataatcaactgcttgttcaactcaaagatggttttccaattgataatgaagttatttatgtgggtagtttgaatgttcaagttgatcctattgagcaagatcgagtttctcagaagctcttcaaggaacacagatgcgtacctacctttctcccagctgaactccagcatcaattctatcacatattctgcaaacagcacttatggccacttttccattatatgcttcctgtttgtcatgacaaagatgagctctttgaccgttcactttttcaagcctacgtgcgggccaacaaaatttttgctggcaaaattgtggaggcagtcaattcggatgatgattgtgtgtgggttcatgattatcacctcatgcttatcccaacccttttaagaaagaaactgcaccggatcaaagttggtttcttcctccacagcccatttccctcgtctgagatctataggacactgccagtgcgggatgaaattctaaaatcacttcttaatgctgacctcattggctttcaaacttttgactatgcccgccacttcctttcatgttgcagcaggcttttaggccttaattatgagtccaaacgtggccacataggtatagagtacttcggccgaacagtgagcctcaagattcttgctgcaggtgtacatgttggccggcttgaggctacattgaagttgcctgctacaattaaaaaggttcaagaaattgagagtagatatagtggcaagttggtaatattaggtgtagatgacatggacatctttaaaggtatcagtctaaaactgcttggcttggagcttcttctggaaagaacacctaagcttcgaggcaaggttgtccttgtacagattgttaatcctgcaagaagcatcggaaaagacattgaggaagcgaaatatgaagctgtatctgtagctcaaaggataaatgataaatatggttctgctaattacaagcctgttgtcctcattgactactcaatacctttctatgaaaagattgcattttatgctgcatctgactgctgtattgtaaatgctgtgagggatggcatgaatttgataccgtatgagtacaccgtatgcaggcagggcaatgaggagcttgataagctcagaggtcttaataagagctcatctcacacaagcacacttattgtgtctgaatttgtgggttgctctccatcacttagtggagcattcagggtaaatccttggagtatggaagatgtggctgatgcattatatagtgtaacagacctgacacgatatgagaagaatctgcgccatgaaaagcactatcgctatgtcaggtctcatgatgttgcttactgggcacgcagctttgaccaggatctggataaagcatgcatagagcaatacagccaaagatgttggacaactgggtttggtttaaattttagagttattgccctttcacctgggtttagaagactgtctctagaacacctagcctcgtcttataagaaggctaacaggaggatgatattcctggactacgatgggacccttgtgccgcagacatcacacgacaaatctccaagcgctgaacttatctctacccttaacagcttgtgcagtgatatgaagaacacagtatttatagtcagcgggcgaggaagagattccctaagcgagtggtttgcttcatgcgagaacctcggtatcgctgccgaacatggttactttatcagatggaacaaagcagctgaatgggagacaagcttctcaggtatttattctgaatggaagctcatcgcggaccctatcatgcatgtatacgtggaaacaactgatgggtccttcatagagccaaaagagagcgctttggtatggcactatcagaacacggatcatgactttggctcgtgccaggcaaaggagctagtgagccatcttgagcgagtcctatcgaacgaacctgttgtcgtgaggcgtggccatcagatcgtagaagttaaacctcagggagttagcaaggggatttccgtggacaagatcatccggaccttggtcagcaaaggggaagtaccagaccttttgatgtgcatcggaaacgatcggtcggacgaggacatgttcgagagcatcaacagagccacctccatttccgagcttcctgccgctccagaagtattcgcctgttccgttggccccaaggacagcaaggcaaactactacgtcgatggctgcgacgaagtaatcagactgctgaagggtgtcacagccgtttcgctccaaaaggatactgccggacatagccatgcggccttcgaggatacgcttgaggttgtcagctgatccacacaagtagtcagtcagctcaaactagctacgtccagtgtgttcaacgtgccaatctcaaatctccactgcatgcaagctactcatcactccaaaccatatgtgccaagtggaactctaaattggacggggacaagtatcgccattgctgacacagagagaacagcggtcacaaactgcaagttcgagcgaatggcgtcgcggttgatgattcactgacgacaacggaaatcacaaaccgcaagttttcaattcgtaggctaagacaactagtgggacgccatacattttgtaggcggctgatctggtggtgaaagggtggatgtccctgctagagccccagcttacggcatctgggagagccttggaagttggaccccgacgcttgtgctgcactgaggactgttacactattttctttgtacagaacaaacaggtgtggttaggcgattagcgctgtgacgattgattgtaattcacccacgtaccattgaggaaattaatggctgcgatggtgaagcgccgtgcgaatggc

SEQ ID NO: 20588 - protein, 864 aa, Arabidopsis thaliana
  peptide (1)..(864): Ceres Seq. ID no. 15168978
MVLESYTNLLDMCCEDVFDFQQPLRSLRHVVNSPGIISDPDWESSNDGNSVGSMPFCFKRKIIVANFLPVICAKNEATGEWSFAMDDNQLLVQLKDGFPIDNEVIYVGSLNVQVDPIEQDRVSQKLFKEHRCVPTFLPAELQHQFYHIFCKQHLWPLFHYMLPVCHDKDELFDRSLFQAYVRANKIFAGKIVEAVNSDDDCVWVHDYHLMLIPTLLRKKLHRIKVGFFLHSPFPSSEIYRTLPVRDEILKSLLNADLIGFQTFDYARHFLSCCSRLLGLNYESKRGHIGIEYFGRTVSLKILAAGVHVGRLEATLKLPATIKKVQEIESRYSGKLVILGVDDMDIFKGISLKLLGLELLLERTPKLRGKVVLVQIVNPARSIGKDIEEAKYEAVSVAQRINDKYGSANYKPVVLIDYSIPFYEKIAFYAASDCCIVNAVRDGMNLIPYEYTVCRQGNEELDKLRGLNKSSSHTSTLIVSEFVGCSPSLSGAFRVNPWSMEDVADALYSVTDLTRYEKNLRHEKHYRYVRSHDVAYWARSFDQDLDKACIEQYSQRCWTTGFGLNFRVIALSPGFRRLSLEHLASSYKKANRRMIFLDYDGTLVPQTSHDKSPSAELISTLNSLCSDMKNTVFIVSGRGRDSLSEWFASCENLGIAAEHGYFIRWNKAAEWETSFSGIYSEWKLIADPIMHVYVETTDGSFIEPKESALVWHYQNTDHDFGSCQAKELVSHLERVLSNEPVVVRRGHQIVEVKPQGVSKGISVDKIIRTLVSKGEVPDLLMCIGNDRSDEDMFESINRATSISELPAAPEVFACSVGPKDSKANYYVDGCDEVIRLLKGVTAVSLQKDTAGHSHAAFEDTLEVVS

SEQ ID NO: 20589 - protein, 853 aa, Arabidopsis thaliana
  peptide (1)..(853): Ceres Seq. ID no. 15168979
MCCEDVFDFQQPLRSLRHVVNSPGIISDPDWESSNDGNSVGSMPFCFKRKIIVANFLPVICAKNEATGEWSFAMDDNQLLVQLKDGFPIDNEVIYVGSLNVQVDPIEQDRVSQKLFKEHRCVPTFLPAELQHQFYHIFCKQHLWPLFHYMLPVCHDKDELFDRSLFQAYVRANKIFAGKIVEAVNSDDDCVWVHDYHLMLIPTLLRKKLHRIKVGFFLHSPFPSSEIYRTLPVRDEILKSLLNADLIGFQTFDYARHFLSCCSRLLGLNYESKRGHIGIEYFGRTVSLKILAAGVHVGRLEATLKLPATIKKVQEIESRYSGKLVILGVDDMDIFKGISLKLLGLELLLERTPKLRGKVVLVQIVNPARSIGKDIEEAKYEAVSVAQRINDKYGSANYKPVVLIDYSIPFYEKIAFYAASDCCIVNAVRDGMNLIPYEYTVCRQGNEELDKLRGLNKSSSHTSTLIVSEFVGCSPSLSGAFRVNPWSMEDVADALYSVTDLTRYEKNLRHEKHYRYVRSHDVAYWARSFDQDLDKACIEQYSQRCWTTGFGLNFRVIALSPGFRRLSLEHLASSYKKANRRMIFLDYDGTLVPQTSHDKSPSAELISTLNSLCSDMKNTVFIVSGRGRDSLSEWFASCENLGIAAEHGYFIRWNKAAEWETSFSGIYSEWKLIADPIMHVYVETTDGSFIEPKESALVWHYQNTDHDFGSCQAKELVSHLERVLSNEPVVVRRGHQIVEVKPQGVSKGISVDKIIRTLVSKGEVPDLLMCIGNDRSDEDMFESINRATSISELPAAPEVFACSVGPKDSKANYYVDGCDEVIRLLKGVTAVSLQKDTAGHSHAAFEDTLEVVS

SEQ ID NO: 20590 - protein, 811 aa, Arabidopsis thaliana
  peptide (1)..(811): Ceres Seq. ID no. 15168980
MPFCFKRKIIVANFLPVICAKNEATGEWSFAMDDNQLLVQLKDGFPIDNEVIYVGSLNVQVDPIEQDRVSQKLFKEHRCVPTFLPAELQHQFYHIFCKQHLWPLFHYMLPVCHDKDELFDRSLFQAYVRANKIFAGKIVEAVNSDDDCVWVHDYHLMLIPTLLRKKLHRIKVGFFLHSPFPSSEIYRTLPVRDEILKSLLNADLIGFQTFDYARHFLSCCSRLLGLNYESKRGHIGIEYFGRTVSLKILAAGVHVGRLEATLKLPATIKKVQEIESRYSGKLVILGVDDMDIFKGISLKLLGLELLLERTPKLRGKVVLVQIVNPARSIGKDIEEAKYEAVSVAQRINDKYGSANYKPVVLIDYSIPFYEKIAFYAASDCCIVNAVRDGMNLIPYEYTVCRQGNEELDKLRGLNKSSSHTSTLIVSEFVGCSPSLSGAFRVNPWSMEDVADALYSVTDLTRYEKNLRHEKHYRYVRSHDVAYWARSFDQDLDKACIEQYSQRCWTTGFGLNFRVIALSPGFRRLSLEHLASSYKKANRRMIFLDYDGTLVPQTSHDKSPSAELISTLNSLCSDMKNTVFIVSGRGRDSLSEWFASCENLGIAAEHGYFIRWNKAAEWETSFSGIYSEWKLIADPIMHVYVETTDGSFIEPKESALVWHYQNTDHDFGSCQAKELVSHLERVLSNEPVVVRRGHQIVEVKPQGVSKGISVDKIIRTLVSKGEVPDLLMCIGNDRSDEDMFESINRATSISELPAAPEVFACSVGPKDSKANYYVDGCDEVIRLLKGVTAVSLQKDTAGHSHAAFEDTLEVVS

SEQ ID NO: 20591 - DNA, 2573 bp, Arabidopsis thaliana
  misc_feature (1)..(2573): Ceres Seq. ID no. 14310097
tttctggttacagacagatacattccctctgagaaccaagaaaacaaaataataataaaaaaccctaattccccgctccacttctctctctcacgctctctctgtgattttagtatggaagcaacggcggaggaatcagttagtactcttgttacgacgatggttgatgagacgtatgagttcttagcgcctcgatggtttgatttcgttaatggagagactgaagatgagtctcgccgagcagaactctggtttcaatcggccttaagctgcgctccttctccttcggttcctagaatcaaagcaaggagatcgttcaaggtagaggccatgtgcaacttcaatgaagatgaagaagagacgctcaaggataaagagccgttagaaccagtagttccaattgtttctttacaatcgcagccttctcaggccaagaaagcagaagttgctccttctaaagcaagcactgttaagccgtctcgcatcagttccaaggacgcagaggtcaacaacaagaccgtagatgccagcgatccgacgactgagccaatagaagacaaggagaacattgctcctgcttgcacacccaaaccaccaatgcagttttctctaggggcaaagtcggtggatcttaagaagcagcaaactgctagaaagatagctagtctgctgaagaatccatctacactaaggcctaaaaaccagtctcaagccaaaggcagtcatcagaaaagtgtgaaaggggaaacgaatcttaacaacatagctagcactaccaatctgattcaagaaaatcaagccatcaaaaggcaaaagctagatgatggaaaatcaagacagattctcaatccaaaaccagcaactctgctccacaagacaagaaatggtcttgttaacactggtttcaacttatgcccttcagtcactaagcacactccgaaggaaaacagaaaggtttatgttcgtgagcaaattgcaccttttgtttcaactgctgaattgatgaagaagttccaaacaagcacgcgagacctattcgtccagaatcgacctaagctgacactgacaagaccaaaggaacccgaatttgtgacgtcccaacgagctcgtcctttgagagttaagagcagtgcagaacttgaggaagagatgttggcaaagattcccaagtttaaagctcgacctgtgaacaagaagattttggcagctccagctttgcctgcacctcaaagaagtacaccacatctgccagaatttcaggaatttcatcttcaaacaatggcaagggctaaccagcatgcagagacatcttcaatagcttcaacagaagtgtctaagcagcataatgatcagaagcatcaccttactgaaccaaagagccctgtgctccaaacaatgctaagagctcgtcctactatagcaaaaactactgcagaacttgagcaagaggaactggagaaggcaccaaagttcaaagcaaaacctttgaacaaaaagatatttgaaagtaaaggagaaatgggtatcttttgcaacaccaagaagcacataacgatacctcaagagtatcactttgcgacagatgagaggatatcacgaccagaatctgtcttagatatattcgacaagctctcactgaactccgaatcttgccatgaaaaacctctaccaaggaacactgctccaaaccccttcaatcttaagacagaagaaagaggcgctgagaaagagaagaaattttatatggaactcatgtataagaaattaggagatgtaaaggcaagagttccaaaggcaaatccatatccttacacgacggactatccagtggtaccaccaaaaccagaacctaagcaatgcacacaaccagaaccgttccagttagagagtctagtaaggcacgaagaggaaatgcgaagagaaagggaagagaggaggagaatggagacagaagaagcccagaagaggctcttcaaagcacaaccagttataaaagaggacccaatccctgttccagagaaagtacgaatgcccctcacagaaattcaggagttcaatcttcatgtagagcatcgagctgttgaacgagcagattttgatcacaaaatcaaagagaaggagaaccagtacaaaagataccgtgaagagagtgaagctgcaaaaatggtggaggaagagagagctctgaagcaaatgagaaagacaatggttcctcatgccagacctgtgcctaacttcaacaaacccttcttacctcagaagtccaacaaggggaccacaaaagcaaaatcacccaatcttagagtgattaaaagaaccgagagaagaaccatgatggctcgaccaaccatctctgcagctactagcgcctctgctggtcagatgagatagttgtttgcagtaatgttttctgaagcagcctgaaatgttcatgaatgcttgaacctacattttcctttgtaaaaatgattcagtactaaattttcctgtaacctgttcttactaatatagtacattgtcttatgtatcctggttcaagttttaataaactgaaaaaaaaaactgttcttact

SEQ ID NO: 20592 - protein, 796 aa, Arabidopsis thaliana
  peptide (1)..(796): Ceres Seq. ID no. 14310098
FLVTDRYIPSENQENKIIIKNPNSPLHFSLSRSLCDFSMEATAEESVSTLVTTMVDETYEFLAPRWFDFVNGETEDESRRAELWFQSALSCAPSPSVPRIKARRSFKVEAMCNFNEDEEETLKDKEPLEPVVPIVSLQSQPSQAKKAEVAPSKASTVKPSRISSKDAEVNNKTVDASDPTTEPIEDKENIAPACTPKPPMQFSLGAKSVDLKKQQTARKIASLLKNPSTLRPKNQSQAKGSHQKSVKGETNLNNIASTTNLIQENQAIKRQKLDDGKSRQILNPKPATLLHKTRNGLVNTGFNLCPSVTKHTPKENRKVYVREQIAPFVSTAELMKKFQTSTRDLFVQNRPKLTLTRPKEPEFVTSQRARPLRVKSSAELEEEMLAKIPKFKARPVNKKILAAPALPAPQRSTPHLPEFQEFHLQTMARANQHAETSSIASTEVSKQHNDQKHHLTEPKSPVLQTMLRARPTIAKTTAELEQEELEKAPKFKAKPLNKKIFESKGEMGIFCNTKKHITIPQEYHFATDERISRPESVLDIFDKLSLNSESCHEKPLPRNTAPNPFNLKTEERGAEKEKKFYMELMYKKLGDVKARVPKANPYPYTTDYPVVPPKPEPKQCTQPEPFQLESLVRHEEEMRREREERRRMETEEAQKRLFKAQPVIKEDPIPVPEKVRMPLTEIQEFNLHVEHRAVERADFDHKIKEKENQYKRYREESEAAKMVEEERALKQMRKTMVPHARPVPNFNKPFLPQKSNKGTTKAKSPNLRVIKRTERRTMMARPTISAATSASAGQMR

SEQ ID NO: 20593 - protein, 758 aa, Arabidopsis thaliana
  peptide (1)..(758): Ceres Seq. ID no. 14310099
MEATAEESVSTLVTTMVDETYEFLAPRWFDFVNGETEDESRRAELWFQSALSCAPSPSVPRIKARRSFKVEAMCNFNEDEEETLKDKEPLEPVVPIVSLQSQPSQAKKAEVAPSKASTVKPSRISSKDAEVNNKTVDASDPTTEPIEDKENIAPACTPKPPMQFSLGAKSVDLKKQQTARKIASLLKNPSTLRPKNQSQAKGSHQKSVKGETNLNNIASTTNLIQENQAIKRQKLDDGKSRQILNPKPATLLHKTRNGLVNTGFNLCPSVTKHTPKENRKVYVREQIAPFVSTAELMKKFQTSTRDLFVQNRPKLTLTRPKEPEFVTSQRARPLRVKSSAELEEEMLAKIPKFKARPVNKKILAAPALPAPQRSTPHLPEFQEFHLQTMARANQHAETSSIASTEVSKQHNDQKHHLTEPKSPVLQTMLRARPTIAKTTAELEQEELEKAPKFKAKPLNKKIFESKGEMGIFCNTKKHITIPQEYHFATDERISRPESVLDIFDKLSLNSESCHEKPLPRNTAPNPFNLKTEERGAEKEKKFYMELMYKKLGDVKARVPKANPYPYTTDYPVVPPKPEPKQCTQPEPFQLESLVRHEEEMRREREERRRMETEEAQKRLFKAQPVIKEDPIPVPEKVRMPLTEIQEFNLHVEHRAVERADFDHKIKEKENQYKRYREESEAAKMVEEERALKQMRKTMVPHARPVPNFNKPFLPQKSNKGTTKAKSPNLRVIKRTERRTMMARPTISAATSASAGQMR

SEQ ID NO: 20594 - protein, 743 aa, Arabidopsis thaliana
  peptide (1)..(743): Ceres Seq. ID no. 14310100
MVDETYEFLAPRWFDFVNGETEDESRRAELWFQSALSCAPSPSVPRIKARRSFKVEAMCNFNEDEEETLKDKEPLEPVVPIVSLQSQPSQAKKAEVAPSKASTVKPSRISSKDAEVNNKTVDASDPTTEPIEDKENIAPACTPKPPMQFSLGAKSVDLKKQQTARKIASLLKNPSTLRPKNQSQAKGSHQKSVKGETNLNNIASTTNLIQENQAIKRQKLDDGKSRQILNPKPATLLHKTRNGLVNTGFNLCPSVTKHTPKENRKVYVREQIAPFVSTAELMKKFQTSTRDLFVQNRPKLTLTRPKEPEFVTSQRARPLRVKSSAELEEEMLAKIPKFKARPVNKKILAAPALPAPQRSTPHLPEFQEFHLQTMARANQHAETSSIASTEVSKQHNDQKHHLTEPKSPVLQTMLRARPTIAKTTAELEQEELEKAPKFKAKPLNKKIFESKGEMGIFCNTKKHITIPQEYHFATDERISRPESVLDIFDKLSLNSESCHEKPLPRNTAPNPFNLKTEERGAEKEKKFYMELMYKKLGDVKARVPKANPYPYTTDYPVVPPKPEPKQCTQPEPFQLESLVRHEEEMRREREERRRMETEEAQKRLFKAQPVIKEDPIPVPEKVRMPLTEIQEFNLHVEHRAVERADFDHKIKEKENQYKRYREESEAAKMVEEERALKQMRKTMVPHARPVPNFNKPFLPQKSNKGTTKAKSPNLRVIKRTERRTMMARPTISAATSASAGQMR

SEQ ID NO: 20595 - DNA, 1703 bp, Arabidopsis thaliana
  misc_feature (1)..(1703): Ceres Seq. ID no. 14309870
ggtcggacttgtaaattttcgctcagcgatctgcttccaatggcgatctacttcattctctatacacttctcacgatcatcttcgccgtatctctgagtttatttctttccgtgatcaatgcaagaaagagcagaaaacgtgcggtgggattcttccatccgtacacgaacgacggtggcggcggcgagagagtgctctggtgcgccgttaaagccattcaagaggaaaatcccgatcttgactgtgtcatcttcaccggagatcatgactcttcttctgatagcttagctcgtcgcgccgttgatcgattcggtgttcaccttcagtctcctcctaaggtgattcatctaaacaaaaggaaatggattgaagagagtacttacccacattttacaatgataggtcagagtcttggttcggtttacttagcgtgggaagcattacgcatgttcactcctttgtatttccttgacactagtggatatgcgtttacatatcctcttgctcggatctttggttgcaaagttgtttgctatactcattatccaactattagtttggatatgatttctcgtgttcgtcagaggaactctatgtataacaatgatgcttccattgctaagagcaattggttatctacttgcaaattagtctattacagagcttttagctggatgtatgggatggttgggtcatgtactcatttagctatggttaactcttcgtggactaagtcccatatcgaagtgctttggagaattccagaacggattacacgggtctacccgccctgtgatacttcaggacttcaggcgtttcctcttgaacgatcatctgatcctcctaaaatcatatcagttgctcaatttcgtcctgagaaggctcatatgcttcagcttgaggccttttcactagccttagagaagctagatgcagacgtccctagacccaagctccaatttgtgggaagttgtaggaacaattcagatgaagaacgtctgcagaaattgaaagacagagcagaagaactaaaagtagatggagacgtgcaattctataaaaatgccatgtacagagaactagtggaactgttaggaaatgcagttgcaggactgcatgggatgatagatgaacactttggtataagtgttgttgagtacatggctgctggtgcaatcccaatagctcacaactcagctggacctaaaatggacattgtgttggaagaagacggacaaaaaaccgggtttcttgctgagactgtggaggaatacgctgaagcgatccttgagattgtgaagatgaatgaaacagagaggcttaaaatggctgaatctgctagaaaacgagcggcaaggttctctgaacaacggttttgtgaggacttcaaaactgcgattcgacccattttcacaggtcctcttaaatgacagttcttaaaccctcaaaacctgcttactgcactagcttttaaacgcacaagacaagctaggttataccttttatcctctctttatagattttttttttaattctggttaaaggtctgacgtagacgttgtaagaaacagtttggtcaaaagaaacgagtaagatcttcctatttctagttgactgttggggaaaactgacaccaacatttgctttcaaacgttttcgatttgtccgaatgcattttattatgagaaacttggtgttattc

SEQ ID NO: 20596 - protein, 476 aa, Arabidopsis thaliana
  peptide (1)..(476): Ceres Seq. ID no. 14309871
GRTCKFSLSDLLPMAIYFILYTLLTIIFAVSLSLFLSVINARKSRKRAVGFFHPYTNDGGGGERVLWCAVKAIQEENPDLDCVIFTGDHDSSSDSLARRAVDRFGVHLQSPPKVIHLNKRKWIEESTYPHFTMIGQSLGSVYLAWEALRMFTPLYFLDTSGYAFTYPLARIFGCKVVCYTHYPTISLDMISRVRQRNSMYNNDASIAKSNWLSTCKLVYYRAFSWMYGMVGSCTHLAMVNSSWTKSHIEVLWRIPERITRVYPPCDTSGLQAFPLERSSDPPKIISVAQFRPEKAHMLQLEAFSLALEKLDADVPRPKLQFVGSCRNNSDEERLQKLKDRAEELKVDGDVQFYKNAMYRELVELLGNAVAGLHGMIDEHFGISVVEYMAAGAIPIAHNSAGPKMDIVLEEDGQKTGFLAETVEEYAEAILEIVKMNETERLKMAESARKRAARFSEQRFCEDFKTAIRPIFTGPLK

SEQ ID NO: 20597 - protein, 463 aa, Arabidopsis thaliana
  peptide (1)..(463): Ceres Seq. ID no. 14309872
MAIYFILYTLLTIIFAVSLSLFLSVINARKSRKRAVGFFHPYTNDGGGGERVLWCAVKAIQEENPDLDCVIFTGDHDSSSDSLARRAVDRFGVHLQSPPKVIHLNKRKWIEESTYPHFTMIGQSLGSVYLAWEALRMFTPLYFLDTSGYAFTYPLARIFGCKVVCYTHYPTISLDMISRVRQRNSMYNNDASIAKSNWLSTCKLVYYRAFSWMYGMVGSCTHLAMVNSSWTKSHIEVLWRIPERITRVYPPCDTSGLQAFPLERSSDPPKIISVAQFRPEKAHMLQLEAFSLALEKLDADVPRPKLQFVGSCRNNSDEERLQKLKDRAEELKVDGDVQFYKNAMYRELVELLGNAVAGLHGMIDEHFGISVVEYMAAGAIPIAHNSAGPKMDIVLEEDGQKTGFLAETVEEYAEAILEIVKMNETERLKMAESARKRAARFSEQRFCEDFKTAIRPIFTGPLK

SEQ ID NO: 20598 - protein, 344 aa, Arabidopsis thaliana
  peptide (1)..(344): Ceres Seq. ID no. 14309873
MIGQSLGSVYLAWEALRMFTPLYFLDTSGYAFTYPLARIFGCKVVCYTHYPTISLDMISRVRQRNSMYNNDASIAKSNWLSTCKLVYYRAFSWMYGMVGSCTHLAMVNSSWTKSHIEVLWRIPERITRVYPPCDTSGLQAFPLERSSDPPKIISVAQFRPEKAHMLQLEAFSLALEKLDADVPRPKLQFVGSCRNNSDEERLQKLKDRAEELKVDGDVQFYKNAMYRELVELLGNAVAGLHGMIDEHFGISVVEYMAAGAIPIAHNSAGPKMDIVLEEDGQKTGFLAETVEEYAEAILEIVKMNETERLKMAESARKRAARFSEQRFCEDFKTAIRPIFTGPLK

SEQ ID NO: 20599 - DNA, 647 bp, Arabidopsis thaliana
  misc_feature (1)..(647): Ceres Seq. ID no. 12393496
attacctctaatgttttgcttccaaagaaaaaaagaaacaatgaagttcttgatttacctcgttgtgtttgttcttcttttcaatggtttgacggccaacagagtggaaaactctctggttcagaaatattgcaatcaaagttcaaagtacgcggaacgatatttctataagttttgcattgcatctctcgaagagaatgcggaaagtcagaaagcaaggaatagcaatgatttaacattggtaggaacgaataacgctttatcaaacctaacaaacgtgaaaagaattgtggagaagattttcaacgagagaaaatataagggcaggctgagtaagaagttgttgcaaaagtgccttaagctttattctgaaggctatgacgcgttaacctcagctttgaagtacattaaagtgagagatctgtttaaagtttcggttcatttgcagaaagcaaaagaagcaccaagcatttgcgaaatgggattcaacggcgacaataaacaaatatctccgatgaagaaagaaaacgatgttcttttcgacgtgatcaatattccttacagttttaatatgaatcgacatggttagattagcgcctgaaaaggaaccggaggttgcatgagttttattttaattgaaaaaagtt

SEQ ID NO: 20600 - protein, 195 aa, Arabidopsis thaliana
  peptide (1)..(195): Ceres Seq. ID no. 12393497
LPLMFCFQRKKETMKFLIYLVVFVLLFNGLTANRVENSLVQKYCNQSSKYAERYFYKFCIASLEENAESQKARNSNDLTLVGTNNALSNLTNVKRIVEKIFNERKYKGRLSKKLLQKCLKLYSEGYDALTSALKYIKVRDLFKVSVHLQKAKEAPSICEMGFNGDNKQISPMKKENDVLFDVINIPYSFNMNRHG

SEQ ID NO: 20601 - protein, 192 aa, Arabidopsis thaliana
  peptide (1)..(192): Ceres Seq. ID no. 12393498
MFCFQRKKETMKFLIYLVVFVLLFNGLTANRVENSLVQKYCNQSSKYAERYFYKFCIASLEENAESQKARNSNDLTLVGTNNALSNLTNVKRIVEKIFNERKYKGRLSKKLLQKCLKLYSEGYDALTSALKYIKVRDLFKVSVHLQKAKEAPSICEMGFNGDNKQISPMKKENDVLFDVINIPYSFNMNRHG

SEQ ID NO: 20602 - protein, 182 aa, Arabidopsis thaliana
  peptide (1)..(182): Ceres Seq. ID no. 12393499
MKFLIYLVVFVLLFNGLTANRVENSLVQKYCNQSSKYAERYFYKFCIASLEENAESQKARNSNDLTLVGTNNALSNLTNVKRIVEKIFNERKYKGRLSKKLLQKCLKLYSEGYDALTSALKYIKVRDLFKVSVHLQKAKEAPSICEMGFNGDNKQISPMKKENDVLFDVINIPYSFNMNRHG

SEQ ID NO: 20603 - DNA, 1560 bp, Arabidopsis thaliana
  misc_feature (1)..(1560): Ceres Seq. ID no. 14310037
gctcactagtccccccccccccggcttttccattttcatcttcatgcattgctttccttcgtcgtccttggaggggacgacgacggatctgtctttctgtctactgaaaatccaaatttcatcctctccatttatttaactttttcagatttagttttgtcaagaaaacacaaaatgtcctttcttgcgccttgtcaaattttggagctgaatattatttcggcccaagaattggcgcccgtggcacggtgtatgaagacatatgcaatcgcttggattgatccagagcgtaaattgacgactcgggtcgacaatacgggcggaacaagccctacatggaacgacaagtttgtgtttcgtctagatgaggaagcactctacgatgccacatcaatagttgttatagagatctatgcattgcattggttcaaagacattcatgttggaacggtacaagccttaataagtgaccttgtaagcccttcttcggctatgagatttgttaccctagaggttcttcgtgcctctggccgccctcacggcctcctaaacattgcggtggggcttatcgataactcaggccaaagcatgcctctttagtttgaagaagatttgttgtttcacaagaaaaacatatcttcaaaacctgtagggcttcgacggtcaaaaagtgatacaagctcaatggtggattcaccaaggaaggtgacacaatcccgtgtgagttctactacaaactcaggatttgagaaagatgagttttcttctgactctcaaatggttgtttatgaaccccaaagaaaaacgccaaatacaatgaggcaaacaaagcaacaactcgtgtatgggacaccgatgaggccaaggaaaacgacagcatatatccccaaaaggaacacggtcgaatatggaacaccaatgaggtcaagaccaatcgttattacagaatctgacttaggtccttcagcctcagtagttgctgcccaaatagcaaaagagaaagcacttacagggaaagatgcggagagtactgtgataagtgttggtgaacgaagtgtcgagggtcttcgttctaagttagaaagatggcaagccaatttaccagtggttttagacgtggggtcaagttatcaaccaagttctgactacaaaacaaactctaactttaaccctaaatcaagttacaagcctaatgaaatcgtcccaagaaatcctcaaatgattggagctcccatccaaaagccaagtgggaggaacaagaaaagtggagataatggattgttttcatgttttggtaacatttgtggcgttgagtgttctattgtttgtggtggctctagtggacaaaaagcagccaagaagaagatgaaaaagaagtgataaataacaaacatgattcctccaaattctaaatgattcatttctcattatgtttctatttttcaagcttgtcgattttgctactcaataatccaaatttataatagtaagacagggaaaaaggtacattaattatttcattacttttttatagtaaacatgaaaaatttggtttaaatc

SEQ ID NO: 20604 - protein, 231 aa, Arabidopsis thaliana
  peptide (1)..(231): Ceres Seq. ID no. 14310038
MVDSPRKVTQSRVSSTTNSGFEKDEFSSDSQMVVYEPQRKTPNTMRQTKQQLVYGTPMRPRKTTAYIPKRNTVEYGTPMRSRPIVITESDLGPSASVVAAQIAKEKALTGKDAESTVISVGERSVEGLRSKLERWQANLPVVLDVGSSYQPSSDYKTNSNFNPKSSYKPNEIVPRNPQMIGAPIQKPSGRNKKSGDNGLFSCFGNICGVECSIVCGGSSGQKAAKKKMKKK

SEQ ID NO: 20605 - protein, 200 aa, Arabidopsis thaliana
  peptide (1)..(200): Ceres Seq. ID no. 14310039
MVVYEPQRKTPNTMRQTKQQLVYGTPMRPRKTTAYIPKRNTVEYGTPMRSRPIVITESDLGPSASVVAAQIAKEKALTGKDAESTVISVGERSVEGLRSKLERWQANLPVVLDVGSSYQPSSDYKTNSNFNPKSSYKPNEIVPRNPQMIGAPIQKPSGRNKKSGDNGLFSCFGNICGVECSIVCGGSSGQKAAKKKMKKK

SEQ ID NO: 20606 - protein, 187 aa, Arabidopsis thaliana
  peptide (1)..(187): Ceres Seq. ID no. 14310040
MRQTKQQLVYGTPMRPRKTTAYIPKRNTVEYGTPMRSRPIVITESDLGPSASVVAAQIAKEKALTGKDAESTVISVGERSVEGLRSKLERWQANLPVVLDVGSSYQPSSDYKTNSNFNPKSSYKPNEIVPRNPQMIGAPIQKPSGRNKKSGDNGLFSCFGNICGVECSIVCGGSSGQKAAKKKMKKK

SEQ ID NO: 20607 - DNA, 2963 bp, Arabidopsis thaliana
  misc_feature (1)..(2963): Ceres Seq. ID no. 15168965
  misc_feature (1)..(2963): Ortholog of  Ceres SEQ ID NO 13597454 as cited in SEQ ID NO 64121
  misc_feature (1)..(2963): Ortholog of  Ceres SEQ ID NO 13623385 as cited in SEQ ID NO 0
gaaaatatcttcttcttctttcttctgctctctctctctctctctcgccatgtccactgttcccattgagtctcttctccaccattcttatcttcgtcacaactctagaatctatcgcggaactagaactttcttaccttactcgttgaatctcccttctcatttcactcctaacaaactactgcactcaattagaacaagcgtcggtgttagctcgaagcatagaagaaggtccgtcgcgattcgtgctagctcttccgatactgcggtcgtggaaaccgctcaatcggatgatgtcatcttcaaggaaattttctctgttcaacgaatcgaaaaggcagaaggaaagatttatgttcgattaaaggaagtgaaggagaataattgggagctgagtgttggatgtagtatacccggaaaatggattttgcattggggagtttcatatgtgggtgatactggcagtgaatgggatcaacctccggaagatatgagacctcctggctcaattgccattaaggactatgccatagagacaccgttgaagaagttatctgaaggagattctttttttgaagttgctattaatcaaaatctggagagttctgtagcagctctcaattttgttttgaaggacgaagaaactggggcatggtatcagcacaaagggagggactttaaggttcctcttgtagacgatgttcctgataatggaaatttgatcggagccaagaaaggatctgttggatctctaggtgcccttgggcagctttcaaacatctctctcaaacaagatgaatccagtgcagaagttccaaaagagagcaagagctcatctgattctacgaaagaaagaaaaggtcttcaagagttttacgaggagatgccaataagtaaacgtgttgccgatgataactctgtcagtgtcactgcaaggaaatgccctgaaacatctaagaacattgtatcaattgaaaccgatttaccgggtgacgttactgtccactggggagtttgcaaaaacggcactaagaaatgggaaattccatctgaaccttaccctgaagagacatctttgtttaagaacaaggcattacgcactcgtttacagcgaaaagacgatggaaatggatcgtttggattattctctctggatggaaagcttgaagggttatgctttgttcttaagttaaatgaaaatacgtggctaaattataggggggaagacttctatgtccctttccttacttcaagtagctcgcccgttgaaactgaagctgcccaagtgagtaaacccaaacgaaaaacagataaagaagtgtctgctagtggatttactaaagaaatcatcacggagataaggaacttggcaattgacatttcctctcataagaatcagaagacaaacgtcaaagaagtgcaggaaaacattctacaagaaattgagaaactggctgcggaggcatatagcatatttagaagcacaactccagctttttccgaggaaggtgttttagaagcagaggctgacaagcctgacattaaaatctcctcaggaaccggctcgggatttgagatattatgccaaggtttcaactgggagtccaataaatctgggagatggtacttggaacttcaagaaaaagccgatgagttagcttcacttggattcactgttctgtggttacctccaccgacagaatctgtgtcacctgaagggtacatgcctaaagacctgtataacttgaattccagatatggaactattgatgaactaaaagatacagtgaagaaatttcacaaggtcgggatcaaagttttaggcgatgctgttctgaatcaccgctgtgcacacttcaagaatcaaaatggtgtatggaatctatttggaggacgtctaaactgggacgatagggcagtagttgcagatgaccctcatttccagggtagaggaaacaagagcagtggagataatttccatgctgctccaaacatagatcactcgcaagactttgttaggaaggatatcaaggaatggctatgctggatgatggaagaagttgggtatgatggatggaggcttgactttgtaagagggttctggggaggttatgtgaaagactatatggatgctagcaaaccgtactttgcggttggtgaatattgggattctttaagttacacgtacggagaaatggactacaatcaagacgcacatcgtcaaagaatagttgactggattaatgcaactagtggagctgctggtgcatttgatgtcactaccaaaggaattcttcatacggcgcttcaaaaatgtgaatattggagactctcagacccaaaagggaagcctccaggtgtagttggttggtggccttctcgtgctgtaacattcatcgagaatcatgacactggctctacacagggtcattggagatttccggaggggaaggaaatgcaaggatatgcttacatcctaactcatccaggaacaccagcggtcttcttcgaccatatcttctcggattatcattccgagattgctgcacttctctctctcaggaacagacagaaactccactgtaggagtgaggtgaatatagacaagagtgagagagatgtgtatgcggctataatagatgaaaaggttgcaatgaagatcggaccagggcattacgaaccaccaaacggatctcaaaactggtctgtagccgttgaaggcagagactacaaggtgtgggaaacatcttaagaaggttcccaatttttatgtgtatctagtagtaaataaaattgtccttggaggaaaatattatattatttcaggggaataagattaaaagttaaaaccagatttaagatttgtcccacttttttcaatgctgagagaatattcatattgttgtattggatgcttgtaaagtgtatgcataatatatatgaataataatatatctatttcc

SEQ ID NO: 20608 - protein, 916 aa, Arabidopsis thaliana
  peptide (1)..(916): Ceres Seq. ID no. 15168966
KISSSSFFCSLSLSLAMSTVPIESLLHHSYLRHNSRIYRGTRTFLPYSLNLPSHFTPNKLLHSIRTSVGVSSKHRRRSVAIRASSSDTAVVETAQSDDVIFKEIFSVQRIEKAEGKIYVRLKEVKENNWELSVGCSIPGKWILHWGVSYVGDTGSEWDQPPEDMRPPGSIAIKDYAIETPLKKLSEGDSFFEVAINQNLESSVAALNFVLKDEETGAWYQHKGRDFKVPLVDDVPDNGNLIGAKKGSVGSLGALGQLSNISLKQDESSAEVPKESKSSSDSTKERKGLQEFYEEMPISKRVADDNSVSVTARKCPETSKNIVSIETDLPGDVTVHWGVCKNGTKKWEIPSEPYPEETSLFKNKALRTRLQRKDDGNGSFGLFSLDGKLEGLCFVLKLNENTWLNYRGEDFYVPFLTSSSSPVETEAAQVSKPKRKTDKEVSASGFTKEIITEIRNLAIDISSHKNQKTNVKEVQENILQEIEKLAAEAYSIFRSTTPAFSEEGVLEAEADKPDIKISSGTGSGFEILCQGFNWESNKSGRWYLELQEKADELASLGFTVLWLPPPTESVSPEGYMPKDLYNLNSRYGTIDELKDTVKKFHKVGIKVLGDAVLNHRCAHFKNQNGVWNLFGGRLNWDDRAVVADDPHFQGRGNKSSGDNFHAAPNIDHSQDFVRKDIKEWLCWMMEEVGYDGWRLDFVRGFWGGYVKDYMDASKPYFAVGEYWDSLSYTYGEMDYNQDAHRQRIVDWINATSGAAGAFDVTTKGILHTALQKCEYWRLSDPKGKPPGVVGWWPSRAVTFIENHDTGSTQGHWRFPEGKEMQGYAYILTHPGTPAVFFDHIFSDYHSEIAALLSLRNRQKLHCRSEVNIDKSERDVYAAIIDEKVAMKIGPGHYEPPNGSQNWSVAVEGRDYKVWETS

SEQ ID NO: 20609 - protein, 900 aa, Arabidopsis thaliana
  peptide (1)..(900): Ceres Seq. ID no. 15168967
MSTVPIESLLHHSYLRHNSRIYRGTRTFLPYSLNLPSHFTPNKLLHSIRTSVGVSSKHRRRSVAIRASSSDTAVVETAQSDDVIFKEIFSVQRIEKAEGKIYVRLKEVKENNWELSVGCSIPGKWILHWGVSYVGDTGSEWDQPPEDMRPPGSIAIKDYAIETPLKKLSEGDSFFEVAINQNLESSVAALNFVLKDEETGAWYQHKGRDFKVPLVDDVPDNGNLIGAKKGSVGSLGALGQLSNISLKQDESSAEVPKESKSSSDSTKERKGLQEFYEEMPISKRVADDNSVSVTARKCPETSKNIVSIETDLPGDVTVHWGVCKNGTKKWEIPSEPYPEETSLFKNKALRTRLQRKDDGNGSFGLFSLDGKLEGLCFVLKLNENTWLNYRGEDFYVPFLTSSSSPVETEAAQVSKPKRKTDKEVSASGFTKEIITEIRNLAIDISSHKNQKTNVKEVQENILQEIEKLAAEAYSIFRSTTPAFSEEGVLEAEADKPDIKISSGTGSGFEILCQGFNWESNKSGRWYLELQEKADELASLGFTVLWLPPPTESVSPEGYMPKDLYNLNSRYGTIDELKDTVKKFHKVGIKVLGDAVLNHRCAHFKNQNGVWNLFGGRLNWDDRAVVADDPHFQGRGNKSSGDNFHAAPNIDHSQDFVRKDIKEWLCWMMEEVGYDGWRLDFVRGFWGGYVKDYMDASKPYFAVGEYWDSLSYTYGEMDYNQDAHRQRIVDWINATSGAAGAFDVTTKGILHTALQKCEYWRLSDPKGKPPGVVGWWPSRAVTFIENHDTGSTQGHWRFPEGKEMQGYAYILTHPGTPAVFFDHIFSDYHSEIAALLSLRNRQKLHCRSEVNIDKSERDVYAAIIDEKVAMKIGPGHYEPPNGSQNWSVAVEGRDYKVWETS

SEQ ID NO: 20610 - protein, 753 aa, Arabidopsis thaliana
  peptide (1)..(753): Ceres Seq. ID no. 15168968
MRPPGSIAIKDYAIETPLKKLSEGDSFFEVAINQNLESSVAALNFVLKDEETGAWYQHKGRDFKVPLVDDVPDNGNLIGAKKGSVGSLGALGQLSNISLKQDESSAEVPKESKSSSDSTKERKGLQEFYEEMPISKRVADDNSVSVTARKCPETSKNIVSIETDLPGDVTVHWGVCKNGTKKWEIPSEPYPEETSLFKNKALRTRLQRKDDGNGSFGLFSLDGKLEGLCFVLKLNENTWLNYRGEDFYVPFLTSSSSPVETEAAQVSKPKRKTDKEVSASGFTKEIITEIRNLAIDISSHKNQKTNVKEVQENILQEIEKLAAEAYSIFRSTTPAFSEEGVLEAEADKPDIKISSGTGSGFEILCQGFNWESNKSGRWYLELQEKADELASLGFTVLWLPPPTESVSPEGYMPKDLYNLNSRYGTIDELKDTVKKFHKVGIKVLGDAVLNHRCAHFKNQNGVWNLFGGRLNWDDRAVVADDPHFQGRGNKSSGDNFHAAPNIDHSQDFVRKDIKEWLCWMMEEVGYDGWRLDFVRGFWGGYVKDYMDASKPYFAVGEYWDSLSYTYGEMDYNQDAHRQRIVDWINATSGAAGAFDVTTKGILHTALQKCEYWRLSDPKGKPPGVVGWWPSRAVTFIENHDTGSTQGHWRFPEGKEMQGYAYILTHPGTPAVFFDHIFSDYHSEIAALLSLRNRQKLHCRSEVNIDKSERDVYAAIIDEKVAMKIGPGHYEPPNGSQNWSVAVEGRDYKVWETS

SEQ ID NO: 20611 - DNA, 1903 bp, Arabidopsis thaliana
  misc_feature (1)..(1903): Ceres Seq. ID no. 15168904
gggggtcgccgcctgaaccatttggattccctcacctggaattcgaaaaacggcgactactcccctagagcagatccatctagactctagagtacatccgagggggaagcgagcagatcgatggcgatggctgagaaggtgaaggagaagatgctgatgctccgcagcagcgacaaccaggagttcgaggtgaaggagtcggtggcgatgcaatcgatgaccctcaagaaaatggtcgaggacggctgcgccgacaaaggcatcccgctccccaacgtcacctcccacatcctcgacaaggtcatcgagtattgcaacaagcacgccgagccgaccgggccgggcgacgcggccggcaccaccaacaggtccgccgaggatgagctcaacatcttcgacgcagacttcgtcaatgtagagcactccaccctcttggacctcatcctggctgcaaactacctggacatcaaggggctcctgaacctggcccgccaaaccattacagacttgatcaatgggaagatgcctgaggaggtctgcaagaccaacatcaagaacgacttgaccatcccttccacgtcggccttggccaccacaatgccctcctccgagcgaaagcagatggaggccaggtttatcgcctatatgcaagaaactgctgaggagaggatgactgggtttgctgttcgtggtgaaaaatacagaaagcatggtgaacgtccgccacaaccaccattggagatagttaaatacccagctcttttggaaagagcttggggatgggattcgatactgccgtactgtcctgtgaattcttggcccctatacaagacttacctccaagaatattatgagcgcaattctcgtgaagtattggctcatcaagtggaagctaatgctgcctctggtcccaatctcaacggggctgatgagaatgatctggcaactctgttcaacttgtgtatcagtagggaggttcaacttttgaatctgctgaagcgccgtgatcaaaaacacaatgttgatgagatcagcctgaatgaaaagctcaccaactgtgcccgtcagataacttttgtggaatatgctggttttcctttccccagtgttgccttaaagtgcatcatggcggagtctgatctgttgtgcatgttgctgatgtgtgggactggaatgatatcccaagtcaacatttgctccaggattcgaaaggtggccttcagatttatgacctacaaaggacctggatgttttgctgctgctgccaccatgatggccaccacaaaggaggccaagttgatgagtggactgctgaggaacagatgtagggaaaataatggtccattttcaaggagtgtctttatcaggaaatggaccattgcagctatgttcagaatatgtgaggaatgttctcctgtggaagagtctacagggggctacactgctactaaattgatacttgatggatctgatgacaagaatccttgtgataaggaactagttaataaggacaacctgctgcagaggaacaagataaatcaaaaataccaaggactgttcaaaggaaaaacaactaaatgccgacaccctgtacaaaagcaagaaccaggagatggagcaacgcccgcatcacccagtccggccaatcccatctcaactgtggtgcaaaaactttggtaagaaggaatactgaaggaccttccaaactagcatgaagtgcgggcaccttgcttttcttttgccttctttttgtgaaaacgtgtgcttagcgacaatgctggcaaagtgttagaagcatctctggaatgcttcgtgtagtatcttttgactctcttttcttttgtcgtctcaatcatgttacatgagaaatgcctgatggactcaaataatgaaccggtgattc

SEQ ID NO: 20612 - protein, 519 aa, Arabidopsis thaliana
  peptide (1)..(519): Ceres Seq. ID no. 15168905
MAMAEKVKEKMLMLRSSDNQEFEVKESVAMQSMTLKKMVEDGCADKGIPLPNVTSHILDKVIEYCNKHAEPTGPGDAAGTTNRSAEDELNIFDADFVNVEHSTLLDLILAANYLDIKGLLNLARQTITDLINGKMPEEVCKTNIKNDLTIPSTSALATTMPSSERKQMEARFIAYMQETAEERMTGFAVRGEKYRKHGERPPQPPLEIVKYPALLERAWGWDSILPYCPVNSWPLYKTYLQEYYERNSREVLAHQVEANAASGPNLNGADENDLATLFNLCISREVQLLNLLKRRDQKHNVDEISLNEKLTNCARQITFVEYAGFPFPSVALKCIMAESDLLCMLLMCGTGMISQVNICSRIRKVAFRFMTYKGPGCFAAAATMMATTKEAKLMSGLLRNRCRENNGPFSRSVFIRKWTIAAMFRICEECSPVEESTGGYTATKLILDGSDDKNPCDKELVNKDNLLQRNKINQKYQGLFKGKTTKCRHPVQKQEPGDGATPASPSPANPISTVVQKLW

SEQ ID NO: 20613 - protein, 517 aa, Arabidopsis thaliana
  peptide (1)..(517): Ceres Seq. ID no. 15168906
MAEKVKEKMLMLRSSDNQEFEVKESVAMQSMTLKKMVEDGCADKGIPLPNVTSHILDKVIEYCNKHAEPTGPGDAAGTTNRSAEDELNIFDADFVNVEHSTLLDLILAANYLDIKGLLNLARQTITDLINGKMPEEVCKTNIKNDLTIPSTSALATTMPSSERKQMEARFIAYMQETAEERMTGFAVRGEKYRKHGERPPQPPLEIVKYPALLERAWGWDSILPYCPVNSWPLYKTYLQEYYERNSREVLAHQVEANAASGPNLNGADENDLATLFNLCISREVQLLNLLKRRDQKHNVDEISLNEKLTNCARQITFVEYAGFPFPSVALKCIMAESDLLCMLLMCGTGMISQVNICSRIRKVAFRFMTYKGPGCFAAAATMMATTKEAKLMSGLLRNRCRENNGPFSRSVFIRKWTIAAMFRICEECSPVEESTGGYTATKLILDGSDDKNPCDKELVNKDNLLQRNKINQKYQGLFKGKTTKCRHPVQKQEPGDGATPASPSPANPISTVVQKLW

SEQ ID NO: 20614 - protein, 509 aa, Arabidopsis thaliana
  peptide (1)..(509): Ceres Seq. ID no. 15168907
MLMLRSSDNQEFEVKESVAMQSMTLKKMVEDGCADKGIPLPNVTSHILDKVIEYCNKHAEPTGPGDAAGTTNRSAEDELNIFDADFVNVEHSTLLDLILAANYLDIKGLLNLARQTITDLINGKMPEEVCKTNIKNDLTIPSTSALATTMPSSERKQMEARFIAYMQETAEERMTGFAVRGEKYRKHGERPPQPPLEIVKYPALLERAWGWDSILPYCPVNSWPLYKTYLQEYYERNSREVLAHQVEANAASGPNLNGADENDLATLFNLCISREVQLLNLLKRRDQKHNVDEISLNEKLTNCARQITFVEYAGFPFPSVALKCIMAESDLLCMLLMCGTGMISQVNICSRIRKVAFRFMTYKGPGCFAAAATMMATTKEAKLMSGLLRNRCRENNGPFSRSVFIRKWTIAAMFRICEECSPVEESTGGYTATKLILDGSDDKNPCDKELVNKDNLLQRNKINQKYQGLFKGKTTKCRHPVQKQEPGDGATPASPSPANPISTVVQKLW

SEQ ID NO: 20615 - DNA, 1973 bp, Arabidopsis thaliana
  misc_feature (1)..(1973): Ceres Seq. ID no. 15175957
  misc_feature (1)..(1973): Ortholog of  Ceres SEQ ID NO 14301490 as cited in SEQ ID NO 66234
gattattttctcttctcgttgaaattgatcccttctaatatttttctttttcttcttcttcttcttcataatttgtatcaatcatttcaaagaaccattctctctgtatatctccttccagtttagctatataaaggagcggtttttaaaaatatcttagaactcgattgattttgatagcttatagccaatcaagatttcttaagctctgtgaaaaatgggatgctttgcatcaacgccgaaagactcaggtgggaacagaagaaagcctacaagcatcggtgaggtttcagtatatgtacctggtttaaggatacccagagcggtggattttttgcagtcacttggtgatcaattaccgaagactttagtggaacgcttgacagctttaagaacgcgtatagtagtgatggctaatcaagaaggacctacaattacgagaactaggagaaagacacaacatggaggttcaacgctcttggatctccatcaagctttgctagattatctacctgttgtcttgggattaactaaagatggtagccatctacagtttaaagtgcaatttaattgggtaaatcaggaggatgaggaagaggaaacagagatgtcaaacgtttggtatgaagttttatctgttttgcatctaatggcaatgctacaaatgtctcaagccaatttactgcttcttcctagaggttctagtgatggtcacaatcatccgaaagtatccgaagaaaacagacgaacttcgattgatatcttcttaaaagcagctggatatcttgattgtgccgttaagcatgttctcccccagttttctgctgagcaaaggagaagtttaccagttgacttagcagaaggaactctacgggctctttgcttgcaagcacttggccagggtgttgatatccaacttggcatggcgattgatagctcaaaggccactcttgcagtaaaacgaagactttcatgtgaaatggtgaaatattggcagcaggcacaagataatttaatgaatctcccgttagcaaatggttggggagaaaagcatggactctttgttaagtggaagtatgttgaagctaaggtactgttacattctttctctcttgctcttatactcctttcatatctgaatttgtctgttccttttgtcttgaggtatggccctttcttgtaaactgtctctataagacccaaattttgtttttgcttataatatgatccatatcattattatttgagaaccatgagtcttttaagagagtctatctctcgatgtggagttaagtgctataggtgacgaaggttcatgtgtctaatgtcttgtttcatcttctggaatcttttggatcaggctgcggcttactactatcatggtttgattcttgatgaaggaaacacagagaagtcacatggcatggcagttgctgctttacaagctgcagatgaatgtttcaaagaaagtaagaaagcatccgaagcattcaacgcctctgcgcctacttcaagaacaccgcccctctttggaacaatgaaatatctaactgagaaaatcccgaaagatacttcgagtaaagtcaggataaaccgtgatctatactcttatgaaaaaatcatggagacagcaccaacacttcctgatttcgctttggcattgaaaccagatgagtatcaacttccactcgccgaagcttcgtagtctgaagatgctcaaagcgcttcgaaccaactttaaggagcaaacgaagagagagagagagatgtgtaaaccttgtatagccaaaaaatcagtggtttccaatggctgcctgcaaattatggtatggctatagaatttacccaacaggtttctatactgtgtgagaaaaaacacttatcaaaattgggtttggatcagtttacatgagagagatctttgtatgttaatgtactaatatatttcttcaataaagcattatttttttccc

SEQ ID NO: 20616 - protein, 321 aa, Arabidopsis thaliana
  peptide (1)..(321): Ceres Seq. ID no. 15175958
MGCFASTPKDSGGNRRKPTSIGEVSVYVPGLRIPRAVDFLQSLGDQLPKTLVERLTALRTRIVVMANQEGPTITRTRRKTQHGGSTLLDLHQALLDYLPVVLGLTKDGSHLQFKVQFNWVNQEDEEEETEMSNVWYEVLSVLHLMAMLQMSQANLLLLPRGSSDGHNHPKVSEENRRTSIDIFLKAAGYLDCAVKHVLPQFSAEQRRSLPVDLAEGTLRALCLQALGQGVDIQLGMAIDSSKATLAVKRRLSCEMVKYWQQAQDNLMNLPLANGWGEKHGLFVKWKYVEAKVLLHSFSLALILLSYLNLSVPFVLRYGPFL

SEQ ID NO: 20617 - protein, 257 aa, Arabidopsis thaliana
  peptide (1)..(257): Ceres Seq. ID no. 15175959
MANQEGPTITRTRRKTQHGGSTLLDLHQALLDYLPVVLGLTKDGSHLQFKVQFNWVNQEDEEEETEMSNVWYEVLSVLHLMAMLQMSQANLLLLPRGSSDGHNHPKVSEENRRTSIDIFLKAAGYLDCAVKHVLPQFSAEQRRSLPVDLAEGTLRALCLQALGQGVDIQLGMAIDSSKATLAVKRRLSCEMVKYWQQAQDNLMNLPLANGWGEKHGLFVKWKYVEAKVLLHSFSLALILLSYLNLSVPFVLRYGPFL

SEQ ID NO: 20618 - protein, 191 aa, Arabidopsis thaliana
  peptide (1)..(191): Ceres Seq. ID no. 15175960
MSNVWYEVLSVLHLMAMLQMSQANLLLLPRGSSDGHNHPKVSEENRRTSIDIFLKAAGYLDCAVKHVLPQFSAEQRRSLPVDLAEGTLRALCLQALGQGVDIQLGMAIDSSKATLAVKRRLSCEMVKYWQQAQDNLMNLPLANGWGEKHGLFVKWKYVEAKVLLHSFSLALILLSYLNLSVPFVLRYGPFL

SEQ ID NO: 20619 - DNA, 1864 bp, Arabidopsis thaliana
  misc_feature (1)..(1864): Ceres Seq. ID no. 15175507
attttttgggggccatagtgacttgaggacggtgtacacatccatagtaaagggtacaatcgagcaagttagaatgatgttattgggaagttcacaatgaaaatccaaataatagtaccgctgcaataatctcttctcctgaggctgtcctgctttgctgcttaaaaccgtattcagttattgttctaaaaaaatgattcatacctactgaaaaccgttctcactctatctaattccttctatttttttcttttttctaaatgaaccctcacccagcattcaccatacgcagtttattttagcagttgatatactatatcaaactaagaaccatgtgaagatagttctctatcatagcaacctctagcatcgtagggatctattttccatttttaacaatcaggttaatagcttgagcttgggtgccttaaatgctcactatttttcatatggggtgatgtgcatcaagcggacggtctggcaagattgacaaatcattgtgctttctcccccggtaagaattgcatcttgacacatcagcttcaaagcagatgctgaccgaaagaattagcattcttttttgggatgtttagaagtcctatcatgtgatctgttcaaaagggagtcttaaaaagaaacagttccaaaacctcaaataatatacatatagatatcaaaaggttgtataatgttgttgccttgtttgctgagtggttctattgattaattaaagctctagcatattgttaaggtttcgacctgagtttgttccatgattttagtggaacgactcaatttcttattgatgggataacaggcagctgttgatcaaatcgaaccctggcgaagttgtgaagcctggtgaggaatccgattcattgtgttcagggctgcttgcggtttgaatttgacagtatttgtgtttgtgccagtgatcagccggctacactaccacctgaaccggttgcattgcatagactcttccgagtttaacaagtaggtgttggtagttcgtcaggggcgtttagcttttgccaatgggggatttggctgcattttgttaccttttggtatatgtactgattatattatttattggtctataagaccactggggtactaaactatattgctgattgttaagataagatctgtgatgatttttgccaagtgagcacctgatcttttttatgcaatcaatttcaggtgtgtgtagacaacctattttttagttgatatagatggtgctgatttgttagttaaagctattgtctttgatggtcacacttttattggaaatctgcaattccttttatgttgtaacaaaatttaatatctaaaaatgttgttggtgtcttggtggtaccgtgtcagttgtcaacagtccaattccattctcatggctttgattctgacgtatgattatgattattttaaatttgtgcagattcattcaaggcaatcaacgatgaaggcatgcccatgtatcagaggcccttcatgaagggcaagctgtacatccacttctcggtggagttcccggactcattgagcccggagcagtggaatgccctggaggatgttctcccacccaagccagtatcacagtacactgacatagagctggacgagtgcgaggagacaatgccctacgacgtgaacatcgaagaggagatgcggaggcagcagcagcaccaggaggcctacgacgaggatgatgatgtgccaggcggtgggcagagggtgcagtgcgcccagcagtaggcagcttacgtcaaatttgctgtttcgctttgggcgactattgagtttacccgcttgtattggtctgatgatacttcggttacaagagtgcagtattact

SEQ ID NO: 20620 - protein, 95 aa, Arabidopsis thaliana
  peptide (1)..(95): Ceres Seq. ID no. 15175508
MPMYQRPFMKGKLYIHFSVEFPDSLSPEQWNALEDVLPPKPVSQYTDIELDECEETMPYDVNIEEEMRRQQQHQEAYDEDDDVPGGGQRVQCAQQ

SEQ ID NO: 20621 - protein, 93 aa, Arabidopsis thaliana
  peptide (1)..(93): Ceres Seq. ID no. 15175509
MYQRPFMKGKLYIHFSVEFPDSLSPEQWNALEDVLPPKPVSQYTDIELDECEETMPYDVNIEEEMRRQQQHQEAYDEDDDVPGGGQRVQCAQQ

SEQ ID NO: 20622 - protein, 87 aa, Arabidopsis thaliana
  peptide (1)..(87): Ceres Seq. ID no. 15175510
MKGKLYIHFSVEFPDSLSPEQWNALEDVLPPKPVSQYTDIELDECEETMPYDVNIEEEMRRQQQHQEAYDEDDDVPGGGQRVQCAQQ

SEQ ID NO: 20623 - DNA, 2477 bp, Arabidopsis thaliana
  misc_feature (1)..(2477): Ceres Seq. ID no. 14309904
aaattcaagaaaaaaaaaaagtggcgcctctgcaatttcaattttcaaatcctattttttctctcgcttcccggagaacggaaccctaatttctcgacgcagacatgattttgagaactccgcagccgaagaggctcaggtccgacgccggagaaagccccgtccccaccggcgctactggttccggcaatcagcttgtcatctacgaagattctcctcttcctgctcctgctcctgctccgctgcaatcatctcatgatcattcggcagatcaacacctttgcacctatcaatgccgccaaatggttaaagctgatgttctagatgccttaagcaaagcagagaaacaagttgaagaatctcaaaccaaattactgactcttaatgccaacttcaccgaagcagatgctgaaagaaagcattttcgagataagttcctatactcagagcaagaacttgctgctgccaaagcgcgtgagaagatgcttcaggagcagttacttatggagatcaacaattctcaagagcggtataccaaagaactacaatcttgccgtgaactggaggtaaaacttcaaaatgaaatgaaccttcgaaagaaagcggagtcttttgctgcaacagctgaggaaaaagctaaacttttggaggataaactgactcagctatctggaagtgtcgacagggagaagaaacgtctcaacaatgatattgctcaactgggtaaagaggcaaagctttctgtgtctaggattggtgcagatcttgaaaggatgcaatgtagggcacaaaatgcagagacggaatcaaatcttttaagatcgcagcttgagcatcttaaactgaaatttgacgagtgtttgcaagaaaagactgaagtagacaagaagctgtcgtcattcacttcggaggcagcatcttcttcagataacagtgtattggttaaacatcttcaggaagaacttaaacgctatgaagctgaagtgcgagaagctagaaagttaaaatcacggcatttagatgcggagttgttgaatgtgaacttattagaagaacaaagccgtagggagagggcagagtcagagttatcaaaatttcatgacttgcagctaagcatggaaaagttggagaatgaattgtcctcttggaagtcattgctaaatgacattcctggtgtgtcctgtcctgatgacatagttatgagattctcggtgctacagaatgaggtggttcaaagcactatgaagattggggaagcaagtacccgtattaaacaactggaggagacgctggaggctatacaacttggcagacagaatgctgtaagtgaggctgcattagcgaaagagaaatctgaggctctcaaaacagacgtgaagagaattgaagtaatgctcactttggtcacggaggagaaagaacaatagaaagctgttgttaatgaattaaggaagtcaaacagtgaaggatctgtgtctggagccgcagatggagcccttattcaggggtttgaatcttctcttgcaaagaaggagaactatattaaggatttagagcaggatctaaatcaactgaaggatgtcaataatcgtcaacgtactgaaatagaacttctaaatgagaaactagttgatgaagcaaggaggaataagtcgctggaaagggatagtgatcgtcttcgctctgagatctctttactggagtcaaagctgggtcatggtgattattctgccgcaaatacaagggttttgcgcatggtgaatactcttggtgttgaaaacgaggcaaaacaaacaatagaggctttacaagctgagttacagaagacaaaagaaagacttcaagctgttgaagaattaaagagccagtctggagatgctgggaagctagttgactctcatataactggaaagattgctcaactaaaagagcaaattgctacgcttgaaaaacgtgaagagaggtacaaaactgtttttgctgatagaatttccgtgtttagaagggcttgttgtgagctttttggttataagattgtaatggacgaacatcagcgtcccaatggaatcccagtgactcggtttactctccagtctatatatgctcaaagtgatgatgaaaaactcgagtttgaatacgagtcaggaaacaccagtattctaaacaatgagtatgcctctcagggcgacatagcgaagcagatagaaatattcatcaggaaattcaactcgattccagcttttacagccaacttaacgatggaatcattcaaccgtcggactctatattgagagcactgcgtccttatttccaactctgtgttttgtatatttctaaagcctgctgaatagaaactgaaactcgaaagccgcagcttagaacactggccttatctatatctacctctggttcgttatgtctgctacaattgtggtgtcagtaactctattttggtatgaaagaaactggtttcgatt

SEQ ID NO: 20624 - protein, 440 aa, Arabidopsis thaliana
  peptide (1)..(440): Ceres Seq. ID no. 14309905
MILRTPQPKRLRSDAGESPVPTGATGSGNQLVIYEDSPLPAPAPAPLQSSHDHSADQHLCTYQCRQMVKADVLDALSKAEKQVEESQTKLLTLNANFTEADAERKHFRDKFLYSEQELAAAKAREKMLQEQLLMEINNSQERYTKELQSCRELEVKLQNEMNLRKKAESFAATAEEKAKLLEDKLTQLSGSVDREKKRLNNDIAQLGKEAKLSVSRIGADLERMQCRAQNAETESNLLRSQLEHLKLKFDECLQEKTEVDKKLSSFTSEAASSSDNSVLVKHLQEELKRYEAEVREARKLKSRHLDAELLNVNLLEEQSRRERAESELSKFHDLQLSMEKLENELSSWKSLLNDIPGVSCPDDIVMRFSVLQNEVVQSTMKIGEASTRIKQLEETLEAIQLGRQNAVSEAALAKEKSEALKTDVKRIEVMLTLVTEEKEQ

SEQ ID NO: 20625 - protein, 374 aa, Arabidopsis thaliana
  peptide (1)..(374): Ceres Seq. ID no. 14309906
MVKADVLDALSKAEKQVEESQTKLLTLNANFTEADAERKHFRDKFLYSEQELAAAKAREKMLQEQLLMEINNSQERYTKELQSCRELEVKLQNEMNLRKKAESFAATAEEKAKLLEDKLTQLSGSVDREKKRLNNDIAQLGKEAKLSVSRIGADLERMQCRAQNAETESNLLRSQLEHLKLKFDECLQEKTEVDKKLSSFTSEAASSSDNSVLVKHLQEELKRYEAEVREARKLKSRHLDAELLNVNLLEEQSRRERAESELSKFHDLQLSMEKLENELSSWKSLLNDIPGVSCPDDIVMRFSVLQNEVVQSTMKIGEASTRIKQLEETLEAIQLGRQNAVSEAALAKEKSEALKTDVKRIEVMLTLVTEEKEQ

SEQ ID NO: 20626 - protein, 314 aa, Arabidopsis thaliana
  peptide (1)..(314): Ceres Seq. ID no. 14309907
MLQEQLLMEINNSQERYTKELQSCRELEVKLQNEMNLRKKAESFAATAEEKAKLLEDKLTQLSGSVDREKKRLNNDIAQLGKEAKLSVSRIGADLERMQCRAQNAETESNLLRSQLEHLKLKFDECLQEKTEVDKKLSSFTSEAASSSDNSVLVKHLQEELKRYEAEVREARKLKSRHLDAELLNVNLLEEQSRRERAESELSKFHDLQLSMEKLENELSSWKSLLNDIPGVSCPDDIVMRFSVLQNEVVQSTMKIGEASTRIKQLEETLEAIQLGRQNAVSEAALAKEKSEALKTDVKRIEVMLTLVTEEKEQ

SEQ ID NO: 20627 - DNA, 1240 bp, Arabidopsis thaliana
  misc_feature (1)..(1240): Ceres Seq. ID no. 15175965
gagctattcagtactacagaggtctcgggttcgaagccatctttttcctaaatccccaatttttttttttttccctcgtttccgaatcttttaccggcgagactctgccatggattcaggcgaacaaaagtctaagcggaggttccaaccaaatcctccgaggccttctcgccgtcttccgatcgctccaacctcaaacaccgaagctgaggaggatgaagagaatataaaagcatctcgccaatttgacagacgtatcgtcggcaggagacccaaaaccgaaacgaaagcttcttctcctgaagttgcattccaaccaagcttgtcaccacttgcaataaggtcctttggtgttcctaaagaagatgacaagcccaattctgatgttaatccgtcttctcctgctagtattcttcctgctgtttcgtctgttactgctgcccaagaagatggagaagaggttcataattttgttacaagaactggggatgactacgttgaaccttgggattatagaaactcctactatcctactgttcttcctttgagaaagcctaactctggtgatatagaacttcttgaccaggaggaatttggggaggtggctaaaaaccgtgattatgatgagaacaccatcaactccgcagaagaactcggtctgacatcggtgcaacacagcaaaaaacagatgtttatctttaagatcccaaactgtctccctgtagtgaagcaaacgacaggagcaaccaccaagagatcggtacgggagtatagttcagggataagcaacccttttgaaggtttaccagagggattcatgggcaaaatgctggtttacaagagcggtgctgtcaagttgaaagttggagatgccctctttgatgtctcgccaggtccaggtacaaaaatccctaatgatgtggtagcaatagacatcaaagggaggaactgcagtcgcattggttcttcagcgaagtttgttactgttactcccgatgttgagtctcttttgaaccctgcttcagacatggaaacacagaagtgaaggttgctctggaaatagccggtcctgttcatacaaggatgtgaaaaagcgtagtattgaccacttagattctgtatctacaaactaatcttcaactatgatcgtaaaaaaactcttcttgcctccttggtgtcttcttttgtaataagagattcagtagttgttgggataaaagaaaatgctcaacattttgac

SEQ ID NO: 20628 - protein, 347 aa, Arabidopsis thaliana
  peptide (1)..(347): Ceres Seq. ID no. 15175966
SYSVLQRSRVRSHLFPKSPIFFFFPRFRIFYRRDSAMDSGEQKSKRRFQPNPPRPSRRLPIAPTSNTEAEEDEENIKASRQFDRRIVGRRPKTETKASSPEVAFQPSLSPLAIRSFGVPKEDDKPNSDVNPSSPASILPAVSSVTAAQEDGEEVHNFVTRTGDDYVEPWDYRNSYYPTVLPLRKPNSGDIELLDQEEFGEVAKNRDYDENTINSAEELGLTSVQHSKKQMFIFKIPNCLPVVKQTTGATTKRSVREYSSGISNPFEGLPEGFMGKMLVYKSGAVKLKVGDALFDVSPGPGTKIPNDVVAIDIKGRNCSRIGSSAKFVTVTPDVESLLNPASDMETQK

SEQ ID NO: 20629 - protein, 311 aa, Arabidopsis thaliana
  peptide (1)..(311): Ceres Seq. ID no. 15175967
MDSGEQKSKRRFQPNPPRPSRRLPIAPTSNTEAEEDEENIKASRQFDRRIVGRRPKTETKASSPEVAFQPSLSPLAIRSFGVPKEDDKPNSDVNPSSPASILPAVSSVTAAQEDGEEVHNFVTRTGDDYVEPWDYRNSYYPTVLPLRKPNSGDIELLDQEEFGEVAKNRDYDENTINSAEELGLTSVQHSKKQMFIFKIPNCLPVVKQTTGATTKRSVREYSSGISNPFEGLPEGFMGKMLVYKSGAVKLKVGDALFDVSPGPGTKIPNDVVAIDIKGRNCSRIGSSAKFVTVTPDVESLLNPASDMETQK

SEQ ID NO: 20630 - DNA, 2500 bp, Arabidopsis thaliana
  misc_feature (1)..(2500): Ceres Seq. ID no. 14315774
ggcgcaacgttgtaacaaaaatcgtcctctcagttccaatctctctcagattctcctcctcatcacaattcctcactcctttgattcttgtcccagagtcacgtcctctcctattcgggtctctacagagtctaactctgacccgacccgacccaattcactaaatggaggacgaaccaaagctcccaaccgatgacggtccaactttcgacgaatcgtgtaaaatctcgtctgagatattgaccgccggtgatcggaaattacttaaagttgaactcctcaaagaggagaccacgctcgtatcgtggaagaagcttatggatgaggctagcaaagaaaacggcggcttgttcgtttcggctcccgaacggcctcttaatgccaaccctaacctcgagtttcgccttgcaccgggggcacaaacagagaatgaaatggtgaatcaacctcatcctaatcgtcttaactctgttatagccaagattgagagactttatatgggtaaagacggtagtgatggggaagagttagacggtgctcctgacgatgatgactatgacactgaagattcatttatcgatgatgctgaattggatgagtattttgaagttgataattcgccaattaaacatgatggattttttgtcaatagaggaaagttagaacgaattgaaccttcagctacatcgaaccagcagcaaccaaagaaaaggcgaaggaaggagtcagcaaaaccttgtggcgatgttgttgatgtatccagaaaacaagccaagatggctaagacggctgggggaaaggatcaatctgcttctcctgggccctcttcgaagaaaatttccaatgattcaaagacggtgcaagattcgttttcccctttgaaagcgcaaaatggcaatgattccttagttttggaaaatgtgaagcatactgataaagcgaatcaccagccaatgaatgccacgagtccgaagtcaaaggcagctggatcttctggcccccttcatccgaagtgcagcagcaaaagtgttcatgaacaatctaattcccctccaggaaaatctcggccaaatgtttcggcaaaatcagcagtagttcgtcagcaagttaacaatggcatgcctgacctggacactgcaacggaaagcaaaacatctattcaaatatctaaaaaaagcggttcaaatggccggcctaaatactcgacacttgagaaagccatcaggaatttggagaaggtggtcgctgaatcaaggcctcctgctgccactgagaatcaagatgccgatatctcttcccaagcagtgaagaggggattgccaggagatgtaaaattgcatcttgctaaagttgctagaatcgcgtatgcgagccaaggtgaaatatcaggagagttaatcaatcgtctcatgggcattgtcggtcatctaatacagattagatcacttaagaggaacttgaaaatcatgattgattcgatcgtcactgcaaatcgagaaaaagatactagatttcagcggatcaagagtgaaataactgagatgttaaaaacacaagttccacttatggaatcccaggaaacaaatcaagaagctggaacatcagacgattttcaggatgttggatctcttggaaagtcacctgtgaagaagtttgtcatggatgtggcgctggaggaaaaattgtgtgatctatatgacgtgtttgttgagggaatggatgaacattcaggttcacaaatcagaaagctttattcagatctagctcaactctggcccaatagtttagttgacaatcatgagatcaggcgtgccatttgccgggaaaaggaaaggcggagagcattggaaggaaacattgggaaggagatggatcaaacgaagataacaaagaagaaacagacacaattggtccctaaatctgagggtattacttatcccgacaaggcttcaggtgttgaagttaaagcaagtgttgtcctaactgcaaccaccacgtccttagtggactgtcaacctgcagcagactcgtcctttgaaaggtcaaagcagcaacatgagaaattaaagcgaacttcgagcttaagcaatcctgcagcagaaggaaagaaagtcagaagaaagacagaaccagctctagaagaaactcacctgcccgcagagaaacccctcgttctggccctgaagcggcagacacatctaaaatccaagacacataaacaggtacaggtacatccacagtccaaggcacataaacaggcacaggtacatccaaaggccaagacacagactcctccagacctgaacctgccaagttaggtactacagcttagattttttttctcaaagtctggctctagccttgcctttgtttttcgtagctatagtttcgcttctaatttttgcgcctagtattgattttctagtcgtttcttacgtagaagacgaagtccctctcctctgtacaaattaaagatgttaagagaagctccaattctttc

SEQ ID NO: 20631 - protein, 717 aa, Arabidopsis thaliana
  peptide (1)..(717): Ceres Seq. ID no. 14315775
MEDEPKLPTDDGPTFDESCKISSEILTAGDRKLLKVELLKEETTLVSWKKLMDEASKENGGLFVSAPERPLNANPNLEFRLAPGAQTENEMVNQPHPNRLNSVIAKIERLYMGKDGSDGEELDGAPDDDDYDTEDSFIDDAELDEYFEVDNSPIKHDGFFVNRGKLERIEPSATSNQQQPKKRRRKESAKPCGDVVDVSRKQAKMAKTAGGKDQSASPGPSSKKISNDSKTVQDSFSPLKAQNGNDSLVLENVKHTDKANHQPMNATSPKSKAAGSSGPLHPKCSSKSVHEQSNSPPGKSRPNVSAKSAVVRQQVNNGMPDLDTATESKTSIQISKKSGSNGRPKYSTLEKAIRNLEKVVAESRPPAATENQDADISSQAVKRGLPGDVKLHLAKVARIAYASQGEISGELINRLMGIVGHLIQIRSLKRNLKIMIDSIVTANREKDTRFQRIKSEITEMLKTQVPLMESQETNQEAGTSDDFQDVGSLGKSPVKKFVMDVALEEKLCDLYDVFVEGMDEHSGSQIRKLYSDLAQLWPNSLVDNHEIRRAICREKERRRALEGNIGKEMDQTKITKKKQTQLVPKSEGITYPDKASGVEVKASVVLTATTTSLVDCQPAADSSFERSKQQHEKLKRTSSLSNPAAEGKKVRRKTEPALEETHLPAEKPLVLALKRQTHLKSKTHKQVQVHPQSKAHKQAQVHPKAKTQTPPDLNLPS

SEQ ID NO: 20632 - protein, 666 aa, Arabidopsis thaliana
  peptide (1)..(666): Ceres Seq. ID no. 14315776
MDEASKENGGLFVSAPERPLNANPNLEFRLAPGAQTENEMVNQPHPNRLNSVIAKIERLYMGKDGSDGEELDGAPDDDDYDTEDSFIDDAELDEYFEVDNSPIKHDGFFVNRGKLERIEPSATSNQQQPKKRRRKESAKPCGDVVDVSRKQAKMAKTAGGKDQSASPGPSSKKISNDSKTVQDSFSPLKAQNGNDSLVLENVKHTDKANHQPMNATSPKSKAAGSSGPLHPKCSSKSVHEQSNSPPGKSRPNVSAKSAVVRQQVNNGMPDLDTATESKTSIQISKKSGSNGRPKYSTLEKAIRNLEKVVAESRPPAATENQDADISSQAVKRGLPGDVKLHLAKVARIAYASQGEISGELINRLMGIVGHLIQIRSLKRNLKIMIDSIVTANREKDTRFQRIKSEITEMLKTQVPLMESQETNQEAGTSDDFQDVGSLGKSPVKKFVMDVALEEKLCDLYDVFVEGMDEHSGSQIRKLYSDLAQLWPNSLVDNHEIRRAICREKERRRALEGNIGKEMDQTKITKKKQTQLVPKSEGITYPDKASGVEVKASVVLTATTTSLVDCQPAADSSFERSKQQHEKLKRTSSLSNPAAEGKKVRRKTEPALEETHLPAEKPLVLALKRQTHLKSKTHKQVQVHPQSKAHKQAQVHPKAKTQTPPDLNLPS

SEQ ID NO: 20633 - protein, 627 aa, Arabidopsis thaliana
  peptide (1)..(627): Ceres Seq. ID no. 14315777
MVNQPHPNRLNSVIAKIERLYMGKDGSDGEELDGAPDDDDYDTEDSFIDDAELDEYFEVDNSPIKHDGFFVNRGKLERIEPSATSNQQQPKKRRRKESAKPCGDVVDVSRKQAKMAKTAGGKDQSASPGPSSKKISNDSKTVQDSFSPLKAQNGNDSLVLENVKHTDKANHQPMNATSPKSKAAGSSGPLHPKCSSKSVHEQSNSPPGKSRPNVSAKSAVVRQQVNNGMPDLDTATESKTSIQISKKSGSNGRPKYSTLEKAIRNLEKVVAESRPPAATENQDADISSQAVKRGLPGDVKLHLAKVARIAYASQGEISGELINRLMGIVGHLIQIRSLKRNLKIMIDSIVTANREKDTRFQRIKSEITEMLKTQVPLMESQETNQEAGTSDDFQDVGSLGKSPVKKFVMDVALEEKLCDLYDVFVEGMDEHSGSQIRKLYSDLAQLWPNSLVDNHEIRRAICREKERRRALEGNIGKEMDQTKITKKKQTQLVPKSEGITYPDKASGVEVKASVVLTATTTSLVDCQPAADSSFERSKQQHEKLKRTSSLSNPAAEGKKVRRKTEPALEETHLPAEKPLVLALKRQTHLKSKTHKQVQVHPQSKAHKQAQVHPKAKTQTPPDLNLPS

SEQ ID NO: 20634 - DNA, 2411 bp, Arabidopsis thaliana
  misc_feature (1)..(2411): Ceres Seq. ID no. 14310024
  misc_feature (1)..(2411): Ortholog of  Ceres SEQ ID NO 15177184 as cited in SEQ ID NO 58157
ggatgaagaccagctcaaagccaggtcaaaatccatcaatcctggcctcatcaatgttaaaaatctttactttcacacatctctagatcttccatagaaggatcaatcaaaagctgtaatctttctttcttcctcgtagctccttctcttgcggatccttgtcggtacacttctacattctcaaatctgattcctttctggagttgctcctgagctacggttcagcttcaattacttcgatctcgtgtaaaaatcacttctagaagctttgataagctttgataggagttggttttactctttagggttttgtttgagtttgatctttattgtatagatgttgtgatcttcgtacactctatatatgtttccaagggtttctatgaggcgtcgctctgctgaagtttctcctacagagccaatggagaagggaaatggaaaaaatcagactaatcgaatctgtttgttggttgctttgtcactctttttctgggcattgttgttgtacttccattttgttgtcttagggactagtaacattgataaacagctccaattgcaacctagttatgctcaatctcagccatcatcagtctctcttcgtgttgataaattccctatagagcctcatgcagctccatcgaaaccacctcccaaagagcctttagttactatcgataagccaatactccctcctgcaccagtagccaattctagttccacctttaagccacctagaattgttgagagcgggaagaaacaggagttttcgtttataagagccttgaagacagtagacaacaagagtgacccttgtggagggaagtacatttatgttcacaatctaccctcaaagttcaatgaggatatgcttagagactgtaagaagcttagtctctggactaacatgtgtaagttcacaaccaatgctggccttgggccgccgcttgagaatgttgaaggtgtcttctctgatgaaggttggtatgcgactaatcagtttgctgttgatgtgatattcagcaaccggatgaagcagtacaaatgtttgacaaatgattcttcccttgctgctgccatctttgtgccgttctatgctggattcgacattgctaggtatctgtggggatacaatatctcgagaagggatgctgcttcgcttgagttggtcgattggctcatgaagcggcctgagtgggatataatgaggggaaaagatcatttccttgtggcgggtaggataacgtgggattttaggagattgtctgaagaagaaactgattggggcaacaagcttctcttcttaccggctgccaagaacatgtctatgcttgtggttgagtcgagcccatggaatgctaatgattttgggatcccgtacccaacctacttccacccagcaaaggactcagaggtttttgaatggcaagaccggatgagaaacctggaaaggaagtggcttttctcgtttgcaggagccccacgacctgacaatccgaaatctatcagagggcagatcattgatcaatgtcgaaactcaaatgttggcaaattattagaatgcgattttggggagagcaaatgccatgcaccaagcagcattatgcaaatgtttcaaagctctctcttctgcctgcagccacagggagactcttacacccgaagatcggcatttgactcaatgcttgccggttgtataccggtcttcttccatccgggttcagcctacacgcaatacacgtggcatctacccaagaactacacaacctactcggtattcatccccgaggatgatgttcggaagagaaacataagcatcgaggagcgactcctccagattccagccaagcaggtcaagataatgagagagaatgtcatcaacctcatcccaaggctgatctacgcagacccgagatcagaactggagacgcagaaagatgcatttgatgtctcggtacaggctgtgatagacaaggtgactcggttaaggaagaacatgatcgagggccgaaccgagtatgactacttcgtggaggagaacagctggaagtatgcgttgctggaggaaggccaacgggaagcagggggccatgtgtgggacccgttcttctccaaaccaaagcccggagaagatggcagcagcgatggtaatggaggcacgactatttcagcagatgcagctaagaattcatggaagagtgagcagagagaaagacacagtgaaaagagacagaaaccacattttgttacggttttgatatagttttcggttactatttatacggacaaaaaatgatttatttttgttgtattggtatcaaatgtagtttctccagtttcatagagataagtttgtttgtatcagttacccacagaaattaataataagaagtgacccttttcaagttttt

SEQ ID NO: 20635 - protein, 632 aa, Arabidopsis thaliana
  peptide (1)..(632): Ceres Seq. ID no. 14310025
MFPRVSMRRRSAEVSPTEPMEKGNGKNQTNRICLLVALSLFFWALLLYFHFVVLGTSNIDKQLQLQPSYAQSQPSSVSLRVDKFPIEPHAAPSKPPPKEPLVTIDKPILPPAPVANSSSTFKPPRIVESGKKQEFSFIRALKTVDNKSDPCGGKYIYVHNLPSKFNEDMLRDCKKLSLWTNMCKFTTNAGLGPPLENVEGVFSDEGWYATNQFAVDVIFSNRMKQYKCLTNDSSLAAAIFVPFYAGFDIARYLWGYNISRRDAASLELVDWLMKRPEWDIMRGKDHFLVAGRITWDFRRLSEEETDWGNKLLFLPAAKNMSMLVVESSPWNANDFGIPYPTYFHPAKDSEVFEWQDRMRNLERKWLFSFAGAPRPDNPKSIRGQIIDQCRNSNVGKLLECDFGESKCHAPSSIMQMFQSSLFCLQPQGDSYTRRSAFDSMLAGCIPVFFHPGSAYTQYTWHLPKNYTTYSVFIPEDDVRKRNISIEERLLQIPAKQVKIMRENVINLIPRLIYADPRSELETQKDAFDVSVQAVIDKVTRLRKNMIEGRTEYDYFVEENSWKYALLEEGQREAGGHVWDPFFSKPKPGEDGSSDGNGGTTISADAAKNSWKSEQRERHSEKRQKPHFVTVLI

SEQ ID NO: 20636 - protein, 626 aa, Arabidopsis thaliana
  peptide (1)..(626): Ceres Seq. ID no. 14310026
MRRRSAEVSPTEPMEKGNGKNQTNRICLLVALSLFFWALLLYFHFVVLGTSNIDKQLQLQPSYAQSQPSSVSLRVDKFPIEPHAAPSKPPPKEPLVTIDKPILPPAPVANSSSTFKPPRIVESGKKQEFSFIRALKTVDNKSDPCGGKYIYVHNLPSKFNEDMLRDCKKLSLWTNMCKFTTNAGLGPPLENVEGVFSDEGWYATNQFAVDVIFSNRMKQYKCLTNDSSLAAAIFVPFYAGFDIARYLWGYNISRRDAASLELVDWLMKRPEWDIMRGKDHFLVAGRITWDFRRLSEEETDWGNKLLFLPAAKNMSMLVVESSPWNANDFGIPYPTYFHPAKDSEVFEWQDRMRNLERKWLFSFAGAPRPDNPKSIRGQIIDQCRNSNVGKLLECDFGESKCHAPSSIMQMFQSSLFCLQPQGDSYTRRSAFDSMLAGCIPVFFHPGSAYTQYTWHLPKNYTTYSVFIPEDDVRKRNISIEERLLQIPAKQVKIMRENVINLIPRLIYADPRSELETQKDAFDVSVQAVIDKVTRLRKNMIEGRTEYDYFVEENSWKYALLEEGQREAGGHVWDPFFSKPKPGEDGSSDGNGGTTISADAAKNSWKSEQRERHSEKRQKPHFVTVLI

SEQ ID NO: 20637 - protein, 613 aa, Arabidopsis thaliana
  peptide (1)..(613): Ceres Seq. ID no. 14310027
MEKGNGKNQTNRICLLVALSLFFWALLLYFHFVVLGTSNIDKQLQLQPSYAQSQPSSVSLRVDKFPIEPHAAPSKPPPKEPLVTIDKPILPPAPVANSSSTFKPPRIVESGKKQEFSFIRALKTVDNKSDPCGGKYIYVHNLPSKFNEDMLRDCKKLSLWTNMCKFTTNAGLGPPLENVEGVFSDEGWYATNQFAVDVIFSNRMKQYKCLTNDSSLAAAIFVPFYAGFDIARYLWGYNISRRDAASLELVDWLMKRPEWDIMRGKDHFLVAGRITWDFRRLSEEETDWGNKLLFLPAAKNMSMLVVESSPWNANDFGIPYPTYFHPAKDSEVFEWQDRMRNLERKWLFSFAGAPRPDNPKSIRGQIIDQCRNSNVGKLLECDFGESKCHAPSSIMQMFQSSLFCLQPQGDSYTRRSAFDSMLAGCIPVFFHPGSAYTQYTWHLPKNYTTYSVFIPEDDVRKRNISIEERLLQIPAKQVKIMRENVINLIPRLIYADPRSELETQKDAFDVSVQAVIDKVTRLRKNMIEGRTEYDYFVEENSWKYALLEEGQREAGGHVWDPFFSKPKPGEDGSSDGNGGTTISADAAKNSWKSEQRERHSEKRQKPHFVTVLI

SEQ ID NO: 20638 - DNA, 2524 bp, Arabidopsis thaliana
  misc_feature (1)..(2524): Ceres Seq. ID no. 14310132
aaaaacacccctcctcgattgtcgaacagtccaggttcctgaaatgttctcgtcagggcgacattagggtttcttcattcccgtccttcagattcgtatttgaaacaggaaggagagaaaaatgggtatacaagggcttttgccgttgttgaaatcgataatggtaccgattcatatcaaggagctcgagggttgtatcgtcgccgtcgatacatattcatggctacacaaaggggctttatcttgtagccgagagctctgcaagggattacccaccaagaggcatattcaatactgtatgcatagagtgaatttacttcgccatcatggagtgaagcctatcatggtctttgatggaggtccgttaccgatgaaactagaacaagagaataagcgtgctaggtccagaaaggaaaatcttgctcgtgcattggagcatgaagcaaatggaaattcctcagctgcttatgagtgctactcaaaggccgtagatatttcaccttctattgcacatgagttgatacaggttctgaggcaggagaatgttgattacgttgttgctccttacgaagctgatgcgcagatggcattcttagctattactaagcaagttgatgcgattatcactgaggattctgatctcataccttttggctgcccaagaatcattttcaaaatggacaagtttggtcatggtgttgagtttcaagcctccaagctacccaaaaataaggatctcagtctatcaggattttcaagccaaatgcttctcgaaatgtgcatattaagtggctgcgattatttgcagtcacttccaggaatgggactcaaaagagcacatgcactcattacaaaattcaaaagctatgacagggtaattaagcacttaaagtacagcacagtttcagttcctcctctttatgaagagtcattcaagagagctttactgactttcaagcatcaacgtgtctatgacccaaatgctgaagatatcatacacttgtgtgacatttctgacaaccttggtgaagattcagattttgttggcccatcgatgccacaagatattgctaagggtatagcactaggccagcttgatcccttcacacagttgccattccaggctgagagtgttactcctaaatcggctgttgatgatatatcccgtcccaaaagtttcaaacctgaaactgtaaagaaaaagcttgatttgccagtccaaaaaaaccttctcaccaagtacttctgctttgcgtctgttgaggcaaaaagaaaattcaaggctcctaggatatcaccaatgtctctgaccccaactgatgagtctccaagcattcctgatgacaacacaccagatttagatgctctttcaagccagacaacaaatgaatccccggtttatagcttgggtgagaatccatgtgttagcgaagttgcagagaaaagagattcacccgatgacgatgcagtggaaaggaatcacaaggaccttcatcataaatactgcgaacgggaagtggataggccgaagtcagatagtttgaaggttatagtaagaagcaagtattttaagcagaaacaggaggacaaaagtctgaaacaatcgatcccatgtcttaatgattgctctgtgattggtcagagaaaggctgttaaaactgtgattaacatgtcaagcgcgtctaaaagagaagagagtcacagagctatagcaacaagtccatgtttacaccatgaccgaatctacaacgatcatgaagatgctaaagaagcgagtttctctgccatgaacgaggtggctgagaggacaataaacacccacaagattaaccatcagatcaatgaagaagaacagaacccatccgttgaaattccttctgcctttagtactcccgagaatgttatacctctctcttccattgctattgatagttgccatggagttgcaacagggaagaggaagcttgactcagatgaaaaccttcacaaggaaaatttgaaatccaagcacatgcgcatggatgaaactgatactgctcttaatgcagaaacaccattggaaaccgatgatgttgagaagtttggatcgaacatttcacatatagggcattactcagaaatagcagagaaatcagtggaaagatttgtctcagctatatcgtctttcaaatattctgggactggctctcgtgctagcggtctccgtgcccctctcaaagatatccgcaacacttgtccgtccaaagggttatctcttaaaccagacatcagcaagtttggctatgcgtcaagcaaccgacacatggtgacaaagtcaaggagaatgtgagctcagatttgtaagttaaccatctctttagagccacatgtgagagctttagctttagaattaacttcttggtcgcatgatgatatttttggtgttgtgtctgtattagctttctacttactgtgcatagcattcttgttcaaagacacttcacacaacagttggattcataaatgaaacaactttcaacttgtc

SEQ ID NO: 20639 - protein, 735 aa, Arabidopsis thaliana
  peptide (1)..(735): Ceres Seq. ID no. 14310133
MGIQGLLPLLKSIMVPIHIKELEGCIVAVDTYSWLHKGALSCSRELCKGLPTKRHIQYCMHRVNLLRHHGVKPIMVFDGGPLPMKLEQENKRARSRKENLARALEHEANGNSSAAYECYSKAVDISPSIAHELIQVLRQENVDYVVAPYEADAQMAFLAITKQVDAIITEDSDLIPFGCPRIIFKMDKFGHGVEFQASKLPKNKDLSLSGFSSQMLLEMCILSGCDYLQSLPGMGLKRAHALITKFKSYDRVIKHLKYSTVSVPPLYEESFKRALLTFKHQRVYDPNAEDIIHLCDISDNLGEDSDFVGPSMPQDIAKGIALGQLDPFTQLPFQAESVTPKSAVDDISRPKSFKPETVKKKLDLPVQKNLLTKYFCFASVEAKRKFKAPRISPMSLTPTDESPSIPDDNTPDLDALSSQTTNESPVYSLGENPCVSEVAEKRDSPDDDAVERNHKDLHHKYCEREVDRPKSDSLKVIVRSKYFKQKQEDKSLKQSIPCLNDCSVIGQRKAVKTVINMSSASKREESHRAIATSPCLHHDRIYNDHEDAKEASFSAMNEVAERTINTHKINHQINEEEQNPSVEIPSAFSTPENVIPLSSIAIDSCHGVATGKRKLDSDENLHKENLKSKHMRMDETDTALNAETPLETDDVEKFGSNISHIGHYSEIAEKSVERFVSAISSFKYSGTGSRASGLRAPLKDIRNTCPSKGLSLKPDISKFGYASSNRHMVTKSRRM

SEQ ID NO: 20640 - protein, 722 aa, Arabidopsis thaliana
  peptide (1)..(722): Ceres Seq. ID no. 14310134
MVPIHIKELEGCIVAVDTYSWLHKGALSCSRELCKGLPTKRHIQYCMHRVNLLRHHGVKPIMVFDGGPLPMKLEQENKRARSRKENLARALEHEANGNSSAAYECYSKAVDISPSIAHELIQVLRQENVDYVVAPYEADAQMAFLAITKQVDAIITEDSDLIPFGCPRIIFKMDKFGHGVEFQASKLPKNKDLSLSGFSSQMLLEMCILSGCDYLQSLPGMGLKRAHALITKFKSYDRVIKHLKYSTVSVPPLYEESFKRALLTFKHQRVYDPNAEDIIHLCDISDNLGEDSDFVGPSMPQDIAKGIALGQLDPFTQLPFQAESVTPKSAVDDISRPKSFKPETVKKKLDLPVQKNLLTKYFCFASVEAKRKFKAPRISPMSLTPTDESPSIPDDNTPDLDALSSQTTNESPVYSLGENPCVSEVAEKRDSPDDDAVERNHKDLHHKYCEREVDRPKSDSLKVIVRSKYFKQKQEDKSLKQSIPCLNDCSVIGQRKAVKTVINMSSASKREESHRAIATSPCLHHDRIYNDHEDAKEASFSAMNEVAERTINTHKINHQINEEEQNPSVEIPSAFSTPENVIPLSSIAIDSCHGVATGKRKLDSDENLHKENLKSKHMRMDETDTALNAETPLETDDVEKFGSNISHIGHYSEIAEKSVERFVSAISSFKYSGTGSRASGLRAPLKDIRNTCPSKGLSLKPDISKFGYASSNRHMVTKSRRM

SEQ ID NO: 20641 - protein, 676 aa, Arabidopsis thaliana
  peptide (1)..(676): Ceres Seq. ID no. 14310135
MHRVNLLRHHGVKPIMVFDGGPLPMKLEQENKRARSRKENLARALEHEANGNSSAAYECYSKAVDISPSIAHELIQVLRQENVDYVVAPYEADAQMAFLAITKQVDAIITEDSDLIPFGCPRIIFKMDKFGHGVEFQASKLPKNKDLSLSGFSSQMLLEMCILSGCDYLQSLPGMGLKRAHALITKFKSYDRVIKHLKYSTVSVPPLYEESFKRALLTFKHQRVYDPNAEDIIHLCDISDNLGEDSDFVGPSMPQDIAKGIALGQLDPFTQLPFQAESVTPKSAVDDISRPKSFKPETVKKKLDLPVQKNLLTKYFCFASVEAKRKFKAPRISPMSLTPTDESPSIPDDNTPDLDALSSQTTNESPVYSLGENPCVSEVAEKRDSPDDDAVERNHKDLHHKYCEREVDRPKSDSLKVIVRSKYFKQKQEDKSLKQSIPCLNDCSVIGQRKAVKTVINMSSASKREESHRAIATSPCLHHDRIYNDHEDAKEASFSAMNEVAERTINTHKINHQINEEEQNPSVEIPSAFSTPENVIPLSSIAIDSCHGVATGKRKLDSDENLHKENLKSKHMRMDETDTALNAETPLETDDVEKFGSNISHIGHYSEIAEKSVERFVSAISSFKYSGTGSRASGLRAPLKDIRNTCPSKGLSLKPDISKFGYASSNRHMVTKSRRM

SEQ ID NO: 20642 - DNA, 2130 bp, Arabidopsis thaliana
  misc_feature (1)..(2130): Ceres Seq. ID no. 15168666
gaaagtcactgctgaactttgttcagattgatcagttgaggatatattttgatccatctttgaaaaagtttgtcttggccaagaactctcctgtttctagaactaacacccctcttcatgaatctcctgatgcacttaaaacaaatgggactgaaatggatcacaaggctgctagaagatttgattcagtttcttctaatgtgggctcactgcagtctaaagtgcagttttgtcctgatggtgatgatgaagaagaaattgttttcaagccaacagcttatgagaagttttcaaaagtttcttcagatctgtcagttaatggatacgtccatcctgtaccagtgtctgctgctggtgggccaaccaatgctagtttagtgcctgttcagaacactgcatcaatgtctgcaactcgtttaccatccaatccacatgcaactggtttgccatccaatggtgggtcacttccaagtactgcatctctatcagctgctggtaattacaacactgatcagtcgcttcccaggtcgtctgttggttggactgattgggctgtcaatagtgagcaaaatgttactcctagcattgctccaagatttgaactcatgcagtctgttgaggagcctgtttccagctggacaagcagtggggcacagcatgttggtcctcagcacaagcacacaggtttaactttcccagatgttgtctctgaaccatgtgtatctgcatcaatggttcaatgttttagtagctccgattattcgaaatttctcagagaacaagaaatattcttaatgaatggactgaagactgtcaacataactggaaatggctatctagagcagagattgcagcctggattgagtggtttacagtctatgggttattcatctcagatacctattcaacctggtggtaccactgcaaacctgatgcataatcatgtcaaaattactggagagactgtcccctctacacttgattcagttgtaccttcaatagcaccatcaggtggcatgccaatcaaacttacagaagcaccactaactgcttcgaagaagaaccctgttagtcgtccatcaaagcctgttggaccaccaccaggatttaatcatgtaaccccaaagcgtcaagatgattctattccggttgaaaaactgcagaacccacaggtcgatgattacagctggctagatagctatcagcaatcgattgatcatgttcacagcttaagaactatttatcctggtgtcagtgatactagcactgcatttgccactccattctctttccctgggaggatacacacacaagggaccaatgaaaagacttggcaagatttccacctttttgagccttcaaaacagaacatgttccaaacttaccaccaaagaaatctgcaaagtggtcaaatggatgaacaagagccagcaaattctatctggtctagcagttaccatgtgtgatttggtaacttttaccaggatgattgctggagtttctggggacagactattggattaagtggcacgacctgatctattgagcttagcccatacctgcagcacttagtgttaaatttcttttgagaatggtagtctttcaagcatgacaatggctgctgttaagtttgggagtgccgccatcttttgggccaaagatggggtagaggatgattgatctgtcggcagtctgatggcgatgaattaatacgaggtcttcaatgctgacagaaagggttaatgaaacaaacttgaatccagtgattataggcactccgcacggaccacatgattcatctctcactggacatattgctaccacaagaagcggacggttgctgccgcaactaaaacatgccgtgtggatgtcagttttcagttggcctatgccatccagagagtaaaaagtgaggatcaacgagcatgttgccgagtagtttctcaagtataaattactgcgtctacttgctccttcgctttgggaacaatgtatcaggttgtaagttgcaattaaatgtttggaacagtttgtcatggtaattgtgtggctcctatatggctatattgttctctgtaattgtatggaccaaccctaagtgttacatacaaacatctttgatttgactcc

SEQ ID NO: 20643 - protein, 487 aa, Arabidopsis thaliana
  peptide (1)..(487): Ceres Seq. ID no. 15168667
KSLLNFVQIDQLRIYFDPSLKKFVLAKNSPVSRTNTPLHESPDALKTNGTEMDHKAARRFDSVSSNVGSLQSKVQFCPDGDDEEEIVFKPTAYEKFSKVSSDLSVNGYVHPVPVSAAGGPTNASLVPVQNTASMSATRLPSNPHATGLPSNGGSLPSTASLSAAGNYNTDQSLPRSSVGWTDWAVNSEQNVTPSIAPRFELMQSVEEPVSSWTSSGAQHVGPQHKHTGLTFPDVVSEPCVSASMVQCFSSSDYSKFLREQEIFLMNGLKTVNITGNGYLEQRLQPGLSGLQSMGYSSQIPIQPGGTTANLMHNHVKITGETVPSTLDSVVPSIAPSGGMPIKLTEAPLTASKKNPVSRPSKPVGPPPGFNHVTPKRQDDSIPVEKLQNPQVDDYSWLDSYQQSIDHVHSLRTIYPGVSDTSTAFATPFSFPGRIHTQGTNEKTWQDFHLFEPSKQNMFQTYHQRNLQSGQMDEQEPANSIWSSSYHV

SEQ ID NO: 20644 - protein, 436 aa, Arabidopsis thaliana
  peptide (1)..(436): Ceres Seq. ID no. 15168668
MDHKAARRFDSVSSNVGSLQSKVQFCPDGDDEEEIVFKPTAYEKFSKVSSDLSVNGYVHPVPVSAAGGPTNASLVPVQNTASMSATRLPSNPHATGLPSNGGSLPSTASLSAAGNYNTDQSLPRSSVGWTDWAVNSEQNVTPSIAPRFELMQSVEEPVSSWTSSGAQHVGPQHKHTGLTFPDVVSEPCVSASMVQCFSSSDYSKFLREQEIFLMNGLKTVNITGNGYLEQRLQPGLSGLQSMGYSSQIPIQPGGTTANLMHNHVKITGETVPSTLDSVVPSIAPSGGMPIKLTEAPLTASKKNPVSRPSKPVGPPPGFNHVTPKRQDDSIPVEKLQNPQVDDYSWLDSYQQSIDHVHSLRTIYPGVSDTSTAFATPFSFPGRIHTQGTNEKTWQDFHLFEPSKQNMFQTYHQRNLQSGQMDEQEPANSIWSSSYHV

SEQ ID NO: 20645 - protein, 354 aa, Arabidopsis thaliana
  peptide (1)..(354): Ceres Seq. ID no. 15168669
MSATRLPSNPHATGLPSNGGSLPSTASLSAAGNYNTDQSLPRSSVGWTDWAVNSEQNVTPSIAPRFELMQSVEEPVSSWTSSGAQHVGPQHKHTGLTFPDVVSEPCVSASMVQCFSSSDYSKFLREQEIFLMNGLKTVNITGNGYLEQRLQPGLSGLQSMGYSSQIPIQPGGTTANLMHNHVKITGETVPSTLDSVVPSIAPSGGMPIKLTEAPLTASKKNPVSRPSKPVGPPPGFNHVTPKRQDDSIPVEKLQNPQVDDYSWLDSYQQSIDHVHSLRTIYPGVSDTSTAFATPFSFPGRIHTQGTNEKTWQDFHLFEPSKQNMFQTYHQRNLQSGQMDEQEPANSIWSSSYHV

SEQ ID NO: 20646 - DNA, 1558 bp, Arabidopsis thaliana
  misc_feature (1)..(1558): Ceres Seq. ID no. 14310168
ggaagaagaaggaagctatggattctgagaaggcactagagcttgtgaagtatggagctacacttctatttctcgatgttcctcaatatacactggtcggaatcgatactcagattttcgcagttggaccagctttcaaagggattaagatgatacctcctggaattcactttgtattctatagttcatcgacaagggatggtagagagttttcacctaccattggcttctttattgatgttgctccttctcaggttattgtacgaaaatggaatcagcaagacgagtggttaaccaaagtatctgaagaagaggaagggagatattctcaagcagtcaggtctttggagtttgacaaaaatcttggcccatacaatctaaggcaatatggggaatggaagcacttatctaactacattacgaaggatgttgttgaaaagtttgagccagttggaggagaaataacagtcacatatgaatctgctattctaaaaggtggacctaaaacggcaatggaaatagcacttgatacgcagatgaaaaaaagcaagttgatgacatcatctactgagcaacctaaagggaataggttttactacacgtctattcctcggattataaagcacaagggaatgtctggacaggagctaacctctatgaatcttgacaagactcaattgctagaaagcgtattgtcaaaggagtacaaagactcggaagatttgctacttggggagctacaattttcatttgttgcatttttgatggggcagtctcttgaatcgttcatgcagtggaagtccatagttagtcttttactgggctgcaccagtgcgccctttcagacgaggagtcagctatttacaaagttcatcaaagtcatctaccatcaactaaaatatggactacaaaaagagaatagtggtcctgagacgggcattcatgcgcttcttgatgattcttggctagcttcagatagctttctgcatttcctttgtaaggacttctttgcattagtggaagagacgtctgtagttgatggagatttattgtcatggacaaggaagttcaaagagttgcttgagaacagattaggatgggagtttcagaagaagagccctgttgacgggatttactttgaagaagatgatgagtatgctcctgtggttgagatgttggatgaaagtcatggagaatatatggataaaaccacttagacatcgatcgatgcagtctctgtcttcatagcttcttcagcttttgacctctcaagccattccaaaaagcagctgcgttgatcgctttcttaccaggaagctggacttctagtacctgaatcagcaacaccaaatattagctttataaatacttgattaatgtctgattatcacgtcctaacgcatctgctttttgtagtaacagttagtgagtttgtaactttctatagctttatgtgaatattagcagtaattttctatagctttacctccaaagctgtaccgcctctacaaggaaacaccaatgaacctttcttgaaagttacataatcttgttcacc

SEQ ID NO: 20647 - protein, 404 aa, Arabidopsis thaliana
  peptide (1)..(404): Ceres Seq. ID no. 14310169
KKKEAMDSEKALELVKYGATLLFLDVPQYTLVGIDTQIFAVGPAFKGIKMIPPGIHFVFYSSSTRDGREFSPTIGFFIDVAPSQVIVRKWNQQDEWLTKVSEEEEGRYSQAVRSLEFDKNLGPYNLRQYGEWKHLSNYITKDVVEKFEPVGGEITVTYESAILKGGPKTAMEIALDTQMKKSKLMTSSTEQPKGNRFYYTSIPRIIKHKGMSGQELTSMNLDKTQLLESVLSKEYKDSEDLLLGELQFSFVAFLMGQSLESFMQWKSIVSLLLGCTSAPFQTRSQLFTKFIKVIYHQLKYGLQKENSGPETGIHALLDDSWLASDSFLHFLCKDFFALVEETSVVDGDLLSWTRKFKELLENRLGWEFQKKSPVDGIYFEEDDEYAPVVEMLDESHGEYMDKTT

SEQ ID NO: 20648 - protein, 399 aa, Arabidopsis thaliana
  peptide (1)..(399): Ceres Seq. ID no. 14310170
MDSEKALELVKYGATLLFLDVPQYTLVGIDTQIFAVGPAFKGIKMIPPGIHFVFYSSSTRDGREFSPTIGFFIDVAPSQVIVRKWNQQDEWLTKVSEEEEGRYSQAVRSLEFDKNLGPYNLRQYGEWKHLSNYITKDVVEKFEPVGGEITVTYESAILKGGPKTAMEIALDTQMKKSKLMTSSTEQPKGNRFYYTSIPRIIKHKGMSGQELTSMNLDKTQLLESVLSKEYKDSEDLLLGELQFSFVAFLMGQSLESFMQWKSIVSLLLGCTSAPFQTRSQLFTKFIKVIYHQLKYGLQKENSGPETGIHALLDDSWLASDSFLHFLCKDFFALVEETSVVDGDLLSWTRKFKELLENRLGWEFQKKSPVDGIYFEEDDEYAPVVEMLDESHGEYMDKTT

SEQ ID NO: 20649 - protein, 355 aa, Arabidopsis thaliana
  peptide (1)..(355): Ceres Seq. ID no. 14310171
MIPPGIHFVFYSSSTRDGREFSPTIGFFIDVAPSQVIVRKWNQQDEWLTKVSEEEEGRYSQAVRSLEFDKNLGPYNLRQYGEWKHLSNYITKDVVEKFEPVGGEITVTYESAILKGGPKTAMEIALDTQMKKSKLMTSSTEQPKGNRFYYTSIPRIIKHKGMSGQELTSMNLDKTQLLESVLSKEYKDSEDLLLGELQFSFVAFLMGQSLESFMQWKSIVSLLLGCTSAPFQTRSQLFTKFIKVIYHQLKYGLQKENSGPETGIHALLDDSWLASDSFLHFLCKDFFALVEETSVVDGDLLSWTRKFKELLENRLGWEFQKKSPVDGIYFEEDDEYAPVVEMLDESHGEYMDKTT

SEQ ID NO: 20650 - DNA, 2894 bp, Arabidopsis thaliana
  misc_feature (1)..(2894): Ceres Seq. ID no. 14310206
gaattacttttatccattttctctgtatatatatagaaagcaaaagaaagcattttcatcacctaccatcctctgttttcatttcctctgtttttcaaacttcctctgttctctcatggctccacttcacgaatctctgtcatcaatcaacgatgtaatcgaatccaaacctctttttgttccaataactaagccaatcttgcagccaaactcatttaacctatccgaagggtctctctgtgccaaagactctactccaatcctctttgatgttcctcaaaacgtaactttcacaccattctcatctcactccatatccactgatgctcctctcccaatcctcctccgagttcaagccaacgctcacaaaggagggtttctcggattcaccaaagaatcaccctctgatcgtctcacaaactccttgggaagattcgaagacagagagtttctcagtcttttccggttcaaaatgtggtggtcgacggcttggatcgggaaatcagggtcggatcttcaagccgagactcagtgggtgatgctaaagattcctgagatcgattcctacgtggccatcataccaaccattgaaggagcttttagggcttcacttactcctggtgagaaaggtaatgtcttgatttgtgcagagagtggctcaactaaagtaaaagagtcatctttcaaatccattgcctacattcacatttgtgacaacccctataacctcatgaaagaggcttttagtgcacttcgtgttcatatgaacactttcaagcatctagaagagaagaagcttccgaaaatcgtcgataagtttggatggtgcacttgggatgcttgctacttgaccgttgatcctgcaaccatttggactggagttaaggagtttgaagatggtggggtgtgtccgaagtttgtcatcattgatgatggatggcaaagtattaactttgatggtgatgagctagacaaagacgctgagaatcttgttcttggtggggagcaaatgactgcgaggcttaccagcttcaaggagtgtaagaagtttagaaactataaaggtggatcctttataacatctgatgcatctcacttcaatcctctcaagccgaagatgcttatctacaaagcgaccgagcgaattcaggcgattatattgagacggaagttggttaaggagtctggggaacaagatctgaccgaacttgatgaaaagatcaagattttgagtgaagaactcaatgcaatgtttgatgaggttgagaaagaagagtctttgggttctgatgatgtttctggctcaggtatggcggctttcacaaaggatttgaggttaaggtttaagagtttagatgatatatatgtgtggcatgctctttgtggtgcttggaatggtgttaggcctgaaaccatgatggatttgaaggccaaggttgctccttttgagctttcacctagtctaggcgctacgatggctgatctcgcagtcgacaaggttgtagaagctgggattggtcttgttcatccttctaaagctcatgaattctacgactcgatgcactcttatcttgctagtgttggtgttacaggagccaagattgatgttttccaaaccttggagtcactagcagaagaacatggaggacgagtggagcttgctaaagcttactacgatggtctgaccgaatccatgatcaagaattttaatggaactgatgtcattgcgagtatgcaacagtgcaatgagttcttcttccttgccacaaagcaaatctctattggcagagttggtgatgatttttggtgacaagacccatatggtgacccacaaggagtatattggctacaaggagttcacatgattcactgttcttacaacagtatttggatgggtcaaatgattcaaccagattgggacatgttccaatcagaccatgtctgtgccgagtaccacgccgcatctcgagccatttgcggtgggcctgtctatctcaatgaccatcttggcaaagcctcacataactttgatctcatcaagaaacttgctttctttgatggtaccatcccaaggtgtgtccactatgctcttcccactagagattcgctcttcaagaaccctttgtttgacaaagagtcaatcctcaagatcttcaacttcaacaagtttggaggagtgattggaacatttaactgtcaaggtgctgggtggagcccagaggagcataggttcaaaggatacaaagaatgttacacgacagtttcgggaacagttcatgtctcggacattgaatgggatcagaatccagaagctgcaggctctcaggtgacctacactggagattacttggtttacaagcaacaatctgaagaaatccttttcatgaactcgaaatcagaagcgatgaagataacccttgagccatccgcgtttgacctgttgagtttcgtgccagtcacggaacttgtaagttcaggggttagattcgcacctctagggttgatcaacatgttcaactgcgtcggaacagtccaagacatgaaggttactggtgataacagcataagagtggacgtgaaaggcgaaggaagattcatggcgtattcgagttcagctccggtgaagtgttacttgaacgacaaggaagctgagtttaagtgggaagaagaaactggtaaactcagtttctttgttccttgggttgaagaatctggtggcatctctcatctgtctttcaccttttaataatttgtttggatttttgtttttcgttttccttttcttgcattttgttatcagaagttgggttgtcaatttctgtttggtgttttacttttcaatttggagacttctcaaacaaattttaatatcaaatggattttctttgtcggtt

SEQ ID NO: 20651 - protein, 602 aa, Arabidopsis thaliana
  peptide (1)..(602): Ceres Seq. ID no. 14310207
NYFYPFSLYIYRKQKKAFSSPTILCFHFLCFSNFLCSLMAPLHESLSSINDVIESKPLFVPITKPILQPNSFNLSEGSLCAKDSTPILFDVPQNVTFTPFSSHSISTDAPLPILLRVQANAHKGGFLGFTKESPSDRLTNSLGRFEDREFLSLFRFKMWWSTAWIGKSGSDLQAETQWVMLKIPEIDSYVAIIPTIEGAFRASLTPGEKGNVLICAESGSTKVKESSFKSIAYIHICDNPYNLMKEAFSALRVHMNTFKHLEEKKLPKIVDKFGWCTWDACYLTVDPATIWTGVKEFEDGGVCPKFVIIDDGWQSINFDGDELDKDAENLVLGGEQMTARLTSFKECKKFRNYKGGSFITSDASHFNPLKPKMLIYKATERIQAIILRRKLVKESGEQDLTELDEKIKILSEELNAMFDEVEKEESLGSDDVSGSGMAAFTKDLRLRFKSLDDIYVWHALCGAWNGVRPETMMDLKAKVAPFELSPSLGATMADLAVDKVVEAGIGLVHPSKAHEFYDSMHSYLASVGVTGAKIDVFQTLESLAEEHGGRVELAKAYYDGLTESMIKNFNGTDVIASMQQCNEFFFLATKQISIGRVGDDFW

SEQ ID NO: 20652 - protein, 564 aa, Arabidopsis thaliana
  peptide (1)..(564): Ceres Seq. ID no. 14310208
MAPLHESLSSINDVIESKPLFVPITKPILQPNSFNLSEGSLCAKDSTPILFDVPQNVTFTPFSSHSISTDAPLPILLRVQANAHKGGFLGFTKESPSDRLTNSLGRFEDREFLSLFRFKMWWSTAWIGKSGSDLQAETQWVMLKIPEIDSYVAIIPTIEGAFRASLTPGEKGNVLICAESGSTKVKESSFKSIAYIHICDNPYNLMKEAFSALRVHMNTFKHLEEKKLPKIVDKFGWCTWDACYLTVDPATIWTGVKEFEDGGVCPKFVIIDDGWQSINFDGDELDKDAENLVLGGEQMTARLTSFKECKKFRNYKGGSFITSDASHFNPLKPKMLIYKATERIQAIILRRKLVKESGEQDLTELDEKIKILSEELNAMFDEVEKEESLGSDDVSGSGMAAFTKDLRLRFKSLDDIYVWHALCGAWNGVRPETMMDLKAKVAPFELSPSLGATMADLAVDKVVEAGIGLVHPSKAHEFYDSMHSYLASVGVTGAKIDVFQTLESLAEEHGGRVELAKAYYDGLTESMIKNFNGTDVIASMQQCNEFFFLATKQISIGRVGDDFW

SEQ ID NO: 20653 - protein, 445 aa, Arabidopsis thaliana
  peptide (1)..(445): Ceres Seq. ID no. 14310209
MWWSTAWIGKSGSDLQAETQWVMLKIPEIDSYVAIIPTIEGAFRASLTPGEKGNVLICAESGSTKVKESSFKSIAYIHICDNPYNLMKEAFSALRVHMNTFKHLEEKKLPKIVDKFGWCTWDACYLTVDPATIWTGVKEFEDGGVCPKFVIIDDGWQSINFDGDELDKDAENLVLGGEQMTARLTSFKECKKFRNYKGGSFITSDASHFNPLKPKMLIYKATERIQAIILRRKLVKESGEQDLTELDEKIKILSEELNAMFDEVEKEESLGSDDVSGSGMAAFTKDLRLRFKSLDDIYVWHALCGAWNGVRPETMMDLKAKVAPFELSPSLGATMADLAVDKVVEAGIGLVHPSKAHEFYDSMHSYLASVGVTGAKIDVFQTLESLAEEHGGRVELAKAYYDGLTESMIKNFNGTDVIASMQQCNEFFFLATKQISIGRVGDDFW

SEQ ID NO: 20654 - DNA, 2728 bp, Arabidopsis thaliana
  misc_feature (1)..(2728): Ceres Seq. ID no. 13646955
  misc_feature (1261)..(1261): n is a, c, t, g, unknown, or other
  misc_feature (1262)..(1262): n is a, c, t, g, unknown, or other
  misc_feature (1818)..(1818): n is a, c, t, g, unknown, or other
  misc_feature (1819)..(1819): n is a, c, t, g, unknown, or other
  misc_feature (2676)..(2676): n is a, c, t, g, unknown, or other
  misc_feature (2677)..(2677): n is a, c, t, g, unknown, or other
  misc_feature (2678)..(2678): n is a, c, t, g, unknown, or other
  misc_feature (2679)..(2679): n is a, c, t, g, unknown, or other
gagctcactagtccccccccccccgaaagtcataataaccttgacttggaccagtcgcctgaaagtcttgagtttttttcccttaagatcccgccgggctccggtgctggcggttaaacccttccaaaacctgaaattcgtttagcttaggacaaacaagtgaagcccaccatacagaaatgtctaacagaagcctccatttgaagaaaatatcatggctttcttctcggattctctcagacaatgttcacggtcgatttcgccgatcaatcactactccagccacttgtttagctccttcactcgatggagacatgaacattggatccaagacattggtcgaacaacgtttctctcgcggatttgcatcagtacgacgagtatctcgagcttcttcttcttcttctccttcctctccacatgttgatttgctctcttttattaaagcttcacttgataaacttgaaggtccttcccatcattggttgaatcgagactttgggaataaacagcttttcaaggacaaaggaacttatgtagttctagctggacatttgctagacggaacaagtgatctgagtggtttctttgagaaactaaagttgcttcagcagaggtctccgggtgtctgtttcatgggcatccacttcagtgatcaagctcgaatcgctgatgatcgaactgctctagctgagttgattttgaaggaatacctcacttttcctgtgctactttccgaaaaagaatttcccaagacaagtggggaagtacgttacatcgtgtttaaagattttaagaatcctctaatctacgaagagaaggatcttgatattgcttctgtagttaaagctcttgacagcctcctcactcaagatactgagaaatccaagtctgtcagacttttcacgaacacttggtcaaaacaagcagaggctatcaaggaatcacatttcccttctttctttcaggaattgttactttactttccaggttgtatctctgcagacgaagttggagaccgtctgtttctttctgataccaaccatcatcgtattattattttcgaaaacagtgggaagattgtagacagtattggttgtttcccaggttttgaggatggagattttgaatctgcaaagatgttacgtcctacagggaccctttacgacgaagcggaggattgtctttacattgtagattctgagaatcacgccattagaagagcaaatataaatagccgggtcctggaaacagtatatcnnaaggttattaagaaaactggtggcttatggtcttggataatggagaaaatgggtcttggaaaagatgacgatacaacagttgatgctgataccaaatcagaagaatttgatgcacgctctcttttgtttccatggcatatactgaagcgtgacgatgagagtcttttagtcattaacaaaagcttttcgaagttatggataataaatttagcttcaggagagatcgaagaagttgtggaagggttttcgaagataattgagatctgcggtcaatcaatcacagagaagctatcagtgttggaacatatgccttctaactggttgcaacagcaaactgcggctatcgcctcatttaaggagcagccaagtgcttcccttttgtcttmtwwyactaaacttggagacgacattgtcatgacagatatagcttgtcagagggtgttgaagctaaatagagattctggagcatgctctagcattcaattctcaaacagtgggatccttgggttgccctattggttgttcattccactggagagagtttttaatctagctnntggagttcaggaagcacatctcagtcatactcaggaattccggttattgccaggtaaaattagcatacggttgaacatagagattcctccatgcacggagcttgttgadccgatacaagaaagctgcatatggcgacagacaagaggcgcaatcagtgaattctcgagtgctggaagtgcagttgaaccttcagaaaaggttggagtttcacaacaatggtatgatgaattagacagcctcgccaaagaaatagccaaccctgaagcagctgaggaagaggaagaagaagatgttaacccctctgaggttgacagagaagaagatggacgtatccacattgattgtcctgtcaaaacaagtcctggctcaagtgagcttattgtttatgcagctttgtatttaagactagcgagaaacgaagagacagaaagtgcgacccaggaagaactggcgagaaaaatagcaaagattttaaagccagtacggaacattacaactatgaaggaagatttgtttgtgaatttgttgtccaagtcaaagagagaattgagagacattgtcttcataaagccgatgcatgtgcggataaggttagactcgaaggatcatccaaaagccgataactcaagagacgtaatcttgactgactcctctgttgaggttgatgtctctctctgacaacgaataacgatgcttttgcagtccattctttctcaaaagtaccaaatggctactctaattctttttgaggtggtaaaaatgagctcaataagacttgtataagtagtttatgacattatattaacgatggtccaagtttcatttggatttctatattttagtgtttcttctattnnnnaaaaaaaagaaaaaaaaaaaaaaaaaaaactcgagggggggcccggtac

SEQ ID NO: 20655 - protein, 772 aa, Arabidopsis thaliana
  peptide (1)..(772): Ceres Seq. ID no. 15219260
  misc_feature (361)..(361): Xaa is any aa, unknown or other
  misc_feature (490)..(490): Xaa is any aa, unknown or other
  misc_feature (491)..(491): Xaa is any aa, unknown or other
  misc_feature (547)..(547): Xaa is any aa, unknown or other
  misc_feature (583)..(583): Xaa is any aa, unknown or other
MSNRSLHLKKISWLSSRILSDNVHGRFRRSITTPATCLAPSLDGDMNIGSKTLVEQRFSRGFASVRRVSRASSSSSPSSPHVDLLSFIKASLDKLEGPSHHWLNRDFGNKQLFKDKGTYVVLAGHLLDGTSDLSGFFEKLKLLQQRSPGVCFMGIHFSDQARIADDRTALAELILKEYLTFPVLLSEKEFPKTSGEVRYIVFKDFKNPLIYEEKDLDIASVVKALDSLLTQDTEKSKSVRLFTNTWSKQAEAIKESHFPSFFQELLLYFPGCISADEVGDRLFLSDTNHHRIIIFENSGKIVDSIGCFPGFEDGDFESAKMLRPTGTLYDEAEDCLYIVDSENHAIRRANINSRVLETVYXKVIKKTGGLWSWIMEKMGLGKDDDTTVDADTKSEEFDARSLLFPWHILKRDDESLLVINKSFSKLWIINLASGEIEEVVEGFSKIIEICGQSITEKLSVLEHMPSNWLQQQTAAIASFKEQPSASLLSXXTKLGDDIVMTDIACQRVLKLNRDSGACSSIQFSNSGILGLPYWLFIPLERVFNLAXGVQEAHLSHTQEFRLLPGKISIRLNIEIPPCTELVXPIQESCIWRQTRGAISEFSSAGSAVEPSEKVGVSQQWYDELDSLAKEIANPEAAEEEEEEDVNPSEVDREEDGRIHIDCPVKTSPGSSELIVYAALYLRLARNEETESATQEELARKIAKILKPVRNITTMKEDLFVNLLSKSKRELRDIVFIKPMHVRIRLDSKDHPKADNSRDVILTDSSVEVDVSL

SEQ ID NO: 20656 - protein, 727 aa, Arabidopsis thaliana
  peptide (1)..(727): Ceres Seq. ID no. 15219261
  misc_feature (316)..(316): Xaa is any aa, unknown or other
  misc_feature (445)..(445): Xaa is any aa, unknown or other
  misc_feature (446)..(446): Xaa is any aa, unknown or other
  misc_feature (502)..(502): Xaa is any aa, unknown or other
  misc_feature (538)..(538): Xaa is any aa, unknown or other
MNIGSKTLVEQRFSRGFASVRRVSRASSSSSPSSPHVDLLSFIKASLDKLEGPSHHWLNRDFGNKQLFKDKGTYVVLAGHLLDGTSDLSGFFEKLKLLQQRSPGVCFMGIHFSDQARIADDRTALAELILKEYLTFPVLLSEKEFPKTSGEVRYIVFKDFKNPLIYEEKDLDIASVVKALDSLLTQDTEKSKSVRLFTNTWSKQAEAIKESHFPSFFQELLLYFPGCISADEVGDRLFLSDTNHHRIIIFENSGKIVDSIGCFPGFEDGDFESAKMLRPTGTLYDEAEDCLYIVDSENHAIRRANINSRVLETVYXKVIKKTGGLWSWIMEKMGLGKDDDTTVDADTKSEEFDARSLLFPWHILKRDDESLLVINKSFSKLWIINLASGEIEEVVEGFSKIIEICGQSITEKLSVLEHMPSNWLQQQTAAIASFKEQPSASLLSXXTKLGDDIVMTDIACQRVLKLNRDSGACSSIQFSNSGILGLPYWLFIPLERVFNLAXGVQEAHLSHTQEFRLLPGKISIRLNIEIPPCTELVXPIQESCIWRQTRGAISEFSSAGSAVEPSEKVGVSQQWYDELDSLAKEIANPEAAEEEEEEDVNPSEVDREEDGRIHIDCPVKTSPGSSELIVYAALYLRLARNEETESATQEELARKIAKILKPVRNITTMKEDLFVNLLSKSKRELRDIVFIKPMHVRIRLDSKDHPKADNSRDVILTDSSVEVDVSL

SEQ ID NO: 20657 - protein, 620 aa, Arabidopsis thaliana
  peptide (1)..(620): Ceres Seq. ID no. 15219262
  misc_feature (209)..(209): Xaa is any aa, unknown or other
  misc_feature (338)..(338): Xaa is any aa, unknown or other
  misc_feature (339)..(339): Xaa is any aa, unknown or other
  misc_feature (395)..(395): Xaa is any aa, unknown or other
  misc_feature (431)..(431): Xaa is any aa, unknown or other
MGIHFSDQARIADDRTALAELILKEYLTFPVLLSEKEFPKTSGEVRYIVFKDFKNPLIYEEKDLDIASVVKALDSLLTQDTEKSKSVRLFTNTWSKQAEAIKESHFPSFFQELLLYFPGCISADEVGDRLFLSDTNHHRIIIFENSGKIVDSIGCFPGFEDGDFESAKMLRPTGTLYDEAEDCLYIVDSENHAIRRANINSRVLETVYXKVIKKTGGLWSWIMEKMGLGKDDDTTVDADTKSEEFDARSLLFPWHILKRDDESLLVINKSFSKLWIINLASGEIEEVVEGFSKIIEICGQSITEKLSVLEHMPSNWLQQQTAAIASFKEQPSASLLSXXTKLGDDIVMTDIACQRVLKLNRDSGACSSIQFSNSGILGLPYWLFIPLERVFNLAXGVQEAHLSHTQEFRLLPGKISIRLNIEIPPCTELVXPIQESCIWRQTRGAISEFSSAGSAVEPSEKVGVSQQWYDELDSLAKEIANPEAAEEEEEEDVNPSEVDREEDGRIHIDCPVKTSPGSSELIVYAALYLRLARNEETESATQEELARKIAKILKPVRNITTMKEDLFVNLLSKSKRELRDIVFIKPMHVRIRLDSKDHPKADNSRDVILTDSSVEVDVSL

SEQ ID NO: 20658 - DNA, 1184 bp, Arabidopsis thaliana
  misc_feature (1)..(1184): Ceres Seq. ID no. 13646963
  misc_feature (1)..(1184): Ortholog of  Ceres SEQ ID NO 15169278 as cited in SEQ ID NO 58762
atctcactgccttcactcacactacaacttccagttaaagaaatggcgaattcagcgtcactactgtatgatcagctcaaggttgctgagccgtttttcttattggctggtccaaatgtgatcgaatccgaagagcatgttcttcgtatggctaaaagcatcaaagatatttcgacaaagcttgggttgcctctggttttcaagtcaagtttcgataaagctaacagaacttcatcaaagtccttccgaggtcctggcatggctgaggggctcaagattcttgagaaggtgaaagtagcatttgatctaccaatcgttactgacgttcatgagtcgagtcagtgtgaagcagttggcaaggttgcagatataattcagataccggcgttcttatgtcgacagacagatcttctggtcgcggcagcccaaagtgggaaaattatcaacataaagaaaggacaattttgtggtcactctgtcatgagaaactcggctgagaaggttagactcgcagggaatccaaatgtgatggtttgtgaaagaggaaccatgtttggatacaatgatttaatagtagatccacgaaatttggaatggatgagggaagctgattgtcccgttgttgctgatataactcattcattacaacaacctgcaggcaagaagttagatggtgggggtgttgctagtggtggccttcgcgaattaataccatgcatagcaagaaccgccgtagctgttggtgtcgatggaattttcatggaggtgcatgatgatcctttaaatgcaccggtcgatggtccaacacaatggcctctgcgtcatctagaagaactgctagaagagctcattgcaatcgcgagtgtcacaaaggggaaacaacagttccaaatcgatctcacgccttatcgtgattagaatcaaagggtccgtacgtcactttgggtgcaactacatcttcttgataatatttcaatcttgtcggagcaataagcattatttggcaaaacacatctctccacagtgactaatgtatattcaaagtagctgatgttgcctgatatgatatcaaatgtctaagtttgttttatttttgaagaaataaacaacaattagaagttaaattacttttttatgtcaacataaagcactttttctatacctgatcnnntagtcttttcttt

SEQ ID NO: 20659 - protein, 305 aa, Arabidopsis thaliana
  peptide (1)..(305): Ceres Seq. ID no. 15218701
ISLPSLTLQLPVKEMANSASLLYDQLKVAEPFFLLAGPNVIESEEHVLRMAKSIKDISTKLGLPLVFKSSFDKANRTSSKSFRGPGMAEGLKILEKVKVAFDLPIVTDVHESSQCEAVGKVADIIQIPAFLCRQTDLLVAAAQSGKIINIKKGQFCGHSVMRNSAEKVRLAGNPNVMVCERGTMFGYNDLIVDPRNLEWMREADCPVVADITHSLQQPAGKKLDGGGVASGGLRELIPCIARTAVAVGVDGIFMEVHDDPLNAPVDGPTQWPLRHLEELLEELIAIASVTKGKQQFQIDLTPYRD

SEQ ID NO: 20660 - protein, 291 aa, Arabidopsis thaliana
  peptide (1)..(291): Ceres Seq. ID no. 15218702
MANSASLLYDQLKVAEPFFLLAGPNVIESEEHVLRMAKSIKDISTKLGLPLVFKSSFDKANRTSSKSFRGPGMAEGLKILEKVKVAFDLPIVTDVHESSQCEAVGKVADIIQIPAFLCRQTDLLVAAAQSGKIINIKKGQFCGHSVMRNSAEKVRLAGNPNVMVCERGTMFGYNDLIVDPRNLEWMREADCPVVADITHSLQQPAGKKLDGGGVASGGLRELIPCIARTAVAVGVDGIFMEVHDDPLNAPVDGPTQWPLRHLEELLEELIAIASVTKGKQQFQIDLTPYRD

SEQ ID NO: 20661 - protein, 256 aa, Arabidopsis thaliana
  peptide (1)..(256): Ceres Seq. ID no. 15218703
MAKSIKDISTKLGLPLVFKSSFDKANRTSSKSFRGPGMAEGLKILEKVKVAFDLPIVTDVHESSQCEAVGKVADIIQIPAFLCRQTDLLVAAAQSGKIINIKKGQFCGHSVMRNSAEKVRLAGNPNVMVCERGTMFGYNDLIVDPRNLEWMREADCPVVADITHSLQQPAGKKLDGGGVASGGLRELIPCIARTAVAVGVDGIFMEVHDDPLNAPVDGPTQWPLRHLEELLEELIAIASVTKGKQQFQIDLTPYRD

SEQ ID NO: 20662 - DNA, 1426 bp, Arabidopsis thaliana
  misc_feature (1)..(1426): Ceres Seq. ID no. 14310259
ggatgtgatcgaaacaaaaagctctttgcttcttcttcgtccatttctcgtagcacacttttcacaaagaagatgggttcttcacaatctacgcaaatggcagacgaagaagaagaagaagaggaaactgacaatgaagaagaagaagaagaagataatggcagatcaaacacaagacaattagacaatctcctagtaaagaaagttctagaacaagagcctgagatgttaccatgtcacgcttcagcttcaccactctcaccacaactatcatctctcggtactccaaggcttggaccatcgattaaagtctgggatccttacaatgtcctttctccgccggcgcaaccgccgtctatcttctctcgaatcgtgtctggtgatgaagatcgagctgtgacagaggtttatctgattagccatggtgagtgtgatcttaatcttagaactgatttgattggtgggagatgtcatgtagctgctcttactgctaatggtaaacgtcaagctagggctcttgctgttttcttcaaatctcaaggtgttcggtttaattcggtttattcgtcacctctagatcgagctagatccatggctgtttctgtttgtcaggaaatgagttttccggaggagcatgtacaatcctcagatgctattattgagatgagtttaggggattgggaaggttgtaatcaagcagagatttatagtcctgaaactttgagtttgattgaaaggtgtcagcctgatttcacagctccatctggagaatcactgaggcaagtagagtttcgaatggttcagtttctaaacgggacagtctcaggagttgcagagaagcttaggtcagattattcttccactacaaatcacaatgaaactcatgagcgtgatggtggtgtgtcacttccttcgactaactgggacttactacacaagcatcgtcccagtctcacaaggaagaaatctggtaaaagcaggcttcaagtgatgactaatcacgaacctgacgatggaaactccccaagggaagaagttaatcataatcacaatgacctaagtgattcgtcttccttaatcttgaattgtgtcggggttttcacgcattctttgcctataaagtgtcttttaaccggaatccttggttgcagtccggtaatgactcataagatctgtgtagaagactcttcagtgactgtgttacaacattcatggagaaacgggtggcagatcaaacgaatgaatgatactgctcatcttcgattgttgtaactttatttaccgataaattatttggaaaaacgaggattcatatatgtttacaccatgaatctgcagaagctcaagaacaaaggttctgcagataatgaaatgccacggcctctttgtactgttttgtttgtgaaatgaggaaaaaaagataaac

SEQ ID NO: 20663 - protein, 423 aa, Arabidopsis thaliana
  peptide (1)..(423): Ceres Seq. ID no. 14310260
GCDRNKKLFASSSSISRSTLFTKKMGSSQSTQMADEEEEEEETDNEEEEEEDNGRSNTRQLDNLLVKKVLEQEPEMLPCHASASPLSPQLSSLGTPRLGPSIKVWDPYNVLSPPAQPPSIFSRIVSGDEDRAVTEVYLISHGECDLNLRTDLIGGRCHVAALTANGKRQARALAVFFKSQGVRFNSVYSSPLDRARSMAVSVCQEMSFPEEHVQSSDAIIEMSLGDWEGCNQAEIYSPETLSLIERCQPDFTAPSGESLRQVEFRMVQFLNGTVSGVAEKLRSDYSSTTNHNETHERDGGVSLPSTNWDLLHKHRPSLTRKKSGKSRLQVMTNHEPDDGNSPREEVNHNHNDLSDSSSLILNCVGVFTHSLPIKCLLTGILGCSPVMTHKICVEDSSVTVLQHSWRNGWQIKRMNDTAHLRLL

SEQ ID NO: 20664 - protein, 399 aa, Arabidopsis thaliana
  peptide (1)..(399): Ceres Seq. ID no. 14310261
MGSSQSTQMADEEEEEEETDNEEEEEEDNGRSNTRQLDNLLVKKVLEQEPEMLPCHASASPLSPQLSSLGTPRLGPSIKVWDPYNVLSPPAQPPSIFSRIVSGDEDRAVTEVYLISHGECDLNLRTDLIGGRCHVAALTANGKRQARALAVFFKSQGVRFNSVYSSPLDRARSMAVSVCQEMSFPEEHVQSSDAIIEMSLGDWEGCNQAEIYSPETLSLIERCQPDFTAPSGESLRQVEFRMVQFLNGTVSGVAEKLRSDYSSTTNHNETHERDGGVSLPSTNWDLLHKHRPSLTRKKSGKSRLQVMTNHEPDDGNSPREEVNHNHNDLSDSSSLILNCVGVFTHSLPIKCLLTGILGCSPVMTHKICVEDSSVTVLQHSWRNGWQIKRMNDTAHLRLL

SEQ ID NO: 20665 - protein, 391 aa, Arabidopsis thaliana
  peptide (1)..(391): Ceres Seq. ID no. 14310262
MADEEEEEEETDNEEEEEEDNGRSNTRQLDNLLVKKVLEQEPEMLPCHASASPLSPQLSSLGTPRLGPSIKVWDPYNVLSPPAQPPSIFSRIVSGDEDRAVTEVYLISHGECDLNLRTDLIGGRCHVAALTANGKRQARALAVFFKSQGVRFNSVYSSPLDRARSMAVSVCQEMSFPEEHVQSSDAIIEMSLGDWEGCNQAEIYSPETLSLIERCQPDFTAPSGESLRQVEFRMVQFLNGTVSGVAEKLRSDYSSTTNHNETHERDGGVSLPSTNWDLLHKHRPSLTRKKSGKSRLQVMTNHEPDDGNSPREEVNHNHNDLSDSSSLILNCVGVFTHSLPIKCLLTGILGCSPVMTHKICVEDSSVTVLQHSWRNGWQIKRMNDTAHLRLL

SEQ ID NO: 20666 - DNA, 802 bp, Arabidopsis thaliana
  misc_feature (1)..(802): Ceres Seq. ID no. 14310243
gatctgatcattcgttttctaacaccaaggcgaactgagagagattcgttaagcacaaaagagagaaaaaagatctaatgttttatccacatgatggaacactctgttctaaaaagagggatcatatgaaagtttttggagaatcgtttcatggttctttcaaaaggagcaaacaaggagatcaaaaacaaaccaaacttgagaagaacactactactctgttctttcaaagatcaaagtcagatagcgccatgttgataaagcctgatgttcagcttcacctagaggctaagacccaatcagagacatttgaagatcataggacagacctggaccttaatttgaacctttattcgtcatcaagttcctctgtgaaaaaaacaatcatggagaaagatgaatgctcaaaaggcggaactgtgatcatgagcccaagtaagaaggtgagttcaggtgatatagggttaagtcgatccccgtcttggctagcgtttgaaggtgatgatgatgatgataatcagaagaagcaagagatgataactacagtgtgcatgaagtgtcatatgctggttatgctctgcaaatcaactcttgtgtgtcctaactgcaaattcatgcaccatgatgatcatagctccacaaaacagtttaagactttaaatttgtttaagctcttatgctagacttttcagtgtatgttaatgagcccaagaatgtgaaactagatatgtatgagttatgtatatatacaagtactgattgttttattatatgctttgtatatgaataactttgatctgcg

SEQ ID NO: 20667 - protein, 201 aa, Arabidopsis thaliana
  peptide (1)..(201): Ceres Seq. ID no. 14310244
MFYPHDGTLCSKKRDHMKVFGESFHGSFKRSKQGDQKQTKLEKNTTTLFFQRSKSDSAMLIKPDVQLHLEAKTQSETFEDHRTDLDLNLNLYSSSSSSVKKTIMEKDECSKGGTVIMSPSKKVSSGDIGLSRSPSWLAFEGDDDDDNQKKQEMITTVCMKCHMLVMLCKSTLVCPNCKFMHHDDHSSTKQFKTLNLFKLLC

SEQ ID NO: 20668 - protein, 185 aa, Arabidopsis thaliana
  peptide (1)..(185): Ceres Seq. ID no. 14310245
MKVFGESFHGSFKRSKQGDQKQTKLEKNTTTLFFQRSKSDSAMLIKPDVQLHLEAKTQSETFEDHRTDLDLNLNLYSSSSSSVKKTIMEKDECSKGGTVIMSPSKKVSSGDIGLSRSPSWLAFEGDDDDDNQKKQEMITTVCMKCHMLVMLCKSTLVCPNCKFMHHDDHSSTKQFKTLNLFKLLC

SEQ ID NO: 20669 - protein, 143 aa, Arabidopsis thaliana
  peptide (1)..(143): Ceres Seq. ID no. 14310246
MLIKPDVQLHLEAKTQSETFEDHRTDLDLNLNLYSSSSSSVKKTIMEKDECSKGGTVIMSPSKKVSSGDIGLSRSPSWLAFEGDDDDDNQKKQEMITTVCMKCHMLVMLCKSTLVCPNCKFMHHDDHSSTKQFKTLNLFKLLC

SEQ ID NO: 20670 - DNA, 1100 bp, Arabidopsis thaliana
  misc_feature (1)..(1100): Ceres Seq. ID no. 14310350
  misc_feature (1)..(1100): Ortholog of  Ceres SEQ ID NO 15177648 as cited in SEQ ID NO 58917
tggtgccgattcggcacgaggagctcactagtccccccccccccccgatggaaaaagttttctccgacgaaaaaatctccggtaaccatcactggtcgtttaatggaacgacgtcgttgaatcgtagtgcatccgaatgggcattcaatcgcttcatacaagaatcctccgccgctgcagacgacggagaatctgcgacggcgtgtggtgtttccgtctcttctcctcctaatgttcctgtagattcagaggaatacagagcatttctcaagagtaaacttaatcttgcttgtgctgctgtcgccatgaaaaggggaactttcatcaaacctcaggatacttctggtagatctgacaatggtggagccaatgcatcagaacaaggctctcttgcttcttccaaagctacaccaatgatgagcagtgctataacaagtggttctgagctctctggtgatgaagaagaagctgatggtgaaactaatatgaaccctactaatgttaaacgcgtgaaaaggatgctctctaatagagaatcagctagacgatccagaagaagaaagcaagcacacttgagtgagctagagacacaagtttcgcagcttcgtgtagagaattcaaaactcatgaagggtctcactgatgtaactcaaacattcaatgatgcatctgtagaaaacagagttttaaaagccaatattgagacactacgagcaaaggtgaaaatggctgaagagacagtgaagagactcactggctttaacccaatgttccacactatgcctcagattgtttcaactgtctctcttccttcagagacatcaaattctctagacactacaagcagccaagtgactacaccagagatcatcagctcggggaacaaaagcaaggccttgatagggtgcaagatgaacagaacagcttcgatgcgtagagttgagagcttggaacatctgcagaaacgtattcgaagcgttggggatcagtagctgttaaagaagaatcttgatttgtaacattatcaagagagttattcgacaaatgttgtatgttttgtaaagaattgttttcagattattttaaactttttttttgtc

SEQ ID NO: 20671 - protein, 329 aa, Arabidopsis thaliana
  peptide (1)..(329): Ceres Seq. ID no. 14310351
VPIRHEELTSPPPPPMEKVFSDEKISGNHHWSFNGTTSLNRSASEWAFNRFIQESSAAADDGESATACGVSVSSPPNVPVDSEEYRAFLKSKLNLACAAVAMKRGTFIKPQDTSGRSDNGGANASEQGSLASSKATPMMSSAITSGSELSGDEEEADGETNMNPTNVKRVKRMLSNRESARRSRRRKQAHLSELETQVSQLRVENSKLMKGLTDVTQTFNDASVENRVLKANIETLRAKVKMAEETVKRLTGFNPMFHTMPQIVSTVSLPSETSNSLDTTSSQVTTPEIISSGNKSKALIGCKMNRTASMRRVESLEHLQKRIRSVGDQ

SEQ ID NO: 20672 - protein, 314 aa, Arabidopsis thaliana
  peptide (1)..(314): Ceres Seq. ID no. 14310352
MEKVFSDEKISGNHHWSFNGTTSLNRSASEWAFNRFIQESSAAADDGESATACGVSVSSPPNVPVDSEEYRAFLKSKLNLACAAVAMKRGTFIKPQDTSGRSDNGGANASEQGSLASSKATPMMSSAITSGSELSGDEEEADGETNMNPTNVKRVKRMLSNRESARRSRRRKQAHLSELETQVSQLRVENSKLMKGLTDVTQTFNDASVENRVLKANIETLRAKVKMAEETVKRLTGFNPMFHTMPQIVSTVSLPSETSNSLDTTSSQVTTPEIISSGNKSKALIGCKMNRTASMRRVESLEHLQKRIRSVGDQ

SEQ ID NO: 20673 - protein, 228 aa, Arabidopsis thaliana
  peptide (1)..(228): Ceres Seq. ID no. 14310353
MKRGTFIKPQDTSGRSDNGGANASEQGSLASSKATPMMSSAITSGSELSGDEEEADGETNMNPTNVKRVKRMLSNRESARRSRRRKQAHLSELETQVSQLRVENSKLMKGLTDVTQTFNDASVENRVLKANIETLRAKVKMAEETVKRLTGFNPMFHTMPQIVSTVSLPSETSNSLDTTSSQVTTPEIISSGNKSKALIGCKMNRTASMRRVESLEHLQKRIRSVGDQ

SEQ ID NO: 20674 - DNA, 990 bp, Arabidopsis thaliana
  misc_feature (1)..(990): Ceres Seq. ID no. 14313170
atactcagtaagcgagtccgagtcaacaatggacgtctacggcatgtcttcaccggacttgcttcgtatcgacgaccttctcgatttctccaacgacgaaatcttctcttcctcttccaccgtcacttcctccgctgcttcctccgccgcttcttctgaaaaccctttcagctttccttcttccgcctacacttctcctactctcctcaccgacttcactcaggatctctgcgttcccagtgacgacgcagctcatctcgaatggttatcgcgattcgttgacgattcattctctgacttcccagcgaatcctttaaccacgaacgttagacctgagatttcattcaccggaaaacctagaagtcgccgatcaagagcaccagcaccatccgtagctggaacttgggctccgatgtctgaatccgagctttgtcactccgtcgctaaacttaaaccgaagaaagtctacaacgctgaatcagttacggcggatggagcgaggcggtgcacgcactgtgcctcggagaaaacgccacagtggagaactggaccgcttggacctaaaacgctttgtaacgcttgtggagttcgttacaaatcagggaggcttgtaccggaatacagaccggcgtcgagtcctacgtttgtgttgactcagcattcgaactctcaccggaaagttatggagctccggcgacagaaggaacaacaagaatcttgcgttcgaattccgccgtttcagccgcagtaaatttgggggttttcttttcaaggggttttgtgatttggtgacgtgtcgtaatcttaacggtgatgatcacgtgaccgaagggaggggttaaggacttaattatcagtattagtttaaagtttgcaaatctctgctaattaatttgttggtaatttctattgattttttttttcttgcttttgttttttggtttcacggctctccttaaagttatatcattaaatgatttcattggcggc

SEQ ID NO: 20675 - protein, 249 aa, Arabidopsis thaliana
  peptide (1)..(249): Ceres Seq. ID no. 14313171
YSVSESESTMDVYGMSSPDLLRIDDLLDFSNDEIFSSSSTVTSSAASSAASSENPFSFPSSAYTSPTLLTDFTQDLCVPSDDAAHLEWLSRFVDDSFSDFPANPLTTNVRPEISFTGKPRSRRSRAPAPSVAGTWAPMSESELCHSVAKLKPKKVYNAESVTADGARRCTHCASEKTPQWRTGPLGPKTLCNACGVRYKSGRLVPEYRPASSPTFVLTQHSNSHRKVMELRRQKEQQESCVRIPPFQPQ

SEQ ID NO: 20676 - protein, 240 aa, Arabidopsis thaliana
  peptide (1)..(240): Ceres Seq. ID no. 14313172
MDVYGMSSPDLLRIDDLLDFSNDEIFSSSSTVTSSAASSAASSENPFSFPSSAYTSPTLLTDFTQDLCVPSDDAAHLEWLSRFVDDSFSDFPANPLTTNVRPEISFTGKPRSRRSRAPAPSVAGTWAPMSESELCHSVAKLKPKKVYNAESVTADGARRCTHCASEKTPQWRTGPLGPKTLCNACGVRYKSGRLVPEYRPASSPTFVLTQHSNSHRKVMELRRQKEQQESCVRIPPFQPQ

SEQ ID NO: 20677 - protein, 235 aa, Arabidopsis thaliana
  peptide (1)..(235): Ceres Seq. ID no. 14313173
MSSPDLLRIDDLLDFSNDEIFSSSSTVTSSAASSAASSENPFSFPSSAYTSPTLLTDFTQDLCVPSDDAAHLEWLSRFVDDSFSDFPANPLTTNVRPEISFTGKPRSRRSRAPAPSVAGTWAPMSESELCHSVAKLKPKKVYNAESVTADGARRCTHCASEKTPQWRTGPLGPKTLCNACGVRYKSGRLVPEYRPASSPTFVLTQHSNSHRKVMELRRQKEQQESCVRIPPFQPQ

SEQ ID NO: 20678 - DNA, 2062 bp, Arabidopsis thaliana
  misc_feature (1)..(2062): Ceres Seq. ID no. 14310235
ggtcagttttctttgattctgggtagtaaataatcgggatcaattgtagaagagctcatcgagaaaagagagaacctaaactttaaattcaattctgtattgttctcaaactcgaacccgaaactttaaatccttccttatttgttttctggagttcttgtttagaactgttttggatttgttttttttgaggagatgctttagttaactaggtttgcttcgagctgatcgctgtgtggcataaaccctaatttcgtggaaactgtgctcttttagaaccggtccagtgagtaagggaatccaattggtgaagatgccgcaagttaagatcattgctaaaaatttcatggacatggtggcgtcacttccagccatcaagcttgacaaactctacaacaatgtctttatctgcgaagccattctcaggtctttgccgcctcttgccaagaagtatgtattgcagatgttgtacattgatgttcctgtacctgctacgatgatggaggagtgggtgctcgcagatggcacctctaaacatagagttgctattgatcgactgattcaattaaggattttttcagaaattagtgataggaaaaggggaaccagctacagcctaaatcctacatttcagaacaatcttcagaaacatattatttccggtggagttttgcctagagagcctatgaactccgacaatgccattaaacttccaagcctacaagaactcgaaacctatgcacttaagcaatgggagtgtttcttgctacaacttataaattcgggtcaaggtgaaaaactaactggcatcagttcatccatgatgaaaatttttcagcgaggtttattgagtcagagagacaaagatggcccgagattaactgagagtggctttcagtttttgctgatggatacaaatgcccagctttggtacattattcgagaatacatattgaatgccgaggagcgagatgtagatccagcagacttgatttcgtttttgttggagcttagttttcatgttactggtcaggcatataacttaaataccttgacagaggttcaaaacaataccctcaaggaccttgcagacttgggattagtcaagcttcaacagggaaggaaagacagttggtttattcctactaaactggctacaaatttatcagtcagtctggcagattcatcagcgcgaaaagagggatttgtcgtgatggaaacaaacttcagaatgtatgcgtactccacatctaagttacagtgtgaaattttacgactatttgcgaggatagagtaccaacttccaaaccttattgcttgtgccattacaaaggaaagtttgtacaatgcatttgacaatggcatcacatcagatcagattataactttcctccagcagaattctcatccacgatgtgctgatcgagtcccatctattccagaaaatgtcactgatcagattcggctttgggagacagatctgcagagaattgagatgacccaggctcacttctatgatgaatttccttcaaaagatttgtttgaggcagcttgtgactttgctcgggaatggagaggccttctttgggaagactctaagagaatgcgacttgttgtgaaatccgaagttcacaatcagatgcgtgagtttcttcatacccaaagcaagtaacaagaagaaactcacattttcttctcgtattaaaacaaaacatcatgcttcgattctacaaactatgtctttcgtgaggtttcagcagaaagagaaaaaagagtagccatttgatgtcttgttactctattagttaccatcgttcttatcctgctaacacatgcgcaccccaaacgtaggaaaagtacttggtgttggtacccacgaagttgaaagttgaaacctttaagctgtaagaccgatccattgtaaatcacaatatactttattaggcgaagttaagtttgaaacaacatatattgacaaaacgtggtcgttggggatggtccaaccagggtcacctctataatttcttgtacgctagacagaacacaatctcggttttgattc

SEQ ID NO: 20679 - protein, 452 aa, Arabidopsis thaliana
  peptide (1)..(452): Ceres Seq. ID no. 14310236
MPQVKIIAKNFMDMVASLPAIKLDKLYNNVFICEAILRSLPPLAKKYVLQMLYIDVPVPATMMEEWVLADGTSKHRVAIDRLIQLRIFSEISDRKRGTSYSLNPTFQNNLQKHIISGGVLPREPMNSDNAIKLPSLQELETYALKQWECFLLQLINSGQGEKLTGISSSMMKIFQRGLLSQRDKDGPRLTESGFQFLLMDTNAQLWYIIREYILNAEERDVDPADLISFLLELSFHVTGQAYNLNTLTEVQNNTLKDLADLGLVKLQQGRKDSWFIPTKLATNLSVSLADSSARKEGFVVMETNFRMYAYSTSKLQCEILRLFARIEYQLPNLIACAITKESLYNAFDNGITSDQIITFLQQNSHPRCADRVPSIPENVTDQIRLWETDLQRIEMTQAHFYDEFPSKDLFEAACDFAREWRGLLWEDSKRMRLVVKSEVHNQMREFLHTQSK

SEQ ID NO: 20680 - protein, 441 aa, Arabidopsis thaliana
  peptide (1)..(441): Ceres Seq. ID no. 14310237
MDMVASLPAIKLDKLYNNVFICEAILRSLPPLAKKYVLQMLYIDVPVPATMMEEWVLADGTSKHRVAIDRLIQLRIFSEISDRKRGTSYSLNPTFQNNLQKHIISGGVLPREPMNSDNAIKLPSLQELETYALKQWECFLLQLINSGQGEKLTGISSSMMKIFQRGLLSQRDKDGPRLTESGFQFLLMDTNAQLWYIIREYILNAEERDVDPADLISFLLELSFHVTGQAYNLNTLTEVQNNTLKDLADLGLVKLQQGRKDSWFIPTKLATNLSVSLADSSARKEGFVVMETNFRMYAYSTSKLQCEILRLFARIEYQLPNLIACAITKESLYNAFDNGITSDQIITFLQQNSHPRCADRVPSIPENVTDQIRLWETDLQRIEMTQAHFYDEFPSKDLFEAACDFAREWRGLLWEDSKRMRLVVKSEVHNQMREFLHTQSK

SEQ ID NO: 20681 - protein, 439 aa, Arabidopsis thaliana
  peptide (1)..(439): Ceres Seq. ID no. 14310238
MVASLPAIKLDKLYNNVFICEAILRSLPPLAKKYVLQMLYIDVPVPATMMEEWVLADGTSKHRVAIDRLIQLRIFSEISDRKRGTSYSLNPTFQNNLQKHIISGGVLPREPMNSDNAIKLPSLQELETYALKQWECFLLQLINSGQGEKLTGISSSMMKIFQRGLLSQRDKDGPRLTESGFQFLLMDTNAQLWYIIREYILNAEERDVDPADLISFLLELSFHVTGQAYNLNTLTEVQNNTLKDLADLGLVKLQQGRKDSWFIPTKLATNLSVSLADSSARKEGFVVMETNFRMYAYSTSKLQCEILRLFARIEYQLPNLIACAITKESLYNAFDNGITSDQIITFLQQNSHPRCADRVPSIPENVTDQIRLWETDLQRIEMTQAHFYDEFPSKDLFEAACDFAREWRGLLWEDSKRMRLVVKSEVHNQMREFLHTQSK

SEQ ID NO: 20682 - DNA, 1152 bp, Arabidopsis thaliana
  misc_feature (1)..(1152): Ceres Seq. ID no. 14310291
tcactagtcccccccccccccccggattagaacgaaaccctaattggtcgacgaaatgaaagggattgcgaggcttgtaacttctctatcgcgaatcggaggtcgtatgattgtttctggaacaagtactgtatcttcttcttcgtcttcctctcttctgctatctcgtcgctcgcttttcatctctatcaccaatttacttaattctcggaccaaggattctgctcttccttcattgaattcttcttcacttgttcagaaatggaacttcctcggagggcagagaagaacaatgtttatccaaacacaatcaactccaaatccttcttctctcatgttttatcctggcaaatcagtcatggaagttggaagtgctgattttccaaatgttcgttctgctctgggttcgccattagccaaatctatttactccattgatggtgtggttcgagttttctttgggtcagattttgtcactgtaactaagtcagatgatgtatcatgggatattctcaagcctgagatatttgcagcagtcatggatttctattcttctggcgagcctttgtttctcgactcacaagctgctgctgccaaggatactgccatcagcgaggatgactctgaaacagtagcaatgatcaaggaactcttagaaacacgcatcagaccagcagttcaagatgatggtggggacattgagtattgtgggtttgatccggaaagcggtatagtgaagctgaggatgcaaggagcttgtagtggttgtccgagctcatctgttactttgaaatcgggaattgaaaatatgctgatgcattatgtatccgaggtgaaaggtgtagaacaagagtttgatggggaagatgaagagggaacgttgtctggagagatgagagtagagtaggagacctcctctttgctctttagtgtacagaaaaataaatcccagtgagtgcacttttttcttcaatccttggtgttgtttctgggcttttgaatcacactcaaggatctgtttactgagagatctgagttgttgtttttttgtagcttttgttgacttacacttgttttgattatttgaggttaagcaacgaaagatgtaccagaatatttgaaatttccgagtattataacacgatttacaag

SEQ ID NO: 20683 - protein, 283 aa, Arabidopsis thaliana
  peptide (1)..(283): Ceres Seq. ID no. 14310292
MKGIARLVTSLSRIGGRMIVSGTSTVSSSSSSSLLLSRRSLFISITNLLNSRTKDSALPSLNSSSLVQKWNFLGGQRRTMFIQTQSTPNPSSLMFYPGKSVMEVGSADFPNVRSALGSPLAKSIYSIDGVVRVFFGSDFVTVTKSDDVSWDILKPEIFAAVMDFYSSGEPLFLDSQAAAAKDTAISEDDSETVAMIKELLETRIRPAVQDDGGDIEYCGFDPESGIVKLRMQGACSGCPSSSVTLKSGIENMLMHYVSEVKGVEQEFDGEDEEGTLSGEMRVE

SEQ ID NO: 20684 - protein, 266 aa, Arabidopsis thaliana
  peptide (1)..(266): Ceres Seq. ID no. 14310293
MIVSGTSTVSSSSSSSLLLSRRSLFISITNLLNSRTKDSALPSLNSSSLVQKWNFLGGQRRTMFIQTQSTPNPSSLMFYPGKSVMEVGSADFPNVRSALGSPLAKSIYSIDGVVRVFFGSDFVTVTKSDDVSWDILKPEIFAAVMDFYSSGEPLFLDSQAAAAKDTAISEDDSETVAMIKELLETRIRPAVQDDGGDIEYCGFDPESGIVKLRMQGACSGCPSSSVTLKSGIENMLMHYVSEVKGVEQEFDGEDEEGTLSGEMRVE

SEQ ID NO: 20685 - protein, 204 aa, Arabidopsis thaliana
  peptide (1)..(204): Ceres Seq. ID no. 14310294
MFIQTQSTPNPSSLMFYPGKSVMEVGSADFPNVRSALGSPLAKSIYSIDGVVRVFFGSDFVTVTKSDDVSWDILKPEIFAAVMDFYSSGEPLFLDSQAAAAKDTAISEDDSETVAMIKELLETRIRPAVQDDGGDIEYCGFDPESGIVKLRMQGACSGCPSSSVTLKSGIENMLMHYVSEVKGVEQEFDGEDEEGTLSGEMRVE

SEQ ID NO: 20686 - DNA, 2606 bp, Arabidopsis thaliana
  misc_feature (1)..(2606): Ceres Seq. ID no. 15168832
tctctctctctctcacattcattgcttttaaattaaaactcccccaaaactgaaactgttactacttctctccttccttctctaaaaacctaaaaaaaaaaaaacccaacacacacacatggattctcaggaccactgcagcaactctccaggaggaggtaagaaccatgtctgtactaaatgtggttggagttattcaaatccacatcctagtgctaaaaaccgtcgtgctcacaagaaaatctgtggaaccatcaaaggatttgagatctttgactctgaaatgaagaaagagaatcttgatttgcaggaagaacactccttggaagatgagcaaaaaaccccaagtccaacagttgtcgaaaaatctgctccaacagttgtcgaaaaagctgctgatgagagaattggggatgtttctgaagaggatgtgtttactgatgctgtttgtgagttttcgagatctgattctttcaaggaagagacagctacaaacttcccggcaaagggtactgagaatcccggtgaaactcagcactgcaacaattcatctacggcctgtgagatgaaaagttctgaagtggttcaagacagctgtgaagttccacctgtggaagttgaatcagcttcagagaatcgacaaggtgcacagcattctactgaaggacactctatgtcatctgaaactgtgattgagtcatcacaggaagctcaggtcattgacggtggtgataccatatcaaatgatagattagagacagaatgcaaagggaagttaacgaaagaatctgaatctaagttagcatctgcattaggaaagagagaggatacttcagattcatcgtggaacgatgaagtgatttactcagatgtggagggtccctatggtttttcatcagaagcaactagtatgactcatcctgatgaagctagctgtatagtcagtgaggatgttccagtccatacttctccagtaaaagctgatgcaactcaggttatcagtgccagtaaatctgttcctgatgatatgccttttgttgagaatgctgatgtctatttgcatggaatcaaaggctttgaagaatttgaagtgagtcattctgtgaatccttttcttcctgagacatctaagggagaagaatgtgaaatagatacacttactgaggcagataatttaggaattaagcctgaaggcttaagtattggctcagaggttccttcatcagagaagcttctcgctggagacaaaactgaacctcaaggccaaaccgatttggttgcggtcaaggaatttcccagtgcagagaacatactgatatctaagattgactctgaagatatcggaatgaaagctgaagagggtgaatcatcattagagaatgcacaaactgttgaatcagaaaccttgagagtttctctacctgctgtagattctatagatgttgactcgaatgctgatatgagcagtgcagcgaacaaaactggtttagttgatctcgctggtaatgaaagtgaacttatgcaagcaaatgttgtagctgagaaggggaacaaaccaaaagacactttgagttctgaatcctcttgttatgcttctccggtgtctgttgtatttgagggatctgatgcaagtgatcagataaaaaattcaacagaaacatctaaagactccgccctccaaatcagcgctgaaagtaaagatgaagtttgcagagagagtaaaaacggaaggcttgtggaggaaagcagtttcataaacgaaccaaatacaactgaatatcctataagccattttggatcaacaggcacagcacctgacactgttaatacagctaatcagacgtcactggaaatcggaatgacagaattcaatagagttgttggtggcttgggggtaattcaagcaaatgaggtcgacggtaatgtcaaagcacacaacaattatgctgaggtcccagtgacaatagaatcaaacgatcatcgagattttgggagattgcagaatctttcagaagctcacattagatctctggtttctagtccgctagtcactagaaataatacatctaatgcttctgaatctaacttgggaccagtttcaggtctaagcgctggagttaacaaacaggaagacgcatctcagaaccaagagatcaccttggagaagacaacaagctggggcacagcaaaggagcaacacgtcactctaaagaaccttctgagtgaagcaagatcaccaaggctacaacaacaagcaaaggatcacgagagtaataacataccgagagtgagttcgatactgggacaggagacatcccctgaagatggtcactggccagagaaaagagaagtgagcgaggaatggaattcaccagcaaagtatccagtggacttaaagagagaggagaagaaagtgaaaggaagacccttttgggtgccatttgtttgctgctccaatgttaaatagaccaccactctattgtataatggtaggagatgatgaatggtttctgaagacttgctagtacaaagacttgttagtagtttggttcttgtaggagctactgttgcttaggctttgaatacttttatgcagaccacttttg

SEQ ID NO: 20687 - protein, 782 aa, Arabidopsis thaliana
  peptide (1)..(782): Ceres Seq. ID no. 15168833
MDSQDHCSNSPGGGKNHVCTKCGWSYSNPHPSAKNRRAHKKICGTIKGFEIFDSEMKKENLDLQEEHSLEDEQKTPSPTVVEKSAPTVVEKAADERIGDVSEEDVFTDAVCEFSRSDSFKEETATNFPAKGTENPGETQHCNNSSTACEMKSSEVVQDSCEVPPVEVESASENRQGAQHSTEGHSMSSETVIESSQEAQVIDGGDTISNDRLETECKGKLTKESESKLASALGKREDTSDSSWNDEVIYSDVEGPYGFSSEATSMTHPDEASCIVSEDVPVHTSPVKADATQVISASKSVPDDMPFVENADVYLHGIKGFEEFEVSHSVNPFLPETSKGEECEIDTLTEADNLGIKPEGLSIGSEVPSSEKLLAGDKTEPQGQTDLVAVKEFPSAENILISKIDSEDIGMKAEEGESSLENAQTVESETLRVSLPAVDSIDVDSNADMSSAANKTGLVDLAGNESELMQANVVAEKGNKPKDTLSSESSCYASPVSVVFEGSDASDQIKNSTETSKDSALQISAESKDEVCRESKNGRLVEESSFINEPNTTEYPISHFGSTGTAPDTVNTANQTSLEIGMTEFNRVVGGLGVIQANEVDGNVKAHNNYAEVPVTIESNDHRDFGRLQNLSEAHIRSLVSSPLVTRNNTSNASESNLGPVSGLSAGVNKQEDASQNQEITLEKTTSWGTAKEQHVTLKNLLSEARSPRLQQQAKDHESNNIPRVSSILGQETSPEDGHWPEKREVSEEWNSPAKYPVDLKREEKKVKGRPFWVPFVCCSNVK

SEQ ID NO: 20688 - protein, 727 aa, Arabidopsis thaliana
  peptide (1)..(727): Ceres Seq. ID no. 15168834
MKKENLDLQEEHSLEDEQKTPSPTVVEKSAPTVVEKAADERIGDVSEEDVFTDAVCEFSRSDSFKEETATNFPAKGTENPGETQHCNNSSTACEMKSSEVVQDSCEVPPVEVESASENRQGAQHSTEGHSMSSETVIESSQEAQVIDGGDTISNDRLETECKGKLTKESESKLASALGKREDTSDSSWNDEVIYSDVEGPYGFSSEATSMTHPDEASCIVSEDVPVHTSPVKADATQVISASKSVPDDMPFVENADVYLHGIKGFEEFEVSHSVNPFLPETSKGEECEIDTLTEADNLGIKPEGLSIGSEVPSSEKLLAGDKTEPQGQTDLVAVKEFPSAENILISKIDSEDIGMKAEEGESSLENAQTVESETLRVSLPAVDSIDVDSNADMSSAANKTGLVDLAGNESELMQANVVAEKGNKPKDTLSSESSCYASPVSVVFEGSDASDQIKNSTETSKDSALQISAESKDEVCRESKNGRLVEESSFINEPNTTEYPISHFGSTGTAPDTVNTANQTSLEIGMTEFNRVVGGLGVIQANEVDGNVKAHNNYAEVPVTIESNDHRDFGRLQNLSEAHIRSLVSSPLVTRNNTSNASESNLGPVSGLSAGVNKQEDASQNQEITLEKTTSWGTAKEQHVTLKNLLSEARSPRLQQQAKDHESNNIPRVSSILGQETSPEDGHWPEKREVSEEWNSPAKYPVDLKREEKKVKGRPFWVPFVCCSNVK

SEQ ID NO: 20689 - protein, 633 aa, Arabidopsis thaliana
  peptide (1)..(633): Ceres Seq. ID no. 15168835
MKSSEVVQDSCEVPPVEVESASENRQGAQHSTEGHSMSSETVIESSQEAQVIDGGDTISNDRLETECKGKLTKESESKLASALGKREDTSDSSWNDEVIYSDVEGPYGFSSEATSMTHPDEASCIVSEDVPVHTSPVKADATQVISASKSVPDDMPFVENADVYLHGIKGFEEFEVSHSVNPFLPETSKGEECEIDTLTEADNLGIKPEGLSIGSEVPSSEKLLAGDKTEPQGQTDLVAVKEFPSAENILISKIDSEDIGMKAEEGESSLENAQTVESETLRVSLPAVDSIDVDSNADMSSAANKTGLVDLAGNESELMQANVVAEKGNKPKDTLSSESSCYASPVSVVFEGSDASDQIKNSTETSKDSALQISAESKDEVCRESKNGRLVEESSFINEPNTTEYPISHFGSTGTAPDTVNTANQTSLEIGMTEFNRVVGGLGVIQANEVDGNVKAHNNYAEVPVTIESNDHRDFGRLQNLSEAHIRSLVSSPLVTRNNTSNASESNLGPVSGLSAGVNKQEDASQNQEITLEKTTSWGTAKEQHVTLKNLLSEARSPRLQQQAKDHESNNIPRVSSILGQETSPEDGHWPEKREVSEEWNSPAKYPVDLKREEKKVKGRPFWVPFVCCSNVK

SEQ ID NO: 20690 - DNA, 560 bp, Arabidopsis thaliana
  misc_feature (1)..(560): Ceres Seq. ID no. 12562293
gcaaaaaatggcttccaaggctttgattctgttaggtctcttctcagttcttctcgtcgtctccgaagtgtctgccgcaaggcaatcgggcatggtgaagccagagagtgaggaaactgtgcaacctgaaggttatggcggtggccacggaggacatggtggtcacggagggggaggaggccacggacatggaggacacaacggaggagggggccacggacttgacggatacggaggaggtggaggacactatggaggaggtggaggacactacggaggaggtggaggacactaccggaggaggtggaggacactacggaggaggtggtggaggaggatacggaggtggaggaggacaccacggaggaggaggccacgggctaaacgaacctgttcagactaagccgggtgtttaaaactatataatatcttcactaccatgcatgattgcatatatatatatacgcttatgtattatctatatgcctataaataaaccatggtgagtttgtaacgcagtgccttcagaaatgttcggaataaatttccataatattagt

SEQ ID NO: 20691 - protein, 133 aa, Arabidopsis thaliana
  peptide (1)..(133): Ceres Seq. ID no. 12562294
QKMASKALILLGLFSVLLVVSEVSAARQSGMVKPESEETVQPEGYGGGHGGHGGHGGGGGHGHGGHNGGGGHGLDGYGGGGGHYGGGGGHYGGGGGHYRRRWRTLRRRWWRRIRRWRRTPRRRRPRAKRTCSD

SEQ ID NO: 20692 - protein, 131 aa, Arabidopsis thaliana
  peptide (1)..(131): Ceres Seq. ID no. 12562295
MASKALILLGLFSVLLVVSEVSAARQSGMVKPESEETVQPEGYGGGHGGHGGHGGGGGHGHGGHNGGGGHGLDGYGGGGGHYGGGGGHYGGGGGHYRRRWRTLRRRWWRRIRRWRRTPRRRRPRAKRTCSD

SEQ ID NO: 20693 - protein, 103 aa, Arabidopsis thaliana
  peptide (1)..(103): Ceres Seq. ID no. 12562296
MVKPESEETVQPEGYGGGHGGHGGHGGGGGHGHGGHNGGGGHGLDGYGGGGGHYGGGGGHYGGGGGHYRRRWRTLRRRWWRRIRRWRRTPRRRRPRAKRTCSD

SEQ ID NO: 20694 - protein, 93 aa, Arabidopsis thaliana
  peptide (1)..(93): Ceres Seq. ID no. 12562297
MAVATEDMVVTEGEEATDMEDTTEEGATDLTDTEEVEDTMEEVEDTTEEVEDTTGGGGGHYGGGGGGGYGGGGGHHGGGGHGLNEPVQTKPGV

SEQ ID NO: 20695 - DNA, 558 bp, Arabidopsis thaliana
  misc_feature (1)..(558): Ceres Seq. ID no. 13591776
gataactcacactctctcttcaatcctttcctttcattgtagttaaacaaagattacgattatggccacatcagctatccaacaatcctccttcgccggccaaacggctctcaagccctccagcgacctcatccaaaaggtgggcgtcttgggcggtggccgtgtgaccatgcgtcgtaccgtcaagtctactccccaaagcatttggtatggaccagaccgtcccaagtacttgggaccattctcggagaacacaccgtcttacttaactggagaataccccggagactacggttgggacaccgctggactctcggctgacccggagacattcgctaagaaccgtgagcttgaagtaatccacagcagatgggctatgttgggtgctctcggatgcacattccctgagattctctccaagacggtgttaaattcggagaagccggtggttaaggcagctctaaattttctcaaangaggcttgatacctcggaaccctacttgtccacgcgcaaagatctanccattgggctgtcaagttggcctatgggtcattga

SEQ ID NO: 20696 - protein, 165 aa, Arabidopsis thaliana
  peptide (1)..(165): Ceres Seq. ID no. 13591777
  misc_feature (139)..(139): Xaa is any aa, unknown or other
  misc_feature (154)..(154): Xaa is any aa, unknown or other
MATSAIQQSSFAGQTALKPSSDLIQKVGVLGGGRVTMRRTVKSTPQSIWYGPDRPKYLGPFSENTPSYLTGEYPGDYGWDTAGLSADPETFAKNRELEVIHSRWAMLGALGCTFPEILSKTVLNSEKPVVKAALNFLKXGLIPRNPTCPRAKIXPLGCQVGLWVI

SEQ ID NO: 20697 - protein, 129 aa, Arabidopsis thaliana
  peptide (1)..(129): Ceres Seq. ID no. 13591778
  misc_feature (103)..(103): Xaa is any aa, unknown or other
  misc_feature (118)..(118): Xaa is any aa, unknown or other
MRRTVKSTPQSIWYGPDRPKYLGPFSENTPSYLTGEYPGDYGWDTAGLSADPETFAKNRELEVIHSRWAMLGALGCTFPEILSKTVLNSEKPVVKAALNFLKXGLIPRNPTCPRAKIXPLGCQVGLWVI

SEQ ID NO: 20698 - DNA, 1406 bp, Arabidopsis thaliana
  misc_feature (1)..(1406): Ceres Seq. ID no. 12466401
  misc_feature (1)..(1406): Ortholog of  Ceres SEQ ID NO 15224731 as cited in SEQ ID NO 63650
tttcctcttctcccaccattttcagagctcagagaaaaagaaagaaagaaaaaaagcttcgtgctccttcaccttcccaaatcggaaaacaatgcacgccaaaaccgattccgaggtaacaagcctcgcagcatcatcaccagccagatctccacgtagaccagtctactacgtccaatcaccatcacgcgactctcacgacggagaaaaaacagcaacatcgtttcactcaactccagtactaagtccgatgggatctccaccgcattctcactcatctatgggtcgtcactcacgtgaatcatcttctagtcgattctctggctctttaaagcctggatctagaaaagtcaaccctaacgatggttctaaacggaaaggtcacggcggtgagaaacagtggaaagaatgtgcggttattgaagaagaaggtttgttagatgatggtgatagagacggtggtgttcctcgtcgttgctatgttttggcttttatcgttggattctttattctctttggtttcttctctttgattctctatggtgctgctaaacctatgaaacctaagatcactgtcaagagtataacatttgagacgcttaagatccaagctggtcaagatgctggtggtgtaggaactgatatgatcactatgaacgcgactttgagaatgttgtatcgaaacactggaactttctttggtgttcatgttacttcaactcctattgatctcagcttctctcaaatcaaaatcggttccggatccgttaagaaattttatcagggaaggaagagtgagagaacagtgttggtgcatgtgatcggagagaagattccattatatggaagtggttcgactttacttccaccggctcctccagcaccacttcctaaacccaagaagaagaaaggagctccagtccctattcccgacccgcccgcaccaccagcaccggtaccaatgacgctcagctttgtcgtccgatcacgagcatacgtgttggggaagttagtgcagccaaagttctataagaaaatcgagtgtgacatcaacttcgaacacaagaatcttaataagcatatagtcatcaccaagaattgcaccgtcactacagtttgaaggaaggaacaaaagaaaaagtaacaaactttttagtcggcgcaatacgatgtcgtatagagtaacgtgattttacagctcaacgggcagcattttgggttgttggggcagccacgtggaggtgcccgaagaaaagaagcattgtcggtggctttaatttacttgagtggttcatatttgtctgtggaaaatatataattttataattgtgtgtacgattggactgaaaaacacgaggaatcacattttatttatttgttttttaattcattgatcctttaatatg

SEQ ID NO: 20699 - protein, 372 aa, Arabidopsis thaliana
  peptide (1)..(372): Ceres Seq. ID no. 12466402
FLFSHHFQSSEKKKERKKASCSFTFPNRKTMHAKTDSEVTSLAASSPARSPRRPVYYVQSPSRDSHDGEKTATSFHSTPVLSPMGSPPHSHSSMGRHSRESSSSRFSGSLKPGSRKVNPNDGSKRKGHGGEKQWKECAVIEEEGLLDDGDRDGGVPRRCYVLAFIVGFFILFGFFSLILYGAAKPMKPKITVKSITFETLKIQAGQDAGGVGTDMITMNATLRMLYRNTGTFFGVHVTSTPIDLSFSQIKIGSGSVKKFYQGRKSERTVLVHVIGEKIPLYGSGSTLLPPAPPAPLPKPKKKKGAPVPIPDPPAPPAPVPMTLSFVVRSRAYVLGKLVQPKFYKKIECDINFEHKNLNKHIVITKNCTVTTV

SEQ ID NO: 20700 - protein, 342 aa, Arabidopsis thaliana
  peptide (1)..(342): Ceres Seq. ID no. 12466403
MHAKTDSEVTSLAASSPARSPRRPVYYVQSPSRDSHDGEKTATSFHSTPVLSPMGSPPHSHSSMGRHSRESSSSRFSGSLKPGSRKVNPNDGSKRKGHGGEKQWKECAVIEEEGLLDDGDRDGGVPRRCYVLAFIVGFFILFGFFSLILYGAAKPMKPKITVKSITFETLKIQAGQDAGGVGTDMITMNATLRMLYRNTGTFFGVHVTSTPIDLSFSQIKIGSGSVKKFYQGRKSERTVLVHVIGEKIPLYGSGSTLLPPAPPAPLPKPKKKKGAPVPIPDPPAPPAPVPMTLSFVVRSRAYVLGKLVQPKFYKKIECDINFEHKNLNKHIVITKNCTVTTV

SEQ ID NO: 20701 - protein, 289 aa, Arabidopsis thaliana
  peptide (1)..(289): Ceres Seq. ID no. 12466404
MGSPPHSHSSMGRHSRESSSSRFSGSLKPGSRKVNPNDGSKRKGHGGEKQWKECAVIEEEGLLDDGDRDGGVPRRCYVLAFIVGFFILFGFFSLILYGAAKPMKPKITVKSITFETLKIQAGQDAGGVGTDMITMNATLRMLYRNTGTFFGVHVTSTPIDLSFSQIKIGSGSVKKFYQGRKSERTVLVHVIGEKIPLYGSGSTLLPPAPPAPLPKPKKKKGAPVPIPDPPAPPAPVPMTLSFVVRSRAYVLGKLVQPKFYKKIECDINFEHKNLNKHIVITKNCTVTTV

SEQ ID NO: 20702 - DNA, 663 bp, Arabidopsis thaliana
  misc_feature (1)..(663): Ceres Seq. ID no. 12603572
  misc_feature (1)..(663): Ortholog of  Ceres SEQ ID NO 13592738 as cited in SEQ ID NO 20784
  misc_feature (1)..(663): Ortholog of  Ceres SEQ ID NO 15178253 as cited in SEQ ID NO 55885
  misc_feature (1)..(663): Ortholog of  Ceres SEQ ID NO 12616797 as cited in SEQ ID NO 63716
ataccgatttccgaacacaaccctaaagaggcttcttcgacgacgttggttcttcttcctttgtcctgcgccgcgatctctccttctccaacttccctcgtcctgtccaaagaaaatgccaaaggttaaaactaaccgagtcaagtacccagaaggatgggagttgatcgagcctactcttcgagagcttgatgccaagatgagagaagctgagactgattcacatgatggtaagagaaagtgtgaaactttatggccaatcttcaaagtttctcatcagaggagtcggtatgtatatgacctttattaccgaagggaagaaatatctaaagagctctatgaattctgcttggaccagggctatgcagatcgcagtctgattgccaaatggaaaaagtcgggatacgaacgtttatgctgcttgcgctgcatacagccaagagaccacaactatggaacaacatgtgtatgccgtgttcccaaacacttgcgtgaagagaaagtggtcgaatgcgttcactgcggctgtcaaggatgcgcgagtggcgattaaattcaacatagctttattcgctatctctgactgtttgttacaatcttgtcacttgttaaatctggattatgtattattccataaaggctaaaaaccctgactaaaaatct

SEQ ID NO: 20703 - protein, 183 aa, Arabidopsis thaliana
  peptide (1)..(183): Ceres Seq. ID no. 12603573
YRFPNTTLKRLLRRRWFFFLCPAPRSLLLQLPSSCPKKMPKVKTNRVKYPEGWELIEPTLRELDAKMREAETDSHDGKRKCETLWPIFKVSHQRSRYVYDLYYRREEISKELYEFCLDQGYADRSLIAKWKKSGYERLCCLRCIQPRDHNYGTTCVCRVPKHLREEKVVECVHCGCQGCASGD

SEQ ID NO: 20704 - protein, 145 aa, Arabidopsis thaliana
  peptide (1)..(145): Ceres Seq. ID no. 12603574
MPKVKTNRVKYPEGWELIEPTLRELDAKMREAETDSHDGKRKCETLWPIFKVSHQRSRYVYDLYYRREEISKELYEFCLDQGYADRSLIAKWKKSGYERLCCLRCIQPRDHNYGTTCVCRVPKHLREEKVVECVHCGCQGCASGD

SEQ ID NO: 20705 - protein, 117 aa, Arabidopsis thaliana
  peptide (1)..(117): Ceres Seq. ID no. 12603575
MREAETDSHDGKRKCETLWPIFKVSHQRSRYVYDLYYRREEISKELYEFCLDQGYADRSLIAKWKKSGYERLCCLRCIQPRDHNYGTTCVCRVPKHLREEKVVECVHCGCQGCASGD

SEQ ID NO: 20706 - DNA, 1066 bp, Arabidopsis thaliana
  misc_feature (1)..(1066): Ceres Seq. ID no. 13645959
gatttttcgatttgagcacgacgattcactaatttcgttcttgtttccattttgaaaatttgatgaagaagaaatggacaatcacaatgaagaaccaaacatcgcaccagaacctaatcgttggtacaacattacgttaggaccatctctactcaacaacaatcactcatactctcccaaattctgcactttacgatatgagtttaaacctgcttcaattgacagtactaaaccaggattgttacataagagtaaagacaataaggttacgttagagtttcaaaacaatcaacttaataaacccaaagttagatttgatggtgttagtgaggattacaatgacagagataaagatgcagttctcttctttgatggcgaaaatttccgattggagaagcttcaccgctctgttaagcgtttgaaatatttacgtgttcctgatgaatctgcttcagctagtagagtagtatcaaaggttgttcctccagttgcaaacacagttaaaccggttaagatggcacaaattgatattaacaatcctgttgactttgaggaggatgtgaacattgatgatgatggtgaagatgacaatgatggacaagaatcagtaaaagaagaaactttattgagaaaggaatttcaaacgggtggtcttgacattgacattaaccttccgcatcctgctgaaatggaagatgatgagattgcagttgtagacattaatgatgacgaatcttacagaggtcttaacgcggcagaagcactcagagcgcaagtaaatgcagaagcgagagaggagtctcgaaagagttcgagttcaggcagcggaagagaaagtgagagcagtgaaagtggagttgagagtagtggtagcggaagtagtagtagcagtgaaagcagaaacagaggtagtgaaggtggaaccgctagcgagagcggaagccgagatagtctctaggtcagcagctatgtatgtattttctagtttttgtcctgttaatgttaagtcttcttgtgaacaacatagtgaaaaatacagagatatagtaaaaatgttaactacctc

SEQ ID NO: 20707 - protein, 294 aa, Arabidopsis thaliana
  peptide (1)..(294): Ceres Seq. ID no. 13645960
MDNHNEEPNIAPEPNRWYNITLGPSLLNNNHSYSPKFCTLRYEFKPASIDSTKPGLLHKSKDNKVTLEFQNNQLNKPKVRFDGVSEDYNDRDKDAVLFFDGENFRLEKLHRSVKRLKYLRVPDESASASRVVSKVVPPVANTVKPVKMAQIDINNPVDFEEDVNIDDDGEDDNDGQESVKEETLLRKEFQTGGLDIDINLPHPAEMEDDEIAVVDINDDESYRGLNAAEALRAQVNAEAREESRKSSSSGSGRESESSESGVESSGSGSSSSSESRNRGSEGGTASESGSRDSL

SEQ ID NO: 20708 - protein, 147 aa, Arabidopsis thaliana
  peptide (1)..(147): Ceres Seq. ID no. 13645961
MAQIDINNPVDFEEDVNIDDDGEDDNDGQESVKEETLLRKEFQTGGLDIDINLPHPAEMEDDEIAVVDINDDESYRGLNAAEALRAQVNAEAREESRKSSSSGSGRESESSESGVESSGSGSSSSSESRNRGSEGGTASESGSRDSL

SEQ ID NO: 20709 - DNA, 1573 bp, Arabidopsis thaliana
  misc_feature (1)..(1573): Ceres Seq. ID no. 13592852
tcttcttcttcctcttcccctaacattccattccccgtatgggtctcaccacttcctaactcttctctctctcttatctcttcttgttttagctatgaagaagcaatctcaattcagatccagtcacacacttctcttctttcttctctgatcatcaacaacaacgattcgggttctgtaattttactaattggagagaaaatggcgatgttagttgagccaccaaatgggattaagcaacaagggaaacattactactctatgtggcaaacattgttcgaaatcgatactaagtatgttccgattaaacccattggaagaggagcttatggtgtggtttgttcttctatcaatcgtgagactaatgagagagttgctattaaaaagattcacaatgtgtttgagaatcgtgttgatgctttgagaacgttgagggaacttaagcttcttaggcatgtgaggcatgagaatgtgatcgcgcttaaagatgttatgttgcctgctaatagatccagtttcaaggatgtttatttggtttatgagctaatggatactgatcttcatcagattattaaatcctctcagtctctttctgatgatcactgcaagtacttcttgtttcagttgcttagaggattgaagtatcttcactctgcaaacatacttcaccgggatttgaagcccgggaacctcttagttaacgcgaattgcgatctcaagatttgtgatttcgggttagcgagaacgagccaaggtaatgaacagttcatgactgagtatgtggttacacgttggtacagagcacctgagcttcttctttgttgtgataactatggaacctccattgatgtatggtcggttggttgcatattcgcggagattcttggtaggaaaccgatttttccaggaacagaatgcttgaatcagcttaagctaatcatcaacgttgttggtagccaacaagaatctgatattcggttcatagacaacccgaaagctcgaaggtttataaagtctcttccttactcaagaggaactcatctctccaatctttatccacaagccaatcctctagctatagatttgttacagaggatgcttgtgtttgatccaaccaagagaatctctgtaaccgatgcactcttacacccgtacatggcggggttgtttgatcctggatccaatccgcctgcacatgtcccaatctctttggacatagatgaaaacatggaggaaccaatgatcagagagatgatgtggaatgagatgctttattaccaccctgaagctgaaatctcaaacgcctaaatcatcatcaatgatcatcaagagtaagctttttccagttttttttgttttgctttctaaaatgcagcttcgatgttatgttatatatagcgagtccacaaacgcgggaacagatcgattaaaaccccggtgctttgatctcgtctggtttgatttagttgcagtgagtgagtagtagtaacagagtttgaaaagtggctctcagtatctttaccactttgtaaatgtggctgtttgttactaagttaaggcttgtttttgttac

SEQ ID NO: 20710 - protein, 435 aa, Arabidopsis thaliana
  peptide (1)..(435): Ceres Seq. ID no. 15221173
SSSSSSPNIPFPVWVSPLPNSSLSLISSCFSYEEAISIQIQSHTSLLSSLIINNNDSGSVILLIGEKMAMLVEPPNGIKQQGKHYYSMWQTLFEIDTKYVPIKPIGRGAYGVVCSSINRETNERVAIKKIHNVFENRVDALRTLRELKLLRHVRHENVIALKDVMLPANRSSFKDVYLVYELMDTDLHQIIKSSQSLSDDHCKYFLFQLLRGLKYLHSANILHRDLKPGNLLVNANCDLKICDFGLARTSQGNEQFMTEYVVTRWYRAPELLLCCDNYGTSIDVWSVGCIFAEILGRKPIFPGTECLNQLKLIINVVGSQQESDIRFIDNPKARRFIKSLPYSRGTHLSNLYPQANPLAIDLLQRMLVFDPTKRISVTDALLHPYMAGLFDPGSNPPAHVPISLDIDENMEEPMIREMMWNEMLYYHPEAEISNA

SEQ ID NO: 20711 - protein, 368 aa, Arabidopsis thaliana
  peptide (1)..(368): Ceres Seq. ID no. 15221174
MAMLVEPPNGIKQQGKHYYSMWQTLFEIDTKYVPIKPIGRGAYGVVCSSINRETNERVAIKKIHNVFENRVDALRTLRELKLLRHVRHENVIALKDVMLPANRSSFKDVYLVYELMDTDLHQIIKSSQSLSDDHCKYFLFQLLRGLKYLHSANILHRDLKPGNLLVNANCDLKICDFGLARTSQGNEQFMTEYVVTRWYRAPELLLCCDNYGTSIDVWSVGCIFAEILGRKPIFPGTECLNQLKLIINVVGSQQESDIRFIDNPKARRFIKSLPYSRGTHLSNLYPQANPLAIDLLQRMLVFDPTKRISVTDALLHPYMAGLFDPGSNPPAHVPISLDIDENMEEPMIREMMWNEMLYYHPEAEISNA

SEQ ID NO: 20712 - protein, 366 aa, Arabidopsis thaliana
  peptide (1)..(366): Ceres Seq. ID no. 15221175
MLVEPPNGIKQQGKHYYSMWQTLFEIDTKYVPIKPIGRGAYGVVCSSINRETNERVAIKKIHNVFENRVDALRTLRELKLLRHVRHENVIALKDVMLPANRSSFKDVYLVYELMDTDLHQIIKSSQSLSDDHCKYFLFQLLRGLKYLHSANILHRDLKPGNLLVNANCDLKICDFGLARTSQGNEQFMTEYVVTRWYRAPELLLCCDNYGTSIDVWSVGCIFAEILGRKPIFPGTECLNQLKLIINVVGSQQESDIRFIDNPKARRFIKSLPYSRGTHLSNLYPQANPLAIDLLQRMLVFDPTKRISVTDALLHPYMAGLFDPGSNPPAHVPISLDIDENMEEPMIREMMWNEMLYYHPEAEISNA

SEQ ID NO: 20713 - DNA, 615 bp, Arabidopsis thaliana
  misc_feature (1)..(615): Ceres Seq. ID no. 13496874
  misc_feature (1)..(615): Ortholog of  Ceres SEQ ID NO 14304353 as cited in SEQ ID NO 20380
atggggacatattattcatcacaagttttaagcagtatttgtaagaaaatggcttccaagactttgcttcttttgggtctctttgcatttcttttcatcgtctcagaaatggctgccgcgggcacggtgaagtcagagagtgaggaaactgtgaaacctgaacaacatggtggtggattcggtgacaatggaggaggaagataccaaggaggaggcggccatggtggccacggagggggaggataccaaggaggaggaggacgataccaaggaggcggtgggcgacaaggaggagggggaagttactgccgccacggctgctgctacaaaggttaccatggctgctcaaggtgttgttcatatgccggagaagcggttcagactcagtctggtcactaaatctacataatatatcaaccaccatgagtgtacgatttcatttatatatacacttacgtgtgtatgtgatatgacaatacacttacgtttgtaatgaagtgccttaagtttaagaggagaaactatcggaataaagtttcataatgtaatgcctttgtgtttatttaagttgttatttgcgatgtttgcataataaagttgtttctagttgaagtt

SEQ ID NO: 20714 - protein, 132 aa, Arabidopsis thaliana
  peptide (1)..(132): Ceres Seq. ID no. 13496875
MGTYYSSQVLSSICKKMASKTLLLLGLFAFLFIVSEMAAAGTVKSESEETVKPEQHGGGFGDNGGGRYQGGGGHGGHGGGGYQGGGGRYQGGGGRQGGGGSYCRHGCCYKGYHGCSRCCSYAGEAVQTQSGH

SEQ ID NO: 20715 - protein, 116 aa, Arabidopsis thaliana
  peptide (1)..(116): Ceres Seq. ID no. 13496876
MASKTLLLLGLFAFLFIVSEMAAAGTVKSESEETVKPEQHGGGFGDNGGGRYQGGGGHGGHGGGGYQGGGGRYQGGGGRQGGGGSYCRHGCCYKGYHGCSRCCSYAGEAVQTQSGH

SEQ ID NO: 20716 - protein, 96 aa, Arabidopsis thaliana
  peptide (1)..(96): Ceres Seq. ID no. 13496877
MAAAGTVKSESEETVKPEQHGGGFGDNGGGRYQGGGGHGGHGGGGYQGGGGRYQGGGGRQGGGGSYCRHGCCYKGYHGCSRCCSYAGEAVQTQSGH

SEQ ID NO: 20717 - DNA, 571 bp, Arabidopsis thaliana
  misc_feature (1)..(571): Ceres Seq. ID no. 12420691
gtagaatcttcccgtactttacttttccggaggaatagaaaattgggggctagggttcgcaattgtagttttcgagcgaagaagatgatcgaggtggttctcaacgatcgtttagggaaaaaagttagggtgaagtgtaacgatgatgacacgatcggtgatctgaagaagcttgtcgcggcacaaaccggaacacgagccgagaagatcagaattcagaagtggtacaacatctacaaggatcacatcactctcaaggactatgagatccatgacggcatgggtcttgagctttactacaactaggccaatcgaaggagctaagctgaaggagtgttgttgatttggacacctacataaactcatatcaaccatgttacatctaaaaaagacacaagtatgttgtaagacgtgataacttcaaatttgtggtaataataatacattcactgtcaatggttttaaacccttccaaattgtcagattgatttctggttatctctaagtttgtagtatattagtctttttggttgtattgatgtgctctttctccaaatgttacccatcttcc

SEQ ID NO: 20718 - protein, 101 aa, Arabidopsis thaliana
  peptide (1)..(101): Ceres Seq. ID no. 12420692
VESSRTLLFRRNRKLGARVRNCSFRAKKMIEVVLNDRLGKKVRVKCNDDDTIGDLKKLVAAQTGTRAEKIRIQKWYNIYKDHITLKDYEIHDGMGLELYYN

SEQ ID NO: 20719 - protein, 73 aa, Arabidopsis thaliana
  peptide (1)..(73): Ceres Seq. ID no. 12420693
MIEVVLNDRLGKKVRVKCNDDDTIGDLKKLVAAQTGTRAEKIRIQKWYNIYKDHITLKDYEIHDGMGLELYYN

SEQ ID NO: 20720 - DNA, 592 bp, Arabidopsis thaliana
  misc_feature (1)..(592): Ceres Seq. ID no. 12323993
atcaaaatctttacaatatttatcatgtatgattctatcaagtgagatggaacggtatgcaatttttccgtttaataatgtgttttcgcttacaggttgaacaagtcactccagtagcagtagagaacgttgaggtaccaacaaagacagtggaggagacagtggtggagacagaggtgacccaacagccggaagaatccgtccccgccgtgacagaacaaaaatccgaagcaccaattgtagaaacaaacgaagaagtggttgtggaagaggcagagaagaaagatgaagaaaccgagaagaaaacagaggagaaagacgagaagacagaagtgatcacggaaactccggtagttgaggaggaggagaagaaagctgaggaagtgaccgaaactccggcggttgtggaggaggagaagaagacagaggtggttgaggagaaacagactgaggttgcggctgctgaggaagtcgccgttgagaaggccgaggagtaaagaggaaggaagaagctatatatgaccttttttggtctcatatcgttttctgtttattttattttatcaacatttcataagtattttctatgttt

SEQ ID NO: 20721 - protein, 146 aa, Arabidopsis thaliana
  peptide (1)..(146): Ceres Seq. ID no. 12323994
MQFFRLIMCFRLQVEQVTPVAVENVEVPTKTVEETVVETEVTQQPEESVPAVTEQKSEAPIVETNEEVVVEEAEKKDEETEKKTEEKDEKTEVITETPVVEEEEKKAEEVTETPAVVEEEKKTEVVEEKQTEVAAAEEVAVEKAEE

SEQ ID NO: 20722 - protein, 139 aa, Arabidopsis thaliana
  peptide (1)..(139): Ceres Seq. ID no. 12323995
MCFRLQVEQVTPVAVENVEVPTKTVEETVVETEVTQQPEESVPAVTEQKSEAPIVETNEEVVVEEAEKKDEETEKKTEEKDEKTEVITETPVVEEEEKKAEEVTETPAVVEEEKKTEVVEEKQTEVAAAEEVAVEKAEE

SEQ ID NO: 20723 - DNA, 1578 bp, Arabidopsis thaliana
  misc_feature (1)..(1578): Ceres Seq. ID no. 12421854
  misc_feature (1)..(1578): Ortholog of  Ceres SEQ ID NO 12590542 as cited in SEQ ID NO 621
  misc_feature (1)..(1578): Ortholog of  Ceres SEQ ID NO 13597847 as cited in SEQ ID NO 64858
gacctttggtttctgtgttgtgtgatatttactacgaaaccacttgtcaccaaaggttcttctttcttttagcgttgggttcgtgattccaagatcaatggttgtgaacttcactagttagagatactgaatcaaagagatgattcttccgagaattgggtaaatctatcgattctgattttctggattaaagaactagtaacctattttcattccatagcttcttcagatcatacattctcgcaagtgttcgatacgggtgtagaagaagaagagtctttctatgctcctgatcatgatgtcttgactctgcttcaacctaacttcaccaccaacgatgtctagtagtaccaagaacattccaaaacctcctcctcttccttgtattacctaccagcgttttcaatctagtacaaggaaaccttcgagcttaatgcgccttgtgcctaaagaagcacttgaaacttgggataagcttttcaaggaaggatctggagcagatacatatgttgaaaccgataacaagtctcactttcctgcccattcaagtgtcctggctgcagcctcaccagttatagcgacacttctgaatcaatcgagggataagaatgggaatacatacctcaaaatccatggagttccttgtgaagcagtctacatgttcattaggtttctatactcttcctgctacgaggaggaagaaatgaagaagtttgtgctccatttattggttctgtcacattgctactcggtcccatctcttaaaagactttgtgtagagattctcgatcaaggatggattaacaaggagaatgtgatcgatgtgcttcaactagcgagaaactgtgacgtgacaaggatttgctttgtatgtctttccatggtcatcaaagacttcaaatctgtatcttcaacagagggatggaaagtgatgaaacgctctaatcctttgctcgaacaagagctcattgaggcagtcatcgaatccgacagtaggaaacaagaaagaagaagaaaactggaggagagagaagtgtatttgcagctctatgaagccatggaagctcttgtccacatatgtcgtgaaggttgtgggacaattggacctcgcgataaggcccttaaaggaagccataccgtgtgtaaattcccggcgtgtaaagggcttgaaggtgcgctcagacatttcttgggatgcaagtctagggcttcatgttctcattgcaaaaggatgtggcagcttcttcagcttcactcttgtatctgtgatgattctaattcttgcaaagtttctctctgctggaatttcaaggagaaaatgaagaagcttagcaagaaagaacaatctaaatggcgattgcttgtagaaaacattattagggcgaggaacagtctcgggcccttctcgtcacgtccttctggtttgatatagaaacaggttttagattttagtgtatagccagttagacacaaaaagaaaacgtacataggcgcagggtatagtgtatattgcgcaccaatacggcgcacaatagtggttttgaacaaacattgtctatatcaagttggttgttatat

SEQ ID NO: 20724 - protein, 364 aa, Arabidopsis thaliana
  peptide (1)..(364): Ceres Seq. ID no. 12421855
MSSSTKNIPKPPPLPCITYQRFQSSTRKPSSLMRLVPKEALETWDKLFKEGSGADTYVETDNKSHFPAHSSVLAAASPVIATLLNQSRDKNGNTYLKIHGVPCEAVYMFIRFLYSSCYEEEEMKKFVLHLLVLSHCYSVPSLKRLCVEILDQGWINKENVIDVLQLARNCDVTRICFVCLSMVIKDFKSVSSTEGWKVMKRSNPLLEQELIEAVIESDSRKQERRRKLEEREVYLQLYEAMEALVHICREGCGTIGPRDKALKGSHTVCKFPACKGLEGALRHFLGCKSRASCSHCKRMWQLLQLHSCICDDSNSCKVSLCWNFKEKMKKLSKKEQSKWRLLVENIIRARNSLGPFSSRPSGLI

SEQ ID NO: 20725 - protein, 332 aa, Arabidopsis thaliana
  peptide (1)..(332): Ceres Seq. ID no. 12421856
MRLVPKEALETWDKLFKEGSGADTYVETDNKSHFPAHSSVLAAASPVIATLLNQSRDKNGNTYLKIHGVPCEAVYMFIRFLYSSCYEEEEMKKFVLHLLVLSHCYSVPSLKRLCVEILDQGWINKENVIDVLQLARNCDVTRICFVCLSMVIKDFKSVSSTEGWKVMKRSNPLLEQELIEAVIESDSRKQERRRKLEEREVYLQLYEAMEALVHICREGCGTIGPRDKALKGSHTVCKFPACKGLEGALRHFLGCKSRASCSHCKRMWQLLQLHSCICDDSNSCKVSLCWNFKEKMKKLSKKEQSKWRLLVENIIRARNSLGPFSSRPSGLI

SEQ ID NO: 20726 - protein, 257 aa, Arabidopsis thaliana
  peptide (1)..(257): Ceres Seq. ID no. 12421857
MFIRFLYSSCYEEEEMKKFVLHLLVLSHCYSVPSLKRLCVEILDQGWINKENVIDVLQLARNCDVTRICFVCLSMVIKDFKSVSSTEGWKVMKRSNPLLEQELIEAVIESDSRKQERRRKLEEREVYLQLYEAMEALVHICREGCGTIGPRDKALKGSHTVCKFPACKGLEGALRHFLGCKSRASCSHCKRMWQLLQLHSCICDDSNSCKVSLCWNFKEKMKKLSKKEQSKWRLLVENIIRARNSLGPFSSRPSGLI

SEQ ID NO: 20727 - DNA, 957 bp, Arabidopsis thaliana
  misc_feature (1)..(957): Ceres Seq. ID no. 12558659
  misc_feature (1)..(957): Ortholog of  Ceres SEQ ID NO 15175034 as cited in SEQ ID NO 62432
  misc_feature (1)..(957): Ortholog of  Ceres SEQ ID NO 12619999 as cited in SEQ ID NO 66123
  misc_feature (1)..(957): Ortholog of  Ceres SEQ ID NO 13656436 as cited in SEQ ID NO 69154
attaattcattatcatcaaataatacagcagcaacacagcaacacagtaaaacccaattccctaatcccaaaattcgatctctcatctgatggctggttacagagccgatgaagagtacgattacctcttcaagctcgtgttgatcggcgactctggtgtcggcaaatcgaatctgctctctcggttcaccaagaacgagttcaatctcgaatccaagtctactattggtgttgagttcgctaccaaaaccactaaagtcgaaggcaaagtcgtcaaagctcagatttgggatactgctggtcaagagagataccgagcaatcacaagcgcttattacagaggagctgttggtgctttgcttatttacgacgtgacaaggcacgcaacatttgagaatgcagcaagatggctaagggaactaagaggacacacagacccaaacatagtggtgatgcttatagggaacaagtgcgatctgcgtcacttggtggcagtcaaaacagaagaggctaaagcctttgctgagagagaatccctctatttcatggagacttcagctctagacgcaaccaatgttgaaaacgcattcacggaagtgctcactcagatccacaagatagtgagcaaaagaagtgttgatggaggaggagagtcggctgatttaccgggaaaaggagagacgataaacgttaaagaagacggatcggttcttaagagaatgggttgctgctctaactagagtggggggattgtagatttggcttgatttggttagggtgagacaacaaatgataatctctttgggtcttgcaatcaaaaaagaaataagaaacgattacttttaagatcatgtgtatgctttggtaactttggcctgtaaggtcctttaaaatttaagtacatgattggtaatttgtttttcaaaaaaaaaaaaaaaaaagcttatcgatccgtcg

SEQ ID NO: 20728 - protein, 216 aa, Arabidopsis thaliana
  peptide (1)..(216): Ceres Seq. ID no. 12558660
MAGYRADEEYDYLFKLVLIGDSGVGKSNLLSRFTKNEFNLESKSTIGVEFATKTTKVEGKVVKAQIWDTAGQERYRAITSAYYRGAVGALLIYDVTRHATFENAARWLRELRGHTDPNIVVMLIGNKCDLRHLVAVKTEEAKAFAERESLYFMETSALDATNVENAFTEVLTQIHKIVSKRSVDGGGESADLPGKGETINVKEDGSVLKRMGCCSN

SEQ ID NO: 20729 - DNA, 1462 bp, Arabidopsis thaliana
  misc_feature (1)..(1462): Ceres Seq. ID no. 12578784
  misc_feature (1)..(1462): Ortholog of  Ceres SEQ ID NO 13658847 as cited in SEQ ID NO 66674
ctccgatgtttcaaaaacaaagtcgattacgctagaatccatggtcacgacatcttctacagcaattctcttcttcatccgaagatgaattcgtattgggcgaaacttccggtggttaaagctgcgatgcttgctcacccatttatggattgaagctttagagagaaaatgggtgatgaggcagagatcaaggaacatttaaagccacaagcttcatctgaaacaatagacaagaaacataatgtgaaagggaagaggttatggcagaaagtcaagtatcaattggtggagtttcattcattgcctgcttatttaagagacaatgagtacatcattggtcattaccgatccgaatggcggatcaaacagattcttctcagcatctttaccattcataatgagactttgaatgtttggacgcatttgattgggtttttcctgtttttggcactcactatatacactgcaacgaaagtaccgagtgtcgtggatcttcattcgcttcaacaccgtttacccgatttgttgaggaaaacagatctccacaaacttcattctgagctcatgtctcgccttccttctagtccatctagttggcatgtgatggaccttctttataactgtttgcctgaaagattttctcatggcaactacactgacatgtgtgttctgcattctgtgagggaagatcttgcaaacttgatagctcctttgatcttcaggccaattactcgatggccgttttatgcatttctaggtggtgctatattctgtctattagcaagcagcacgtgccacctcctctcatgtcactccgagcgagtctcctacataatgcttaggcttgattacgccggcatcgcagctctaatagcgacttccttctaccctccggtttattactccttcatgtgtgatcctttcttctgcaacctctacttaggattcataaccatcttaggaatcgccactgtgcttgtttctctcctcccggttttccaaagcctggagtttcgggtggtgagggcgtctctgttctttggaatgggattctctggcttagctccgattcttcacaagctgatcatcttttgggaccaacctgaagcccttcacatgacaggttatgagattttgatgggtttgctttatgggttaggagctgtggtttatgcaactaggatcccagagagatggatgccgggtaaattcgatatagcaggacatagccatcagttgtttcatgttctggttgttgctggtgcgttaacgcactatagagctgggctagtgtatcttaagtggagagatattgaaggatgttgaagatgaagattgaagattagatggaatctttgatgttttaaatcttgtttgtagtagcttcatataaaagttggattatgtaaagtcttatctgtaatcaaacgtttaattgtttcttttattcaacaaaggattc

SEQ ID NO: 20730 - protein, 385 aa, Arabidopsis thaliana
  peptide (1)..(385): Ceres Seq. ID no. 12578785
MGDEAEIKEHLKPQASSETIDKKHNVKGKRLWQKVKYQLVEFHSLPAYLRDNEYIIGHYRSEWRIKQILLSIFTIHNETLNVWTHLIGFFLFLALTIYTATKVPSVVDLHSLQHRLPDLLRKTDLHKLHSELMSRLPSSPSSWHVMDLLYNCLPERFSHGNYTDMCVLHSVREDLANLIAPLIFRPITRWPFYAFLGGAIFCLLASSTCHLLSCHSERVSYIMLRLDYAGIAALIATSFYPPVYYSFMCDPFFCNLYLGFITILGIATVLVSLLPVFQSLEFRVVRASLFFGMGFSGLAPILHKLIIFWDQPEALHMTGYEILMGLLYGLGAVVYATRIPERWMPGKFDIAGHSHQLFHVLVVAGALTHYRAGLVYLKWRDIEGC

SEQ ID NO: 20731 - protein, 253 aa, Arabidopsis thaliana
  peptide (1)..(253): Ceres Seq. ID no. 12578786
MSRLPSSPSSWHVMDLLYNCLPERFSHGNYTDMCVLHSVREDLANLIAPLIFRPITRWPFYAFLGGAIFCLLASSTCHLLSCHSERVSYIMLRLDYAGIAALIATSFYPPVYYSFMCDPFFCNLYLGFITILGIATVLVSLLPVFQSLEFRVVRASLFFGMGFSGLAPILHKLIIFWDQPEALHMTGYEILMGLLYGLGAVVYATRIPERWMPGKFDIAGHSHQLFHVLVVAGALTHYRAGLVYLKWRDIEGC

SEQ ID NO: 20732 - protein, 240 aa, Arabidopsis thaliana
  peptide (1)..(240): Ceres Seq. ID no. 12578787
MDLLYNCLPERFSHGNYTDMCVLHSVREDLANLIAPLIFRPITRWPFYAFLGGAIFCLLASSTCHLLSCHSERVSYIMLRLDYAGIAALIATSFYPPVYYSFMCDPFFCNLYLGFITILGIATVLVSLLPVFQSLEFRVVRASLFFGMGFSGLAPILHKLIIFWDQPEALHMTGYEILMGLLYGLGAVVYATRIPERWMPGKFDIAGHSHQLFHVLVVAGALTHYRAGLVYLKWRDIEGC

SEQ ID NO: 20733 - DNA, 2159 bp, Arabidopsis thaliana
  misc_feature (1)..(2159): Ceres Seq. ID no. 12336358
  misc_feature (1)..(2159): Ortholog of  Ceres SEQ ID NO 12623467 as cited in SEQ ID NO 60951
  misc_feature (1)..(2159): Ortholog of  Ceres SEQ ID NO 14309133 as cited in SEQ ID NO 0
attcagtcgtaaaataaaaccgaatttgatttttatttttctctctcaaagtttttcttgggagagcaacaatggcgatgaggaagcttttatcgaagaaactcttcaatatcacgaatgttgcttcacagagtcttatgaattgtcgcatttcgtcttcttcgttagccgtacgaaccagagttccgaatgattcaacagatacaaccaaaatcgcaccggagcctggagatttggcgatgtcgcgaaggttcatgcataacagtgctatgattaggccggcggagattatgcagatgccggtgggagagagtttgattgagaaactccgtgagattgatggaagcaaggatcggattcgattagacggactttctccgccggagagggagacgagtttgacggtggcggatacgaagaagctgcttagagcggcgcagatcgagattgtgaaatcgaagctaagagaaacgggaagaagctggatgccgtataaggagtttgttagcgtttgtggtgaagcttcttcagatccagatctcggatctaaaatcgcgaagatgcttgatgattcagcaaacgtcatcgttttgggagattccgtttgtattagacctgatcaggtactttcttcgttcttcttctctagccttttagcattttgaaatcgtgctttgtctctgagatctctctgagtattgcagctgattgattgggagagataagagagagatttaaaaactctctgaaaaaaacggattaggttctcaaaagtttttgttcgattttgattttggaagctataccgaaaactgataccatttttattcggttggatctcttttcttttggttccaattcaacaggagaatcaaaaacctctgtgtttttaccagagttccataggaggttcccaagtttgagagagatggtgataaagaggaacagtttctacagagaccacaactctttttttttcccctaaaaaaaaaaccattggttggattagggttataaattgagtcaagaccctttggtgatttgataccaaaacctaaacataaaaaaacttcaaaagagagagttgagagaagcttactaactggttcttgggggttattagaaagtttatagagatgatgatgataatgggttgggtttatgtggagggattagtcaatagtggaagatcttaaccagaaacagggatatggggatggattgattgactttataaactagtcattgattcataaagatgtatttttgttgtgtgtttttgagtgtgctaattgtgtgtctcaaaagaaggtggtggaggtcttgttttacccagacattttctgtttttgtcttttgctattgtgtttgatcaggttaccaaatccattgaaggactgcttcctttgccaaagatccataacccaaatgaccctcggagaatcgagtttaaagagcttgaagctgaaaaggcagtgatcgatgtgaaagctcacactttggtgcggaaagagctttgggctggtctcggttacttgatcctacagactgcggggttcatgaggctaacgttttgggaactctcgtgggacgtgatggagccaatctgtttctatgtcacgtccgtgtactttatggctggttacgcgtttttcctcaggacatcgaaagagccttcttttgaagggttttaccaaagcaggttcgaggcgaaacagagaaagttgatgaatgagtatgagtttgatctggagaggtataatgaactgaagaagctgttttgctctaagccttcggatcatgtttccaagattcttggagctatcaagagttaaaattttgattaggggaaaaattgcttagattcaatgttgttgtcacaaatggtgtctgattttacctaactagagaattctaccccaaaaaaaagtaagaaaaaaacgaatgggtactactctcaaatttttcagttttcgaaaaaaagacaaagaggttgttcttattattgcggcttatgtaacatcagcgaagagttatgtttttgttttcgatttttattttttattttttttatttttttattttatgaccgatctaaaatttaacattgtgtaaataaatgtttgaaggtgtaatataatacagaattaattatctgc

SEQ ID NO: 20734 - protein, 197 aa, Arabidopsis thaliana
  peptide (1)..(197): Ceres Seq. ID no. 12336359
MAMRKLLSKKLFNITNVASQSLMNCRISSSSLAVRTRVPNDSTDTTKIAPEPGDLAMSRRFMHNSAMIRPAEIMQMPVGESLIEKLREIDGSKDRIRLDGLSPPERETSLTVADTKKLLRAAQIEIVKSKLRETGRSWMPYKEFVSVCGEASSDPDLGSKIAKMLDDSANVIVLGDSVCIRPDQVLSSFFFSSLLAF

SEQ ID NO: 20735 - protein, 195 aa, Arabidopsis thaliana
  peptide (1)..(195): Ceres Seq. ID no. 12336360
MRKLLSKKLFNITNVASQSLMNCRISSSSLAVRTRVPNDSTDTTKIAPEPGDLAMSRRFMHNSAMIRPAEIMQMPVGESLIEKLREIDGSKDRIRLDGLSPPERETSLTVADTKKLLRAAQIEIVKSKLRETGRSWMPYKEFVSVCGEASSDPDLGSKIAKMLDDSANVIVLGDSVCIRPDQVLSSFFFSSLLAF

SEQ ID NO: 20736 - protein, 175 aa, Arabidopsis thaliana
  peptide (1)..(175): Ceres Seq. ID no. 12336361
MNCRISSSSLAVRTRVPNDSTDTTKIAPEPGDLAMSRRFMHNSAMIRPAEIMQMPVGESLIEKLREIDGSKDRIRLDGLSPPERETSLTVADTKKLLRAAQIEIVKSKLRETGRSWMPYKEFVSVCGEASSDPDLGSKIAKMLDDSANVIVLGDSVCIRPDQVLSSFFFSSLLAF

SEQ ID NO: 20737 - DNA, 2300 bp, Arabidopsis thaliana
  misc_feature (1)..(2300): Ceres Seq. ID no. 13646680
gagaaaatggatacaccggaaaagagtgaaacccagatcggtactacagtttctaaactcaaagtcgaggttttttattctatacctatctcaaagtttcatgctttattagttttctcgttgttcctctgtttctgtgatgggttttttggtgtctgttagacttttcttcattgaatcgtacggttttgtgtaaagcccttgtcttaatttgttgcattttagtcaaagtttcagtttttaatcggttattggaatgaattgtgttgaaagttatggttttgatgattggagaagaatttgagatcaaagtgtttttttgtgcaatgcaggattcaccagtgtttagttacatatgcaatctctcaccaattaagactatcaaaccaattccaatcacttgtcctttaagctctctcaatttcgcatctccaccttctgttttcacttctcctcacgcggtttctcataaagagtctcgtttcagaagtcaaaaagatgtgtctgcttctaaagaagttggagaagaagaagctttagtcggtagcgaaccggaacaaagctacaagaatgactgcaatactcctagagttaccaatgatgtgaaagacaatggttgtgggaaggatttgcaggtgatgatggacaatgtcaagaagaaaagtgatactccggattgggaaactttgattgctgctacaacagaactgatttatggctcaccgagagagtcagaggcttttagttgcttgttgaagaaaacttcaaactctgaagcacgtctacgtggtagtataactgcaacatcggtggctgttacgaataccgatgtagtcaacaatgaatctgaatctgttgatgctctttcgatattgcaccgtggtgtgagaagacggtgtttagactttgaggttaaggggaaaaatcagcaaacattaggagaatcttcatctagttgtgtagtacctagcattggtctgcatcttaacaccattgcaatgtcctctaaggacaagaatgttgctaatgaatattcattttccggtaacataaaagtcggtgtgcaaagttctctgactccggtgcttcattcgcagcacgacatcgtgagagaaaatgaaagcgggaaagattcaggacaaattatagaagtggttccaaagtctttagcttcagtagacttgactccaataagccccaagaagaaaaggcgtaagtccgaacaatcaggagaaggcgactcgtcatgtaaacggtgcaactgcaaaaaatccaagtgtttgaagctttactgtgaatgctttgctgctggattttattgcatagagccatgttcatgtataaattgcttcaacaaacctatccataaagatgttgtcctggcgactcgcaaacagattgaatcccgcaatccacttgcatttgctcctaaagtcatcagaaactcagattccatcattgaagttggtgaggatgcaagtaaaactccagcttcagcgcgacacaaacgaggctgtaactgcaagaaatcaaactgtctgaagaaatactgtgaatgctatcagggcggagttggttgttctataaactgtagatgtgaaggatgtaaaaatgcatttggcagaaaagatgggtctttgttcgaacaagatgaggagaatgaaacatctggcacacccggaacaaagaaaacacaacagaatgtcgagttgttcaaacctgcagctccaccttcaacaccaattccatttagacaaccactggcgcaacttccaatctcatccaacaacagactgctacctccacagtctcattttcatcatggagctattggatcatcttcctcagggatatacaacatcagaaaaccagacatgagtttgttgtctcattcaagaatcgagacaatcacagaggatattgatgatatgtctgagaatctaatccattctccaataactactctatctcccaacagcaaaagggtttcgttgtctcatcttgattcaccagagtcgactccatggagaagaaatggtggggggaggaatctgatacgttcgttcccaacgtttccttctctcactccacaccattaaaattctttgaatgtcaacttctagttggtagttttaacttacacagacaacatacgcaaacatttacaagtttagtagcagtattgcgttagtttttacaatggttgtgtaataaaaatgttaagtcatttatcaatatcttgacaacattcctcgtctaatatcacaaatgtaaccttatttattcaacaattttcatgt

SEQ ID NO: 20738 - protein, 607 aa, Arabidopsis thaliana
  peptide (1)..(607): Ceres Seq. ID no. 13646681
MVLMIGEEFEIKVFFCAMQDSPVFSYICNLSPIKTIKPIPITCPLSSLNFASPPSVFTSPHAVSHKESRFRSQKDVSASKEVGEEEALVGSEPEQSYKNDCNTPRVTNDVKDNGCGKDLQVMMDNVKKKSDTPDWETLIAATTELIYGSPRESEAFSCLLKKTSNSEARLRGSITATSVAVTNTDVVNNESESVDALSILHRGVRRRCLDFEVKGKNQQTLGESSSSCVVPSIGLHLNTIAMSSKDKNVANEYSFSGNIKVGVQSSLTPVLHSQHDIVRENESGKDSGQIIEVVPKSLASVDLTPISPKKKRRKSEQSGEGDSSCKRCNCKKSKCLKLYCECFAAGFYCIEPCSCINCFNKPIHKDVVLATRKQIESRNPLAFAPKVIRNSDSIIEVGEDASKTPASARHKRGCNCKKSNCLKKYCECYQGGVGCSINCRCEGCKNAFGRKDGSLFEQDEENETSGTPGTKKTQQNVELFKPAAPPSTPIPFRQPLAQLPISSNNRLLPPQSHFHHGAIGSSSSGIYNIRKPDMSLLSHSRIETITEDIDDMSENLIHSPITTLSPNSKRVSLSHLDSPESTPWRRNGGGRNLIRSFPTFPSLTPHH

SEQ ID NO: 20739 - protein, 604 aa, Arabidopsis thaliana
  peptide (1)..(604): Ceres Seq. ID no. 13646682
MIGEEFEIKVFFCAMQDSPVFSYICNLSPIKTIKPIPITCPLSSLNFASPPSVFTSPHAVSHKESRFRSQKDVSASKEVGEEEALVGSEPEQSYKNDCNTPRVTNDVKDNGCGKDLQVMMDNVKKKSDTPDWETLIAATTELIYGSPRESEAFSCLLKKTSNSEARLRGSITATSVAVTNTDVVNNESESVDALSILHRGVRRRCLDFEVKGKNQQTLGESSSSCVVPSIGLHLNTIAMSSKDKNVANEYSFSGNIKVGVQSSLTPVLHSQHDIVRENESGKDSGQIIEVVPKSLASVDLTPISPKKKRRKSEQSGEGDSSCKRCNCKKSKCLKLYCECFAAGFYCIEPCSCINCFNKPIHKDVVLATRKQIESRNPLAFAPKVIRNSDSIIEVGEDASKTPASARHKRGCNCKKSNCLKKYCECYQGGVGCSINCRCEGCKNAFGRKDGSLFEQDEENETSGTPGTKKTQQNVELFKPAAPPSTPIPFRQPLAQLPISSNNRLLPPQSHFHHGAIGSSSSGIYNIRKPDMSLLSHSRIETITEDIDDMSENLIHSPITTLSPNSKRVSLSHLDSPESTPWRRNGGGRNLIRSFPTFPSLTPHH

SEQ ID NO: 20740 - protein, 590 aa, Arabidopsis thaliana
  peptide (1)..(590): Ceres Seq. ID no. 13646683
MQDSPVFSYICNLSPIKTIKPIPITCPLSSLNFASPPSVFTSPHAVSHKESRFRSQKDVSASKEVGEEEALVGSEPEQSYKNDCNTPRVTNDVKDNGCGKDLQVMMDNVKKKSDTPDWETLIAATTELIYGSPRESEAFSCLLKKTSNSEARLRGSITATSVAVTNTDVVNNESESVDALSILHRGVRRRCLDFEVKGKNQQTLGESSSSCVVPSIGLHLNTIAMSSKDKNVANEYSFSGNIKVGVQSSLTPVLHSQHDIVRENESGKDSGQIIEVVPKSLASVDLTPISPKKKRRKSEQSGEGDSSCKRCNCKKSKCLKLYCECFAAGFYCIEPCSCINCFNKPIHKDVVLATRKQIESRNPLAFAPKVIRNSDSIIEVGEDASKTPASARHKRGCNCKKSNCLKKYCECYQGGVGCSINCRCEGCKNAFGRKDGSLFEQDEENETSGTPGTKKTQQNVELFKPAAPPSTPIPFRQPLAQLPISSNNRLLPPQSHFHHGAIGSSSSGIYNIRKPDMSLLSHSRIETITEDIDDMSENLIHSPITTLSPNSKRVSLSHLDSPESTPWRRNGGGRNLIRSFPTFPSLTPHH

SEQ ID NO: 20741 - DNA, 2850 bp, Arabidopsis thaliana
  misc_feature (1)..(2850): Ceres Seq. ID no. 14309755
  misc_feature (1)..(2850): Ortholog of  Ceres SEQ ID NO 14310369 as cited in SEQ ID NO 54765
  misc_feature (1)..(2850): Ortholog of  Ceres SEQ ID NO 13638746 as cited in SEQ ID NO 59296
  misc_feature (1)..(2850): Ortholog of  Ceres SEQ ID NO 13596474 as cited in SEQ ID NO 62169
  misc_feature (1)..(2850): Ortholog of  Ceres SEQ ID NO 13598714 as cited in SEQ ID NO 62656
  misc_feature (1)..(2850): Ortholog of  Ceres SEQ ID NO 14302434 as cited in SEQ ID NO 63410
  misc_feature (1)..(2850): Ortholog of  Ceres SEQ ID NO 15225685 as cited in SEQ ID NO 63616
  misc_feature (1)..(2850): Ortholog of  Ceres SEQ ID NO 13597519 as cited in SEQ ID NO 64759
  misc_feature (1)..(2850): Ortholog of  Ceres SEQ ID NO 14302388 as cited in SEQ ID NO 65655
  misc_feature (1)..(2850): Ortholog of  Ceres SEQ ID NO 13587054 as cited in SEQ ID NO 0
gacagaggaggagcacatcatcgtgttcttcttcgactcggcgattccaaaaaaggacgcttgcttcatcgcaggcgtcgctgtatcactctccggccgagttctttcacgttttcttcgaaggaatgcaaaactatggtgattgattaaatcgtgtgacaatcgaaaagttgaggaattgcaaggattcgagatagagtctaaaaatggagcaccaagaccttacagattcgagaaaggatcctctttgcatttctcaattgaaaatttcttcttcttctctcgacccattgcctcatgccaacatggcagaggatttaacaaagagtcgtaggcattcacctataaaagtggaagggagtgaagaaacttggggagtagaagatgatgatgaccttactgaccctatttttgataccattgagggcaatggacattcagatccaacaagctgcttcgatgctgatttaagtgagtacaaaaagaaggccacagtaatcgttgaggaatactttggcaccaatgatgttgtctctgttgttaatgaactaaaggagcttggaatggctgagtaccgttattattttgtcaagaagttagtctccatggctatggatagacatgacaaagagaaagaaatggctgcttttctcctctctaccctttatgccgacgtcattgatcccccagaagtttacagaggtttcaacaaactggtcgcttctgctgatgatttatctgttgatattcccgatgcagttgatgttcttgctgtctttgtggctcgggcaattgttgacgacattcttcctcctgcgtttctcaagaagcaaatgaaattgctgccagataactccaaaggtgttgaggttttgagaaaggctgagaagagctatctagcgactccgcttcatgctgaagttgttgagaagagatggggagggactgataattggactgctgaggatgtgaaagctagaattaacgacttgttgaaagagtatgtcatgagtggagacaaaaaagaagcttttagatgcatcaaaggattgaaagttcctttctttcatcatgagattgtcaaacgagcactgatcatggcaatggaaaggcgaaaagctcaagtcaggctgctagatctgttgaaagaaacgattgaggttggtctcataaactccactcaggtgacaaaagggtttagcagaatcattgattcaatcgaagatttgtctcttgacataccagacgcacgccgtattttacagtctttcatctctaaagcggcttctgaaggatggttatgtgcttcttctctgaaatcactctctgctgatgcaggagaaaagttacttgaaaactccagcgccaatgtttttaaagacaaggcgaagtcgatcatccgagagtatttcctttcaggtgacacttcagaggtcgtacattgtctagacaccgaattgaatgcatcttcgagtcagctacgcgcaatctttgtcaaatatctgataactctagcaatggacaggaagaaaagagagaaggagatggcttgtgtgctcgtctctactcttggtttccctcccaaagatgtcagaagcgcattctcgatgctcatactcgtgccgagagagccactagtccccccccccccatcttctcgggtaaacagaatcaactagttttgtttttcctctttcaaaaatgcatttctcttcgtcttcaacatcgtccacttggacaatcttaatcacattgggatgtcttatgcttcatgcatctttgtccgctgctcaactcacccctaccttctacgataggtcatgtcctaatgtcactaacatcgtacgagaaaccattgtaaatgagttaaggtcggaccctcgtatcgctgcgagcatccttcgtcttcacttccacgactgctatgttaatggttgtgacgcatccatcttgttagacaacacgacatcatttcgaacagagaaagatgcgtttggaaacgcaaattcggctcggggatttcctgtgattgatagaatgaaagctgcggtggagagggcatgcccaagaaccgtttcatgcgcagatatgctcaccattgctgctcaacaatctgtcactttggcaggaggtccttcttggagggttcctttgggaaggagagacagtttacaagcattcctggaactcgctaatgcaaatcttccagctccattctttacacttccacaacttaaagccagcttcagaaatgttggtctcgatcgtccttctgatctcgttgctctctccggtggtcacacatttggtaaaaatcaatgtcagtttattcttgacagattatacaatttcagcaacacaggtttacccgaccctaccctcaatactacttacctccaaactcttcgtggactatgcccccttaatggcaatcgaagtgccttggtagattttgatctacgtacgcctacggttttcgacaacaaatactacgtgaatctcaaagagcgaaaaggtcttatccagagcgaccaagagttgttctctagccccaatgccactgacacaatccccttggtgagagcatatgctgatggcacacaaacatttttcaatgcatttgtggaggcgatgaataggatgggaaacattacaccaactacaggaactcaaggacaaatcagattgaactgtagagtggtgaactccaactctctgctccatgatgtggtggatatcgttgactttgttagctctatgtgagaattgtttacccaatatgtggctacaagaatacatatatattaatgaataaaactctcaagacgtttacttgagaacatttatttt

SEQ ID NO: 20742 - protein, 490 aa, Arabidopsis thaliana
  peptide (1)..(490): Ceres Seq. ID no. 14309756
MEHQDLTDSRKDPLCISQLKISSSSLDPLPHANMAEDLTKSRRHSPIKVEGSEETWGVEDDDDLTDPIFDTIEGNGHSDPTSCFDADLSEYKKKATVIVEEYFGTNDVVSVVNELKELGMAEYRYYFVKKLVSMAMDRHDKEKEMAAFLLSTLYADVIDPPEVYRGFNKLVASADDLSVDIPDAVDVLAVFVARAIVDDILPPAFLKKQMKLLPDNSKGVEVLRKAEKSYLATPLHAEVVEKRWGGTDNWTAEDVKARINDLLKEYVMSGDKKEAFRCIKGLKVPFFHHEIVKRALIMAMERRKAQVRLLDLLKETIEVGLINSTQVTKGFSRIIDSIEDLSLDIPDARRILQSFISKAASEGWLCASSLKSLSADAGEKLLENSSANVFKDKAKSIIREYFLSGDTSEVVHCLDTELNASSSQLRAIFVKYLITLAMDRKKREKEMACVLVSTLGFPPKDVRSAFSMLILVPREPLVPPPPSSRVNRIN

SEQ ID NO: 20743 - protein, 457 aa, Arabidopsis thaliana
  peptide (1)..(457): Ceres Seq. ID no. 14309757
MAEDLTKSRRHSPIKVEGSEETWGVEDDDDLTDPIFDTIEGNGHSDPTSCFDADLSEYKKKATVIVEEYFGTNDVVSVVNELKELGMAEYRYYFVKKLVSMAMDRHDKEKEMAAFLLSTLYADVIDPPEVYRGFNKLVASADDLSVDIPDAVDVLAVFVARAIVDDILPPAFLKKQMKLLPDNSKGVEVLRKAEKSYLATPLHAEVVEKRWGGTDNWTAEDVKARINDLLKEYVMSGDKKEAFRCIKGLKVPFFHHEIVKRALIMAMERRKAQVRLLDLLKETIEVGLINSTQVTKGFSRIIDSIEDLSLDIPDARRILQSFISKAASEGWLCASSLKSLSADAGEKLLENSSANVFKDKAKSIIREYFLSGDTSEVVHCLDTELNASSSQLRAIFVKYLITLAMDRKKREKEMACVLVSTLGFPPKDVRSAFSMLILVPREPLVPPPPSSRVNRIN

SEQ ID NO: 20744 - protein, 371 aa, Arabidopsis thaliana
  peptide (1)..(371): Ceres Seq. ID no. 14309758
MAEYRYYFVKKLVSMAMDRHDKEKEMAAFLLSTLYADVIDPPEVYRGFNKLVASADDLSVDIPDAVDVLAVFVARAIVDDILPPAFLKKQMKLLPDNSKGVEVLRKAEKSYLATPLHAEVVEKRWGGTDNWTAEDVKARINDLLKEYVMSGDKKEAFRCIKGLKVPFFHHEIVKRALIMAMERRKAQVRLLDLLKETIEVGLINSTQVTKGFSRIIDSIEDLSLDIPDARRILQSFISKAASEGWLCASSLKSLSADAGEKLLENSSANVFKDKAKSIIREYFLSGDTSEVVHCLDTELNASSSQLRAIFVKYLITLAMDRKKREKEMACVLVSTLGFPPKDVRSAFSMLILVPREPLVPPPPSSRVNRIN

SEQ ID NO: 20745 - DNA, 762 bp, Arabidopsis thaliana
  misc_feature (1)..(762): Ceres Seq. ID no. 13646569
gaaccacctaatctctcctcctctccttctctctattttgccggaatacatatgatcgagtgaaacggcggacaaagctgtcgtgttgagtactaattcgccgtcgtttttctcagtgaaggagtggtgagagatgtcgagtctcgaagatatcaagaacgagactgttgatctggaaaaaattccgattgaggaagttttccagcagctaaaatgttcaagggaaggattgacaacgcaggaaggggaggacaggattcagatctttggccccaacaagctcgaagagaaaaaggaaagcaaacttctgaagtttttggggtttatgtggaatccactttcatgggtcatggaaatggctgcaatcatggccattgctttggccaacggtgatggtaggcctccggattggcagcattttgttggtattatctgtctgttggttatcaactctaccatcagttttatcgaagaaaacaatgctggtaatgctgctgctgctcttatggctggtcttgctcctaaaaccaaggttcttagggatggaaagtggagtgaacaagaagctgctattcttgtcccaggagatattgttagcattaaattaggagacattatcccagctgatgcccacatagggagagatctttgtttattgccataactcttcccaaaccttattgttagtgttcttgtttctcaaatatgtacttttgcataatttgctcttttgaagaaacaaggcatgcctttgtgtttggc

SEQ ID NO: 20746 - protein, 176 aa, Arabidopsis thaliana
  peptide (1)..(176): Ceres Seq. ID no. 13646570
MSSLEDIKNETVDLEKIPIEEVFQQLKCSREGLTTQEGEDRIQIFGPNKLEEKKESKLLKFLGFMWNPLSWVMEMAAIMAIALANGDGRPPDWQHFVGIICLLVINSTISFIEENNAGNAAAALMAGLAPKTKVLRDGKWSEQEAAILVPGDIVSIKLGDIIPADAHIGRDLCLLP

SEQ ID NO: 20747 - protein, 112 aa, Arabidopsis thaliana
  peptide (1)..(112): Ceres Seq. ID no. 13646571
MWNPLSWVMEMAAIMAIALANGDGRPPDWQHFVGIICLLVINSTISFIEENNAGNAAAALMAGLAPKTKVLRDGKWSEQEAAILVPGDIVSIKLGDIIPADAHIGRDLCLLP

SEQ ID NO: 20748 - protein, 104 aa, Arabidopsis thaliana
  peptide (1)..(104): Ceres Seq. ID no. 13646572
MEMAAIMAIALANGDGRPPDWQHFVGIICLLVINSTISFIEENNAGNAAAALMAGLAPKTKVLRDGKWSEQEAAILVPGDIVSIKLGDIIPADAHIGRDLCLLP

SEQ ID NO: 20749 - DNA, 1310 bp, Arabidopsis thaliana
  misc_feature (1)..(1310): Ceres Seq. ID no. 14315788
gacgccgactcaaagaacccaaagctcttggaggaggtgatcttctcttctcagatcatcttctactcttgagtatacccttcctttgaagataattcctagtttgggacttatccttacttctccgggatttcactttaatccaccgaagagttttgacatctgaattgtattgttttgggtgtgatcccgatagaattcgagggtaggaatctgaaagtagggtgatttggtttagaagaagaaagaaatggagggttttgtcgatcactacattgttctaggtttagcttctggagaggaagctctgaagcttaccgagaaggagattgcaaaagcatacaagttgaaagctttggacttgcatcctgataaacgccctgatgatcctgatgcccatgagaaatttcagaggcttaagacatctaacgaggttctcaaagacgagaaagcccggaaactgtttgatgatcttcttagaatccagcgtgagaaacaacataagaaatcgcaagtagattccaagaggcgtaagatgatgtcagatctggaggaaagggagcgttctgctttttctcctaatccttccgctagagcttatgatgaagaagagagaatcgctaggaagcttaaggaggagatagataggatacgtgcaagacatgcgaagaagaaaagtggtttccaaactccagagagtaatgtagatgaaaagagaaaagaagaaagaagtggtgctggagctagtgttcaactcgataaagagagaatgttgaaggtttcttgggaaaaaagtggtgaagggtatacagctggaaggctaagagaagtgttttctgagtttggtgaggttgaagatgttgttattaggagtaccaagaagaaatgttctgctcttattgtaatggctacaaaggatggagctgttgcagcgacgaggacattgtgtggcaatctttctaatccattgttggttgtacctcttcagaaagcagcccaaaccgattttctgacggctaagaaatctgcagaagcagaaccgcagagtaacatagtaggtgccggtcttcaagcttatgaagatgccgtcatgcaaagactgctacaggcggctatggaccagaaaaagcgaaagccacatgatcaagaacaaagctccttcaagaccaaagtgataaagaataaagctctgcttcatgattaagaattaagctccttatacattgtttgtgtacatccaatctcatatcagttgttgttgtagaatttaaaattctaactcttctcgaaaaaaaaaaatgcttcgtatc

SEQ ID NO: 20750 - protein, 317 aa, Arabidopsis thaliana
  peptide (1)..(317): Ceres Seq. ID no. 14315789
MEGFVDHYIVLGLASGEEALKLTEKEIAKAYKLKALDLHPDKRPDDPDAHEKFQRLKTSNEVLKDEKARKLFDDLLRIQREKQHKKSQVDSKRRKMMSDLEERERSAFSPNPSARAYDEEERIARKLKEEIDRIRARHAKKKSGFQTPESNVDEKRKEERSGAGASVQLDKERMLKVSWEKSGEGYTAGRLREVFSEFGEVEDVVIRSTKKKCSALIVMATKDGAVAATRTLCGNLSNPLLVVPLQKAAQTDFLTAKKSAEAEPQSNIVGAGLQAYEDAVMQRLLQAAMDQKKRKPHDQEQSSFKTKVIKNKALLHD

SEQ ID NO: 20751 - protein, 222 aa, Arabidopsis thaliana
  peptide (1)..(222): Ceres Seq. ID no. 14315790
MMSDLEERERSAFSPNPSARAYDEEERIARKLKEEIDRIRARHAKKKSGFQTPESNVDEKRKEERSGAGASVQLDKERMLKVSWEKSGEGYTAGRLREVFSEFGEVEDVVIRSTKKKCSALIVMATKDGAVAATRTLCGNLSNPLLVVPLQKAAQTDFLTAKKSAEAEPQSNIVGAGLQAYEDAVMQRLLQAAMDQKKRKPHDQEQSSFKTKVIKNKALLHD

SEQ ID NO: 20752 - protein, 221 aa, Arabidopsis thaliana
  peptide (1)..(221): Ceres Seq. ID no. 14315791
MSDLEERERSAFSPNPSARAYDEEERIARKLKEEIDRIRARHAKKKSGFQTPESNVDEKRKEERSGAGASVQLDKERMLKVSWEKSGEGYTAGRLREVFSEFGEVEDVVIRSTKKKCSALIVMATKDGAVAATRTLCGNLSNPLLVVPLQKAAQTDFLTAKKSAEAEPQSNIVGAGLQAYEDAVMQRLLQAAMDQKKRKPHDQEQSSFKTKVIKNKALLHD

SEQ ID NO: 20753 - DNA, 1964 bp, Arabidopsis thaliana
  misc_feature (1)..(1964): Ceres Seq. ID no. 14310016
gggaggatcctgcgaagaccaaccagtctgttaattttgtataaacaatgaaacgaagaagatcttccgagaatattctctccttctcacgcataccctagaatattgtttcgtctctcttccttctacgtttgcttatttgccccaactcgacgcgaatcatcagcttttataaattctgtcaactcaaagattgtttctgaattggaatcttacagaggtttagcttgagatgatatgactaatcagcaggagcaacacattgcgatatttacaacagctagtattccatggcttacgggaactgctgttaatcctctcttccgtgctgcctaccttgcaaatgatggggaaagacgggtcacgttggtgattccatggctgactttgaagcaccaaaagcttgtctacccaaatagcatcacttttagttccccgtcagagcaagaagcttatgtccgccagtggcttgaggagagagtctcttttcgtttagcctttgagatacgtttctatcctggaaagtttgctattgacaaaaggagtattcttcctgttggggatatatctgatgccattcctgatgaagaggcagacattgctgtcctcgaggagcctgagcatctcacatggtttcatcatggccaaaaatggaaaactaagttcaactacgtcataggaatcgtacacactaactacttggaatacgttaaaagagagaaacaaggccgtgtcaaagcatttttcctcaaatacttaaatagttgggttgttggcatttactgccacaaggtaaacttctttcttctttacagccactaggacatgatagagtgattgctcaattatgtgaatatatccaatggctgggtttaatttgagaatcaagacagtttgttggaatgtgaccacaattatggccggtccttttgatgtgaatcaggacttgtaccaatgatgttactcctgcaagtaatcaagttatctgctgcgactcaggaataccctaaatctatagtctgcaatgttcatggcgtcaaccctaaatttctcgaaattgggttgagaaaactagaacagcagaagctccaggagcagcccttcactaaaggcgcatactacattggtaagatggtctggagcaaagggtacaaggagcttcttaaactacttgagaaacaccaaaaggaacttgccgagttagaggttgatttatacggtgatggagaggactctgaagagatcaaagaagcagcccgaaaactcgacttgacggttaatgtttacccaggacgtgatcacgctgactcgctatttcacaactataaagtgtttctcaaccccagcacgacagacgttgtgtgtacaacaactgcagaagccttggcgatgggaaaaatagtagtatgcgcgaatcacatatcgaacaagttcttcaaacagtttcccaactgcagaacctatgacgatggacaaggttttgtaagagccacactcaaggctcttggggaacaaccatcgcaacttacagagcaacaaaggcatgaactatcatgggaagctgctacacaacggtttataaaagtctctgatctgaaccggttatcaagagctgattcgaacttgtcaaagagaagtgtgtttgcgtcatcttcgattagtgtggggaaaaacttggaggatatgtcagcgtatattcatttcttggcgtctggatttgaagcttccagaacagcttttggtgctatacctggaagcttgcagcccgatgaagagttatgtagagatcttggtttgtctctcaacactccttccccaaatactcgcaagcaagattgacctgttttttaatttatctttgtctgcatatcattgggatatttttgtgtataaatcaatgtatactatctgaatcattctatagcagctttggtgtaatattgatgatgaaagttagatttttc

SEQ ID NO: 20754 - protein, 294 aa, Arabidopsis thaliana
  peptide (1)..(294): Ceres Seq. ID no. 14310017
MMLLLQVIKLSAATQEYPKSIVCNVHGVNPKFLEIGLRKLEQQKLQEQPFTKGAYYIGKMVWSKGYKELLKLLEKHQKELAELEVDLYGDGEDSEEIKEAARKLDLTVNVYPGRDHADSLFHNYKVFLNPSTTDVVCTTTAEALAMGKIVVCANHISNKFFKQFPNCRTYDDGQGFVRATLKALGEQPSQLTEQQRHELSWEAATQRFIKVSDLNRLSRADSNLSKRSVFASSSISVGKNLEDMSAYIHFLASGFEASRTAFGAIPGSLQPDEELCRDLGLSLNTPSPNTRKQD

SEQ ID NO: 20755 - protein, 293 aa, Arabidopsis thaliana
  peptide (1)..(293): Ceres Seq. ID no. 14310018
MLLLQVIKLSAATQEYPKSIVCNVHGVNPKFLEIGLRKLEQQKLQEQPFTKGAYYIGKMVWSKGYKELLKLLEKHQKELAELEVDLYGDGEDSEEIKEAARKLDLTVNVYPGRDHADSLFHNYKVFLNPSTTDVVCTTTAEALAMGKIVVCANHISNKFFKQFPNCRTYDDGQGFVRATLKALGEQPSQLTEQQRHELSWEAATQRFIKVSDLNRLSRADSNLSKRSVFASSSISVGKNLEDMSAYIHFLASGFEASRTAFGAIPGSLQPDEELCRDLGLSLNTPSPNTRKQD

SEQ ID NO: 20756 - protein, 235 aa, Arabidopsis thaliana
  peptide (1)..(235): Ceres Seq. ID no. 14310019
MVWSKGYKELLKLLEKHQKELAELEVDLYGDGEDSEEIKEAARKLDLTVNVYPGRDHADSLFHNYKVFLNPSTTDVVCTTTAEALAMGKIVVCANHISNKFFKQFPNCRTYDDGQGFVRATLKALGEQPSQLTEQQRHELSWEAATQRFIKVSDLNRLSRADSNLSKRSVFASSSISVGKNLEDMSAYIHFLASGFEASRTAFGAIPGSLQPDEELCRDLGLSLNTPSPNTRKQD

SEQ ID NO: 20757 - DNA, 2072 bp, Arabidopsis thaliana
  misc_feature (1)..(2072): Ceres Seq. ID no. 14309942
gagcaaagcgtcttccatttctcagaagagtgtgtgacaacagcggcaaccgacagacatgtcttcgccgacatcgccttggtttgcggatctcttcacagatgacagggtgaggaccctatcgcaccaggtctccacacttggggacagggtgtgggaactggagcacaaaattacccagctgatgggcgagaaggccaagctggagaagcaactggaggaggcaaaggcgatctcaagccacaaggaagaggtggggagaagcttgaaggctgaaaatgataagcttcagtcggaggttttggttgcggaggaaaagtgtagcaagtctgcagcggaggttgagaggctgacgaaggaattaggcgcgctggcggaggcaaaggaggcagctgccaaggaattcaacgacgagagagagaaaatcacgctagaatcggaggatctcaagatgaggctggaggaaatgctggccatcaaggatttgacagagagcgagaatgacaagcttcggtccgaggctttgatcgcagctgaaaagcaaaacatgtatgaagcagagattgagaggctcaagaaggaactgagtgggttgttggaggcgaaggaggcggctgccaaggctttcgacgtacaaaaagcagaaatcaccaatgaattagaggaactacagaggaagctgaaggaaatcgaagctaataaggatttagtggagggagaaaacagtaagcttcagtctgagattctcacagcacaggagaaatatagacagtctgaagcagaggttaagtgcattaaacaagtaatgtgttcagtggtggaggcgaaggaggcagctacaagggcatctgaagctgagaaggcagaaatcatggaggaaatggacaaccttaagaggacaatcgaggagatcaaggccaacagggatttggtagagagtcagaaccaggagcttcggtcaaagatttcgagtgcagagcaagagcgtagcctatttgaaggagagattaagagcgtcaggatggaattgggggcagtagaggaggccaagcagatccttacgagggagttcgatgctgagaaggcagagatcctgaaggaactggatgaccttgagaagaagctagaggaattgcagaccaacaagggtttgctggaggctgaaaacgacaagcttcagctggaggttttgaccgcacagcacaaacaaagcatgtccgaagcagaggctgagagccttaagatggaactgggagcattggtggaggcaaaggaggcggctacaaaagcatttggtgccgagaaagcaaagaccacgaaggaactggaggatcttaagaggaaggtggaggaaatccaaaccaagaaggatctggtggagggcgaaaaggataagctccgtttggagattttaatagcggagcagaggcatgccatggctgaattagaggttaagcgcctcaagatggacttggctgcatcggcagaggcgagggagacagttgtgaggtcatgtgacgctgagaaggccaagttcatggcggaaatagagaacctcaggaggaagatagaggaaatccacgccagcaaggaagcggccgagaaagcagcgcgcaacaaagatgcagaggctgacaggctgaaggatgagctggcgaggatccggctctctgtgtcacagctgcaagcgtcctgcgacgaacttgatgccaagcagtcgcgcctgaacgacgagaagaactctgtccagaaagcactagtgtccgagaaggtcgaaggtaacaagctcaagttaaaaatcgaggaactcgagaatcacattgctggcaaggacggtgagaaagggaaactgaaggcggcgttggaggaaaagatgactgagatcaatgctctcagcaaagacaacgcgatgctacatcgcacaattctcgaggcacaagagaagaataaaggtagcattttatcgttcttgtcaccgtgcggctccaagtaacttggttgtaatgtgttgcattactaatgcaatggtgaaggtaccatgcaatgaaataaaaatttcagtttgctctgtg

SEQ ID NO: 20758 - protein, 644 aa, Arabidopsis thaliana
  peptide (1)..(644): Ceres Seq. ID no. 14309943
MSSPTSPWFADLFTDDRVRTLSHQVSTLGDRVWELEHKITQLMGEKAKLEKQLEEAKAISSHKEEVGRSLKAENDKLQSEVLVAEEKCSKSAAEVERLTKELGALAEAKEAAAKEFNDEREKITLESEDLKMRLEEMLAIKDLTESENDKLRSEALIAAEKQNMYEAEIERLKKELSGLLEAKEAAAKAFDVQKAEITNELEELQRKLKEIEANKDLVEGENSKLQSEILTAQEKYRQSEAEVKCIKQVMCSVVEAKEAATRASEAEKAEIMEEMDNLKRTIEEIKANRDLVESQNQELRSKISSAEQERSLFEGEIKSVRMELGAVEEAKQILTREFDAEKAEILKELDDLEKKLEELQTNKGLLEAENDKLQLEVLTAQHKQSMSEAEAESLKMELGALVEAKEAATKAFGAEKAKTTKELEDLKRKVEEIQTKKDLVEGEKDKLRLEILIAEQRHAMAELEVKRLKMDLAASAEARETVVRSCDAEKAKFMAEIENLRRKIEEIHASKEAAEKAARNKDAEADRLKDELARIRLSVSQLQASCDELDAKQSRLNDEKNSVQKALVSEKVEGNKLKLKIEELENHIAGKDGEKGKLKAALEEKMTEINALSKDNAMLHRTILEAQEKNKGSILSFLSPCGSK

SEQ ID NO: 20759 - protein, 602 aa, Arabidopsis thaliana
  peptide (1)..(602): Ceres Seq. ID no. 14309944
MGEKAKLEKQLEEAKAISSHKEEVGRSLKAENDKLQSEVLVAEEKCSKSAAEVERLTKELGALAEAKEAAAKEFNDEREKITLESEDLKMRLEEMLAIKDLTESENDKLRSEALIAAEKQNMYEAEIERLKKELSGLLEAKEAAAKAFDVQKAEITNELEELQRKLKEIEANKDLVEGENSKLQSEILTAQEKYRQSEAEVKCIKQVMCSVVEAKEAATRASEAEKAEIMEEMDNLKRTIEEIKANRDLVESQNQELRSKISSAEQERSLFEGEIKSVRMELGAVEEAKQILTREFDAEKAEILKELDDLEKKLEELQTNKGLLEAENDKLQLEVLTAQHKQSMSEAEAESLKMELGALVEAKEAATKAFGAEKAKTTKELEDLKRKVEEIQTKKDLVEGEKDKLRLEILIAEQRHAMAELEVKRLKMDLAASAEARETVVRSCDAEKAKFMAEIENLRRKIEEIHASKEAAEKAARNKDAEADRLKDELARIRLSVSQLQASCDELDAKQSRLNDEKNSVQKALVSEKVEGNKLKLKIEELENHIAGKDGEKGKLKAALEEKMTEINALSKDNAMLHRTILEAQEKNKGSILSFLSPCGSK

SEQ ID NO: 20760 - protein, 513 aa, Arabidopsis thaliana
  peptide (1)..(513): Ceres Seq. ID no. 14309945
MRLEEMLAIKDLTESENDKLRSEALIAAEKQNMYEAEIERLKKELSGLLEAKEAAAKAFDVQKAEITNELEELQRKLKEIEANKDLVEGENSKLQSEILTAQEKYRQSEAEVKCIKQVMCSVVEAKEAATRASEAEKAEIMEEMDNLKRTIEEIKANRDLVESQNQELRSKISSAEQERSLFEGEIKSVRMELGAVEEAKQILTREFDAEKAEILKELDDLEKKLEELQTNKGLLEAENDKLQLEVLTAQHKQSMSEAEAESLKMELGALVEAKEAATKAFGAEKAKTTKELEDLKRKVEEIQTKKDLVEGEKDKLRLEILIAEQRHAMAELEVKRLKMDLAASAEARETVVRSCDAEKAKFMAEIENLRRKIEEIHASKEAAEKAARNKDAEADRLKDELARIRLSVSQLQASCDELDAKQSRLNDEKNSVQKALVSEKVEGNKLKLKIEELENHIAGKDGEKGKLKAALEEKMTEINALSKDNAMLHRTILEAQEKNKGSILSFLSPCGSK

SEQ ID NO: 20761 - DNA, 1725 bp, Arabidopsis thaliana
  misc_feature (1)..(1725): Ceres Seq. ID no. 14316553
  misc_feature (1)..(1725): Ortholog of  Ceres SEQ ID NO 13502573 as cited in SEQ ID NO 60342
gaacaaaaaacaaatcaagcaaatttatttatcttggtcaagagacattgattctcttaaatttctgcaaaattaagctcagagattcacaccgcatctgaaattgtgctcagaggggttccaaatattaccagtcgttaggaagcaatcacgagttgttttaggaattagtgaacgtgataatggctagcaatgagatggaaaaatcgagtaaagagaaggaacctaaaacacctcctccttcttctactgcccctccctcttcacaggaaccttcatcggctgtgagtgctggcatggctactccagattggtctggttttcaggcatattctcctatgccgccgcctcatggttatgtggcatctagtccccaacctcacccttatatgtggggagttcagcatatgatgcctccttatggaactccgcctcatccttatgttgcaatgtatcccccaggtggcatgtacgcacatccttcaatgcctccgggttcttatccctatagcccttatgctatgccttctccaaatggaatgactgaagtttctggcaatactacaggcggcactgatggtgatgctaaacaatctgaagtgaaggaaaaattgcccatcaaaagatcaagaggaagcttaggaagtttgaacatgattacaggaaagaacaatgaacctgggaaaaactcaggagcatcagctaatggagcttactccaaaagtggggagagtgcttctgatggttcaagtgaaggaagtgatgggaactctcaaaatgattcgggatctggactagatggaaaggatgctgaagcagcatcagagaatggtggttctgccaatggtccgcaaaatggaagtgctggtacacctattctaccggtgagccagaccgtaccaatcatgccaatgacagctgcaggtgttcctggcccaccaacaaatttaaatattgggatggattactggggtgctccaacttcagctggtatccctggaatgcatgggaaagtatctacaccagttcctggagttgttgctccaggctcgcgagatggtggccattcacaaccctggttacaggacgatagagaacttaagcgacagagacggaagcagtccaatagggagtctgctcgaagatcaaggttgcgtaaacaggccgaatgtgatgagctggcccaacgcgctgaggtgttgaacgaagaaaacacaaatctcagagcagaaatcaacaagctcaaaagccaatgcgaagagcttaccaccgagaacacctctctcaaggaccaactttcattattacctccacttgaaggcataagcatggacaatgaccaccaagaaccagacaccaatcaaacaggtgccgcagagagaaaggttgattcatacaaagactcaacgtgagaagacatagagcaaaaccaattcctaacacaggtataaaaaagtagcagcagcagcaacaacaacactcggcggttctttgctaacagatggtttgtaggattttaggcatcagagatcgattggttccgaatagtttattgagggttgttggtccagtgtatgtgtgtgtaagttacgaaattagatattgggagaaaaaattccctcgtttaatgttttactttgcctttgctctacttgcagaagcgaatctgaggcaatgtgcttatctgtatcaaaattgttaccctttttattagattttcctatt

SEQ ID NO: 20762 - protein, 409 aa, Arabidopsis thaliana
  peptide (1)..(409): Ceres Seq. ID no. 14316554
MASNEMEKSSKEKEPKTPPPSSTAPPSSQEPSSAVSAGMATPDWSGFQAYSPMPPPHGYVASSPQPHPYMWGVQHMMPPYGTPPHPYVAMYPPGGMYAHPSMPPGSYPYSPYAMPSPNGMTEVSGNTTGGTDGDAKQSEVKEKLPIKRSRGSLGSLNMITGKNNEPGKNSGASANGAYSKSGESASDGSSEGSDGNSQNDSGSGLDGKDAEAASENGGSANGPQNGSAGTPILPVSQTVPIMPMTAAGVPGPPTNLNIGMDYWGAPTSAGIPGMHGKVSTPVPGVVAPGSRDGGHSQPWLQDDRELKRQRRKQSNRESARRSRLRKQAECDELAQRAEVLNEENTNLRAEINKLKSQCEELTTENTSLKDQLSLLPPLEGISMDNDHQEPDTNQTGAAERKVDSYKDST

SEQ ID NO: 20763 - protein, 404 aa, Arabidopsis thaliana
  peptide (1)..(404): Ceres Seq. ID no. 14316555
MEKSSKEKEPKTPPPSSTAPPSSQEPSSAVSAGMATPDWSGFQAYSPMPPPHGYVASSPQPHPYMWGVQHMMPPYGTPPHPYVAMYPPGGMYAHPSMPPGSYPYSPYAMPSPNGMTEVSGNTTGGTDGDAKQSEVKEKLPIKRSRGSLGSLNMITGKNNEPGKNSGASANGAYSKSGESASDGSSEGSDGNSQNDSGSGLDGKDAEAASENGGSANGPQNGSAGTPILPVSQTVPIMPMTAAGVPGPPTNLNIGMDYWGAPTSAGIPGMHGKVSTPVPGVVAPGSRDGGHSQPWLQDDRELKRQRRKQSNRESARRSRLRKQAECDELAQRAEVLNEENTNLRAEINKLKSQCEELTTENTSLKDQLSLLPPLEGISMDNDHQEPDTNQTGAAERKVDSYKDST

SEQ ID NO: 20764 - protein, 371 aa, Arabidopsis thaliana
  peptide (1)..(371): Ceres Seq. ID no. 14316556
MATPDWSGFQAYSPMPPPHGYVASSPQPHPYMWGVQHMMPPYGTPPHPYVAMYPPGGMYAHPSMPPGSYPYSPYAMPSPNGMTEVSGNTTGGTDGDAKQSEVKEKLPIKRSRGSLGSLNMITGKNNEPGKNSGASANGAYSKSGESASDGSSEGSDGNSQNDSGSGLDGKDAEAASENGGSANGPQNGSAGTPILPVSQTVPIMPMTAAGVPGPPTNLNIGMDYWGAPTSAGIPGMHGKVSTPVPGVVAPGSRDGGHSQPWLQDDRELKRQRRKQSNRESARRSRLRKQAECDELAQRAEVLNEENTNLRAEINKLKSQCEELTTENTSLKDQLSLLPPLEGISMDNDHQEPDTNQTGAAERKVDSYKDST

SEQ ID NO: 20765 - DNA, 1770 bp, Arabidopsis thaliana
  misc_feature (1)..(1770): Ceres Seq. ID no. 15168908
gatctcaacatctctcaatttttctctctacgttgaagaaactttcgaatttcccgttagttcttctccacgctttctctttccctttatctcttatctggttaagccaatcttgattgtttggattcgtaaccgatcagtgttgtgaggtttgaaagaatggtgttttttcgcagcgtatcagccatttcaagactacggtctcgagcagtgcaacaatcctcacttagtaactccgtcagatggctccactcttctgaattggacttgaagtcgcagatgcaagagatcattccagaacaacaggaccgtttgaagaaactgaaatcagaacatggaaaggttccagtggggaacatcaccgttgatatggtacttggtggaatgagagggatgactggattactctgggaaacctcattgcttgatgcagatgagggaatacggtttagaggcatgtcgattcctgaatgtcagaaagtattaccttcagctgagtctggagaagagcccttgcctgagagtcttctgtggcttctgttaactggaaaggtgccaactaaagagcaagctaatgctttgtcaacagagttggctcatcgtgcggctgtgccagattatgtatacaaagctatagatgctttgccttcaacagctcatccaatgactcaatttgctagtggtgttatggcccttcaggttcaaagtgagtttcaaaaggcgtatgagcagggtgatatttctaagtcaaagtactgggaaccaaccttcgaagatgccctaaacttgattgctcgtgttcctgttgtagcttcatacgtttatcggaggatgtacaaggatggtagcatcattccattagatgattctttggattatggtgcaaatttttcacacatgctgggatttgatagtcctcagatgaaagagctcatgaggctttatgtcactatccacagtgatcatgaaggtggaaatgttagtgctcacgctggtcacctggttgggagtgcactttcagatccatatctttcatttgctgctgcattgaatggtttagctgggccactccatggtttggctaatcaggaagttttgctgtggatcaaattagttgttgaggaatgtggagaaagtatatcaaaggaacagctaaaagattatgtctggaaaacgttaaacagtggcaaggttgttccaggatatggccatggtgttttgcgtaaaacggatccaagatatatatgccaaagagagtttgccttgaagcatctacctgatgatcctctttttcagctggtctcaaaactttatgaagtggtgcctcctattctaaccgagctgggaaaggtcaagaacccgtggcctaacgttgatgctcatagcggagtgcttctgaactactatggtctaaccgaagcaagatactacacggtgctttttggcgtctcaagaagtcttggaatctgctcgcagctgatatgggacagggcacttggactgccacttgagagaccaaagagtgtaaacatggactggctcgataacttcacgcgcttgaaccgctaagttaatccctgactgatgttggtcaaggttctctcttttatcacttcagccttctcttccatttgattgggtagcttttagagataaaaaaaaaacgatttttcgtcgaaattttgttctacagagttttcattttggttcttctgcaaaaacaataaagtcaaacaagtaaagaaacagtctttctcagattgggccccc

SEQ ID NO: 20766 - protein, 469 aa, Arabidopsis thaliana
  peptide (1)..(469): Ceres Seq. ID no. 15168909
MVFFRSVSAISRLRSRAVQQSSLSNSVRWLHSSELDLKSQMQEIIPEQQDRLKKLKSEHGKVPVGNITVDMVLGGMRGMTGLLWETSLLDADEGIRFRGMSIPECQKVLPSAESGEEPLPESLLWLLLTGKVPTKEQANALSTELAHRAAVPDYVYKAIDALPSTAHPMTQFASGVMALQVQSEFQKAYEQGDISKSKYWEPTFEDALNLIARVPVVASYVYRRMYKDGSIIPLDDSLDYGANFSHMLGFDSPQMKELMRLYVTIHSDHEGGNVSAHAGHLVGSALSDPYLSFAAALNGLAGPLHGLANQEVLLWIKLVVEECGESISKEQLKDYVWKTLNSGKVVPGYGHGVLRKTDPRYICQREFALKHLPDDPLFQLVSKLYEVVPPILTELGKVKNPWPNVDAHSGVLLNYYGLTEARYYTVLFGVSRSLGICSQLIWDRALGLPLERPKSVNMDWLDNFTRLNR

SEQ ID NO: 20767 - protein, 429 aa, Arabidopsis thaliana
  peptide (1)..(429): Ceres Seq. ID no. 15168910
MQEIIPEQQDRLKKLKSEHGKVPVGNITVDMVLGGMRGMTGLLWETSLLDADEGIRFRGMSIPECQKVLPSAESGEEPLPESLLWLLLTGKVPTKEQANALSTELAHRAAVPDYVYKAIDALPSTAHPMTQFASGVMALQVQSEFQKAYEQGDISKSKYWEPTFEDALNLIARVPVVASYVYRRMYKDGSIIPLDDSLDYGANFSHMLGFDSPQMKELMRLYVTIHSDHEGGNVSAHAGHLVGSALSDPYLSFAAALNGLAGPLHGLANQEVLLWIKLVVEECGESISKEQLKDYVWKTLNSGKVVPGYGHGVLRKTDPRYICQREFALKHLPDDPLFQLVSKLYEVVPPILTELGKVKNPWPNVDAHSGVLLNYYGLTEARYYTVLFGVSRSLGICSQLIWDRALGLPLERPKSVNMDWLDNFTRLNR

SEQ ID NO: 20768 - protein, 399 aa, Arabidopsis thaliana
  peptide (1)..(399): Ceres Seq. ID no. 15168911
MVLGGMRGMTGLLWETSLLDADEGIRFRGMSIPECQKVLPSAESGEEPLPESLLWLLLTGKVPTKEQANALSTELAHRAAVPDYVYKAIDALPSTAHPMTQFASGVMALQVQSEFQKAYEQGDISKSKYWEPTFEDALNLIARVPVVASYVYRRMYKDGSIIPLDDSLDYGANFSHMLGFDSPQMKELMRLYVTIHSDHEGGNVSAHAGHLVGSALSDPYLSFAAALNGLAGPLHGLANQEVLLWIKLVVEECGESISKEQLKDYVWKTLNSGKVVPGYGHGVLRKTDPRYICQREFALKHLPDDPLFQLVSKLYEVVPPILTELGKVKNPWPNVDAHSGVLLNYYGLTEARYYTVLFGVSRSLGICSQLIWDRALGLPLERPKSVNMDWLDNFTRLNR

SEQ ID NO: 20769 - DNA, 1657 bp, Arabidopsis thaliana
  misc_feature (1)..(1657): Ceres Seq. ID no. 14309919
gagaagagcatttagaaaacaaaagcggaataagaaacaagattgaagaaagaagtcggagaagacagtagaagaaactgatacgaggagaacttactctcaactttaatggcagacgctggagataatcagagaagaagcgatgaaaaagagtcgatatcaactgaagaaacgaaggagaatgaagacttgggatctggaagaaacgacacaggtcatcatgtatacaacgagggacacgaagaggtactagagtatctgaaacaagagagactgaaagatgctgatatgcagaggaaaaggcatgaaacagagtcgaaatccattgagggcacaactcctgatattaggctgagtgattcagggaaagggtctgatgagagaactgataaaatacagaaagcagactcagtttacaaacgctctaacgctgacacgcgagtgagtctaccacaacagagacgactgaaagatgtggtggaggcgcatagggtacgccgtgaaacagagtcaagattatggcaccaagagagggtaaaacaactaacttcttacacagtatcttttgtttgatttacgtgttcctttgattttgattctcaggatagatctctggtttggggaggaagtgaacccaggatgagatttgatgaaagtactcagggttggagagatagtgactatgaatccaaatggaggtttcatgagagaactccggattgggattggagagatagtgaatccagaatgagatctcatgaaagaactcaggataggagagaaagtgaatcccaaggggtatttgatgagagaacagagaggagacaagaaccagtgcgatggcccggtgaagagtgttggtgtctgcggtgtcgaaacggaggaagttgccgttacaatcatcctactcaacttccacaggagcttccggtgaggaatcgtttgcagatttgcaggtattttctgaggggatattgtaagttcggctcagtttgtggatttcaacacataagggacagggatgttgcagaacctatgtatgagaattggagttttgatgtgagaactccaattctcattagaggttctatcctctgcttttcaagttctctgcggcaacagagattacaggggatgcgagagaatcagaacgtggattctcgaatgcatgatccaagacgccatgatacagagttgagactcgaacgagagaagatggtaaacagagaacttgaaaagcagaggatagaacctctaatcggtccactagtgaggcgatacatgcaagcaaagagagataaagaagttgaacagagagagagagctagcattgagagccagaggatagtggctcaagagaatctgcgacaacagagattgcaggggatgcgagagaatcagaacgtggatgctcatgatcaagagaaaactcaggaactcggtttcaaaggaaaagagggagatggagtttaagaggaaacggagttacgagaccaccaaagagaactctcaagatgatttcttttaccgcaagaaactgatgtgtttttcctttgaacgcaaataataagttcattttgataaactgatcgtttcggaatcaattgtgttattgattgattaaacgaatgatgaaacttttaatgcaaaatattcg

SEQ ID NO: 20770 - protein, 277 aa, Arabidopsis thaliana
  peptide (1)..(277): Ceres Seq. ID no. 14309920
MRFDESTQGWRDSDYESKWRFHERTPDWDWRDSESRMRSHERTQDRRESESQGVFDERTERRQEPVRWPGEECWCLRCRNGGSCRYNHPTQLPQELPVRNRLQICRYFLRGYCKFGSVCGFQHIRDRDVAEPMYENWSFDVRTPILIRGSILCFSSSLRQQRLQGMRENQNVDSRMHDPRRHDTELRLEREKMVNRELEKQRIEPLIGPLVRRYMQAKRDKEVEQRERASIESQRIVAQENLRQQRLQGMRENQNVDAHDQEKTQELGFKGKEGDGV

SEQ ID NO: 20771 - protein, 241 aa, Arabidopsis thaliana
  peptide (1)..(241): Ceres Seq. ID no. 14309921
MRSHERTQDRRESESQGVFDERTERRQEPVRWPGEECWCLRCRNGGSCRYNHPTQLPQELPVRNRLQICRYFLRGYCKFGSVCGFQHIRDRDVAEPMYENWSFDVRTPILIRGSILCFSSSLRQQRLQGMRENQNVDSRMHDPRRHDTELRLEREKMVNRELEKQRIEPLIGPLVRRYMQAKRDKEVEQRERASIESQRIVAQENLRQQRLQGMRENQNVDAHDQEKTQELGFKGKEGDGV

SEQ ID NO: 20772 - protein, 154 aa, Arabidopsis thaliana
  peptide (1)..(154): Ceres Seq. ID no. 14309922
MADAGDNQRRSDEKESISTEETKENEDLGSGRNDTGHHVYNEGHEEVLEYLKQERLKDADMQRKRHETESKSIEGTTPDIRLSDSGKGSDERTDKIQKADSVYKRSNADTRVSLPQQRRLKDVVEAHRVRRETESRLWHQERVKQLTSYTVSFV

SEQ ID NO: 20773 - DNA, 1817 bp, Arabidopsis thaliana
  misc_feature (1)..(1817): Ceres Seq. ID no. 15175515
gacaataatcgaggacctccatagattctattctccgacaccggcgaagccctcccctgccgacgtcgggacataagtcaccatatcttccctcgttctcgatctcgtgttcgtgctatctttttagatgaactttttttttaatctctttaaagcttttcgatctttctcgatccacatgtatctcccaagcagatggccagcgatgtccatctatcacgccctactcgaatcttcttccctgacatcataccctttgcccctcttgaccctgatttccctcactggagaaaccaaactcccatggtcttctacatgtgccttgaatcccgaatcaacccctcagtcaccgccttttcgttcaccggagatgcttgagccaccgcgaaacccatcaacatctaggccttgtcattcagatttcggatcggattcggtttggattatttcggatttggataattcggatgagaaagtttattatcagttcggattatatgactattcggttcggttttggtttggattgtgtcggattcggatcggtttcggataagtttttgagaattttttaataaaaagcgttgggttttattaaaatttgttttttttttgcaaaatattgtataattataacaaatataactaaaaaaaattcagatatcaagattattttggataatttttgctatttagtatttttgagtataaattataactaaatataactaatatttttatatatataattttattttggattagcggatattcgttcggtttttggtttggataggattcggttcggataattcgggtaggagaattcattatccgttcgaattttgtgactattcagttcggtttcgaagtcaaatttttcagatcgatttttggattttgaattttatgcccagccctaagcatctcagtacggccgtcgctctcagatccgtaatttgccaacctaagtgaaattaggttctcacttggtgggtttacaaatttcggtccaataagatgtctagagcctaacttcattagttgtgacccaaagcatattcagcaaatattcaggtctgatctaaactcatcttttcccaatcttaatcaatctttgtgttgcttcgtgataccgattgagaaaggatataaattaagacataagccgccatcgttaatagttaggtataaggattttttgagaaccatgccatcagttacaactaggaatatgattcacgaaatcattgcgtttgaaaccaaaagattgtaggaactcggcattatgataatgtctctactgagcagtgattaccgaagcttccctaaccatttttattcggtgtccttgaaccaacacttacgaatggtggatcttccgaaatttattttttaaagtgaactttttcttaagatatttggacaagatcatggatattttgcaaattaaaagtttgaagaagaacgacattatgatccagtctccaaggagaggtggttaccgaaacttttacactttttttgtttgctaacctcctccatggagccctttttcaaaggcttttatgcgttattcatgcaagccgtctatgaccactcgttggtcgaggatttcgtaaagttcgtcttcatggtcgaatctccaagagttcaacagatttttcaaactttgcaaactttttattggtgaacatattcttgaaaaactcataaagcttctatctttatttcttttatattattttatcttcaatttgtatgaacttccctcgtttgaggttttatatatatataaaaactacgggattattttt

SEQ ID NO: 20774 - protein, 142 aa, Arabidopsis thaliana
  peptide (1)..(142): Ceres Seq. ID no. 15175516
MNFFFNLFKAFRSFSIHMYLPSRWPAMSIYHALLESSSLTSYPLPLLTLISLTGETKLPWSSTCALNPESTPQSPPFRSPEMLEPPRNPSTSRPCHSDFGSDSVWIISDLDNSDEKVYYQFGLYDYSVRFWFGLCRIRIGFG

SEQ ID NO: 20775 - protein, 125 aa, Arabidopsis thaliana
  peptide (1)..(125): Ceres Seq. ID no. 15175517
MYLPSRWPAMSIYHALLESSSLTSYPLPLLTLISLTGETKLPWSSTCALNPESTPQSPPFRSPEMLEPPRNPSTSRPCHSDFGSDSVWIISDLDNSDEKVYYQFGLYDYSVRFWFGLCRIRIGFG

SEQ ID NO: 20776 - protein, 116 aa, Arabidopsis thaliana
  peptide (1)..(116): Ceres Seq. ID no. 15175518
MSIYHALLESSSLTSYPLPLLTLISLTGETKLPWSSTCALNPESTPQSPPFRSPEMLEPPRNPSTSRPCHSDFGSDSVWIISDLDNSDEKVYYQFGLYDYSVRFWFGLCRIRIGFG

SEQ ID NO: 20777 - DNA, 2831 bp, Arabidopsis thaliana
  misc_feature (1)..(2831): Ceres Seq. ID no. 15174477
gatctggttttccggcggtttctcgttatctacgagagagtgagagaggaaatacctcggggtgaactcgctgcgtagccaaagcctcttcaattttgctcttttgttcaattccgtcgcttaattatctggttttgcgtattttgaagagtcagtttgacgaatttaagctgaaatttcgttctttctctgtttatctttcagcgacgatttttctgggtttttcagttttggatcaatccataatctgtcgtgattagggttttataccttgatgaggatttactgaattagttgtattaaagatggcgagaaaagctaacaatagttttttccttgaagaatggttaaggactgtgagtggaagtagtgtctctggtgatctagtgaagcaaaattctgctccatctgctaggtcgattattcaagcatggtctgagattcgtgaatctcttcaaaaccaaaactttgattcacgttaccttcaagctttgagagctttggttagctctgagtccactatccatgttgcagatccccaagcaaagctacttatttctatactagcttttcaagatgtatctcttccgtctgagtcttacacacttgttctcagactactctatgtgtggattaggaaagcatttcgaccgtctcaagcacttgttggtgtagcggttcaggccattcgtggcgttgttgatgacaggcgtaatctccaaccagccttagtagcgcagagtgttctggtttctggtgcgtttgcgtgtgttccttctctgtcaggagacgtgaaagtcttatgcttggaattgttatgcaggcttttggaagaagagtactctttagtgggatctcaagaagaacttgttcctgtagtgcttgcaggaattgggtatgctttatcttcttcgttggatgttcattacgtcagactattggatttattgtttggcatttggttaaaagacgagggtcctcgtggcactgtcacttacggtctgatgattcttcatttgattgagtgggttgtgtcaggttatatgcggtctaattctatcaacaagatgtctctttttgctaacgaggtactagagacttctaaggaaaagtatgctgttttcgctgtcttcatggcagcagctggggtagtgagagcttccacggcaggattcagtagtggtgcacagagtttggagatttctaaactaagaaattcagctgaaaagcgaatagaatttgtagctcaaattttagtttctaatggtaatgttgttacacttccaaccacacagagagaaggtcccctgttgaagtgctttgctattgcattggctcgatgtgggtctgtttcttcctctgctcctctgcttttgtgtctcacttctgcattgttaactcaggtatttcctttaggccagatatatgaatcattttgcaatgcttttggcaaagagcctattggaccaagactcatttgggtcagggagcatctttctgatgttcttttcaaggaatcaggggccatatctggggctttctgcaatcaatattcatcagcaagtgaagagaacaagtatattgtggagaatatgatttgggatttctgtcaaaatctctacttacagcaccgtcaaattgctatgttgctttgtggtatagaagatacattgcttggagacatcgagaaaattgcagaatcatctttccttatggttgtcgtctttgcgctagctgttacgaaacaatggctaaaaccaatagtgtctaaagaaagaaaaatggagacatcagttaagatattagtttcgttctcctgtgtagagtatttcaggcatattcgtttacctgaatacatggagacaattagagaggtgattacatgtgtccaggagaatgatgctccttgtgtttcatttgtagagtccattcctgcctatgatagcttgacgaatccgaaagacttgtttacgcaaaggataaaatatgaatggtcaagagatgatgtgcagacatctcgaatattgttttatcttcgagtaatcccaacttgcatcggacggttatctgcttctgccttcaggggagtggttgcatcaaccatgtttttatatattggacatcctaacagaaaagtggcgcgagcatctcatacgttgttggcagcatttctctcttcagcaaaagaatcagaggaggacgaacgaaatcaattcaaagaacaacttgttttctattacatgcaacgatctttggaggtttaccctgagatcacaccttttgaaggtttagcttccggcgttgcaaccttggtccagcatctacctgcgggaagtcctgctatattttattctgttcatagccttgttgagaaggcttctacatttagcaccgaatcattgcaaggcagaaagtctgatcctggtaatcagattcttgagttgcttttgcgacttgtctctttggttgatatacaagtgttgccatatcttatgaagtcattggcagagctagttataaagttaccaaaagaaagacagaacgttgtgcttggtgaattgtatggtcaagtggctgagtcagacgatgtgattcgcaagccttctttggtctcttggctacagtcactgaactacttatgttctaataaccgtactgaagttttagcttctggatcaacgatagacacttcgaaccagttggctgctcgactctagggatctcctcatagtttacaaacatgtgaaatagaataaagtttgtatgacttgtatcatggaattatgttgaaaagaattataaattaacatcatctccattttttgatcagt

SEQ ID NO: 20778 - protein, 803 aa, Arabidopsis thaliana
  peptide (1)..(803): Ceres Seq. ID no. 15174478
MARKANNSFFLEEWLRTVSGSSVSGDLVKQNSAPSARSIIQAWSEIRESLQNQNFDSRYLQALRALVSSESTIHVADPQAKLLISILAFQDVSLPSESYTLVLRLLYVWIRKAFRPSQALVGVAVQAIRGVVDDRRNLQPALVAQSVLVSGAFACVPSLSGDVKVLCLELLCRLLEEEYSLVGSQEELVPVVLAGIGYALSSSLDVHYVRLLDLLFGIWLKDEGPRGTVTYGLMILHLIEWVVSGYMRSNSINKMSLFANEVLETSKEKYAVFAVFMAAAGVVRASTAGFSSGAQSLEISKLRNSAEKRIEFVAQILVSNGNVVTLPTTQREGPLLKCFAIALARCGSVSSSAPLLLCLTSALLTQVFPLGQIYESFCNAFGKEPIGPRLIWVREHLSDVLFKESGAISGAFCNQYSSASEENKYIVENMIWDFCQNLYLQHRQIAMLLCGIEDTLLGDIEKIAESSFLMVVVFALAVTKQWLKPIVSKERKMETSVKILVSFSCVEYFRHIRLPEYMETIREVITCVQENDAPCVSFVESIPAYDSLTNPKDLFTQRIKYEWSRDDVQTSRILFYLRVIPTCIGRLSASAFRGVVASTMFLYIGHPNRKVARASHTLLAAFLSSAKESEEDERNQFKEQLVFYYMQRSLEVYPEITPFEGLASGVATLVQHLPAGSPAIFYSVHSLVEKASTFSTESLQGRKSDPGNQILELLLRLVSLVDIQVLPYLMKSLAELVIKLPKERQNVVLGELYGQVAESDDVIRKPSLVSWLQSLNYLCSNNRTEVLASGSTIDTSNQLAARL

SEQ ID NO: 20779 - protein, 570 aa, Arabidopsis thaliana
  peptide (1)..(570): Ceres Seq. ID no. 15174479
MILHLIEWVVSGYMRSNSINKMSLFANEVLETSKEKYAVFAVFMAAAGVVRASTAGFSSGAQSLEISKLRNSAEKRIEFVAQILVSNGNVVTLPTTQREGPLLKCFAIALARCGSVSSSAPLLLCLTSALLTQVFPLGQIYESFCNAFGKEPIGPRLIWVREHLSDVLFKESGAISGAFCNQYSSASEENKYIVENMIWDFCQNLYLQHRQIAMLLCGIEDTLLGDIEKIAESSFLMVVVFALAVTKQWLKPIVSKERKMETSVKILVSFSCVEYFRHIRLPEYMETIREVITCVQENDAPCVSFVESIPAYDSLTNPKDLFTQRIKYEWSRDDVQTSRILFYLRVIPTCIGRLSASAFRGVVASTMFLYIGHPNRKVARASHTLLAAFLSSAKESEEDERNQFKEQLVFYYMQRSLEVYPEITPFEGLASGVATLVQHLPAGSPAIFYSVHSLVEKASTFSTESLQGRKSDPGNQILELLLRLVSLVDIQVLPYLMKSLAELVIKLPKERQNVVLGELYGQVAESDDVIRKPSLVSWLQSLNYLCSNNRTEVLASGSTIDTSNQLAARL

SEQ ID NO: 20780 - protein, 557 aa, Arabidopsis thaliana
  peptide (1)..(557): Ceres Seq. ID no. 15174480
MRSNSINKMSLFANEVLETSKEKYAVFAVFMAAAGVVRASTAGFSSGAQSLEISKLRNSAEKRIEFVAQILVSNGNVVTLPTTQREGPLLKCFAIALARCGSVSSSAPLLLCLTSALLTQVFPLGQIYESFCNAFGKEPIGPRLIWVREHLSDVLFKESGAISGAFCNQYSSASEENKYIVENMIWDFCQNLYLQHRQIAMLLCGIEDTLLGDIEKIAESSFLMVVVFALAVTKQWLKPIVSKERKMETSVKILVSFSCVEYFRHIRLPEYMETIREVITCVQENDAPCVSFVESIPAYDSLTNPKDLFTQRIKYEWSRDDVQTSRILFYLRVIPTCIGRLSASAFRGVVASTMFLYIGHPNRKVARASHTLLAAFLSSAKESEEDERNQFKEQLVFYYMQRSLEVYPEITPFEGLASGVATLVQHLPAGSPAIFYSVHSLVEKASTFSTESLQGRKSDPGNQILELLLRLVSLVDIQVLPYLMKSLAELVIKLPKERQNVVLGELYGQVAESDDVIRKPSLVSWLQSLNYLCSNNRTEVLASGSTIDTSNQLAARL

SEQ ID NO: 20781 - DNA, 1172 bp, Arabidopsis thaliana
  misc_feature (1)..(1172): Ceres Seq. ID no. 14310125
gggaggaagcggccattgaagcgccacgaagtctcattcttctttctccaataataacagagagcgattctttttactattccaatttcattttcaatgttaccaacacgagctcagattttcatacaccaatttttctatacgcatcgttatacacagaagcagtcgcggatctcaatttcaggtgtttgcgattccgatttaggtttgatcggttgaaattttttccgatggtggatcattagcaagttctaggcgttacgagaaacgcgacgaagaaggaggttaaagatgcgtttaggagattggcgattaagtatcatccggataagcacgctcagtctccggagcatgttcgtcataacgccaccgtgcggtttaagcttgtatcggaggcgtacgaagttttgaatgatgatctgaaacgcgcgtcttataacgctggtagcgattctgattgctttcgccgtacgagcggttcgtatagtaatccgtatggaaatcgtggtggcagagcgcaaggttctggttacggttatggttatggttactctacgaggaatcgtcaggcctctagcttcagcagcgggtttgattcgacgtttcgttatttgactacgcgagcgtttctattgaatctcgcattagctggtggtctgtactttgcgtttactgcgattgatacaagcggagaaacactatggaaaatgcgtaactcagggaaatcattcgaagaagcaatggaatcaatcgagaaatcaaagtcacataaagatgaagggtgaaagagaagaatcaaaggtacttctaaagactttgactttttaagctgcttctgtgggcctggtgggtttgtgtgggtcattgctagggacttttatagatttcactctcttagacaggagatgtgaaaatgtaagtaaatttatcaaaaatgaaccatgagaagttgaaaaccctaatttatcatgaagtgtaatagataggtttttatgttcttgtaacaaatattcatctctccagataataatcgattatgagagaagtcctagtacacgcaattgtatttgaatgcataatgggcaagcagaggtgggatgttgtaataaaacaaaaacttattttggctttgtatcagtaatggagacattattgtattagtggtcgtaacg

SEQ ID NO: 20782 - protein, 80 aa, Arabidopsis thaliana
  peptide (1)..(80): Ceres Seq. ID no. 14310126
EEAAIEAPRSLILLSPIITESDSFYYSNFIFNVTNTSSDFHTPIFLYASLYTEAVADLNFRCLRFRFRFDRLKFFPMVDH

SEQ ID NO: 20783 - protein, 40 aa, Arabidopsis thaliana
  peptide (1)..(40): Ceres Seq. ID no. 14310127
MLPTRAQIFIHQFFYTHRYTQKQSRISISGVCDSDLGLIG

SEQ ID NO: 20784 - DNA, 713 bp, Arabidopsis thaliana
  misc_feature (1)..(713): Ceres Seq. ID no. 13592738
  misc_feature (1)..(713): Ortholog of  Ceres SEQ ID NO 12603572 as cited in SEQ ID NO 20702
  misc_feature (1)..(713): Ortholog of  Ceres SEQ ID NO 15178253 as cited in SEQ ID NO 55885
  misc_feature (1)..(713): Ortholog of  Ceres SEQ ID NO 12616797 as cited in SEQ ID NO 63716
gaacatcctaatcgaaaagcttcttcgacgacgttggttcttcttcctttgtcctgcgccgcgatctctccttctccaacttcccccgtcctgtccaaagaaaatgccaaaggttaaaactaaccgagtcaagtacccagaaggatgggagttgatcgagcctactcttcgagagcttgatgccaagatgagagaagctgagacagattcacacgatggtaagagaaagtgtgaaactttatggccaatcttcaaagtctctcatcagaggagtcggtatgtatatgacctttattaccgaagggaagaaatatctaaagagctctatgagttctgcttggaccagggctatgcagatcgcagtctgattgccaaatggaaaaagtcgggatatgaacgtttatgctgcttgcgctgcatacagccaagagaccacaactatggaacaacatgtgtatgccgtgttcccaaacacttgcgtgaagagaaagtggtcgaatgcgttcactgcggctgtcaaggatgcgcgagtggcgattaaattcaacatagctttattcgcaatctctgactgtttgttacaatcttgtcacttgttaaatctggattatgtattattccataaaggctttaaaaccctgactaaaaatccccttgctcttacttatcaactctgggtggtattgcaaataaaaagaacgttccggtttggt

SEQ ID NO: 20785 - protein, 179 aa, Arabidopsis thaliana
  peptide (1)..(179): Ceres Seq. ID no. 13592739
NILIEKLLRRRWFFFLCPAPRSLLLQLPPSCPKKMPKVKTNRVKYPEGWELIEPTLRELDAKMREAETDSHDGKRKCETLWPIFKVSHQRSRYVYDLYYRREEISKELYEFCLDQGYADRSLIAKWKKSGYERLCCLRCIQPRDHNYGTTCVCRVPKHLREEKVVECVHCGCQGCASGD

SEQ ID NO: 20786 - protein, 145 aa, Arabidopsis thaliana; identical to SEQ ID NO: 20704
  peptide (1)..(145): Ceres Seq. ID no. 13592740

SEQ ID NO: 20787 - protein, 117 aa, Arabidopsis thaliana; identical to SEQ ID NO: 20705
  peptide (1)..(117): Ceres Seq. ID no. 13592741

SEQ ID NO: 20788 - DNA, 740 bp, Arabidopsis thaliana
  misc_feature (1)..(740): Ceres Seq. ID no. 13496800
  misc_feature (1)..(740): Ortholog of  Ceres SEQ ID NO 13595613 as cited in SEQ ID NO 59866
aaaatctgaacccttcgattttcgattcttcctcgagccttccttccttccttcttcttctccaagaggattttgattgtctcctttactctctccatgtcaagttctggtgctccttcacgcaagactctgagtaagatcgcgactaatcgtcttcagaaagagcttgtggaatggcagatgaatccacctactggtttcaaacacaaagtcactgataatctccaaagatggataattgaagttattggagctccaggaactctatatgccaacgatacttatcagcttcaagttgattttccagaacattatcctatggaatcgccacaagtgatttttcttcatccagctcctctgcatcctcacatttacagcaatgggcatatttgtctagatattttgtatgattcgtggtctccagccatgacggtgagttctatctgcattagcatcctctccatgctctcaagctcgactgaaaagcaacgaccaaccgataatgaccgatatgtgaagaattgtaagaacggaagatctccaaaggagacccgatggtggttccacgacgataaagtataaacctcgatcaaccaaaaaaaatgtaaaatagtccaaaacagtctttgaggtttgttgtctatttttaatttaattgggtttaagctgtcccaaacccatttccaaaatccgtgatgtataaaaacaacacaataaatttgactaattttgaatcttct

SEQ ID NO: 20789 - protein, 161 aa, Arabidopsis thaliana
  peptide (1)..(161): Ceres Seq. ID no. 13496801
MSSSGAPSRKTLSKIATNRLQKELVEWQMNPPTGFKHKVTDNLQRWIIEVIGAPGTLYANDTYQLQVDFPEHYPMESPQVIFLHPAPLHPHIYSNGHICLDILYDSWSPAMTVSSICISILSMLSSSTEKQRPTDNDRYVKNCKNGRSPKETRWWFHDDKV

SEQ ID NO: 20790 - protein, 133 aa, Arabidopsis thaliana
  peptide (1)..(133): Ceres Seq. ID no. 13496802
MNPPTGFKHKVTDNLQRWIIEVIGAPGTLYANDTYQLQVDFPEHYPMESPQVIFLHPAPLHPHIYSNGHICLDILYDSWSPAMTVSSICISILSMLSSSTEKQRPTDNDRYVKNCKNGRSPKETRWWFHDDKV

SEQ ID NO: 20791 - protein, 87 aa, Arabidopsis thaliana
  peptide (1)..(87): Ceres Seq. ID no. 13496803
MESPQVIFLHPAPLHPHIYSNGHICLDILYDSWSPAMTVSSICISILSMLSSSTEKQRPTDNDRYVKNCKNGRSPKETRWWFHDDKV

SEQ ID NO: 20792 - DNA, 730 bp, Arabidopsis thaliana
  misc_feature (1)..(730): Ceres Seq. ID no. 13489893
  misc_feature (1)..(730): Ortholog of  Ceres SEQ ID NO 12583682 as cited in SEQ ID NO 56297
agaaacaagtcttataaaaagccacattaagttcttactctgctgcattaactgatggctagattcatggcttacaatcaaaatccacaaatgttggctctatgcataacagtagcagtaatgttccttggtgtgagatcagaattgagtcaggatataaagggatgtcaggatgcgatgtctgatctctactcttgtcttccttttgtcactaacaaagctaaagcaccagactcaacatgttgcagcacactcaaggtaaaaatagacaaagggcagaccaggaaatgtctatgtactctagtcaaagacagggatgatcctggtttggggttcaaagttgatgccaaccgtgcaatgagcctcccttccgcttgtcatgtccctgcaaacatctctcaatgcccagatcttctacatctgcttccagattcaccagcctctcaaatatttaagcaattcactgaatcttcttctcagactgttggacataaagcggtctccacaagctcaagcatcaaaggaagagacaacaagcaatttggtttaatgatggctggtgctctctcaatatggtatataatgtaaaatcctctgtgatctaaagttgatgaacacaataaccaaaatcattatacgagtcatatctactagctgaagcagatgtatcatggcttattaataagaacttattgagaaactcttaagcatcatagaatgcgattagaag

SEQ ID NO: 20793 - protein, 177 aa, Arabidopsis thaliana
  peptide (1)..(177): Ceres Seq. ID no. 13489894
MARFMAYNQNPQMLALCITVAVMFLGVRSELSQDIKGCQDAMSDLYSCLPFVTNKAKAPDSTCCSTLKVKIDKGQTRKCLCTLVKDRDDPGLGFKVDANRAMSLPSACHVPANISQCPDLLHLLPDSPASQIFKQFTESSSQTVGHKAVSTSSSIKGRDNKQFGLMMAGALSIWYIM

SEQ ID NO: 20794 - protein, 173 aa, Arabidopsis thaliana
  peptide (1)..(173): Ceres Seq. ID no. 13489895
MAYNQNPQMLALCITVAVMFLGVRSELSQDIKGCQDAMSDLYSCLPFVTNKAKAPDSTCCSTLKVKIDKGQTRKCLCTLVKDRDDPGLGFKVDANRAMSLPSACHVPANISQCPDLLHLLPDSPASQIFKQFTESSSQTVGHKAVSTSSSIKGRDNKQFGLMMAGALSIWYIM

SEQ ID NO: 20795 - protein, 165 aa, Arabidopsis thaliana
  peptide (1)..(165): Ceres Seq. ID no. 13489896
MLALCITVAVMFLGVRSELSQDIKGCQDAMSDLYSCLPFVTNKAKAPDSTCCSTLKVKIDKGQTRKCLCTLVKDRDDPGLGFKVDANRAMSLPSACHVPANISQCPDLLHLLPDSPASQIFKQFTESSSQTVGHKAVSTSSSIKGRDNKQFGLMMAGALSIWYIM

SEQ ID NO: 20796 - DNA, 1025 bp, Arabidopsis thaliana
  misc_feature (1)..(1025): Ceres Seq. ID no. 12738513
  misc_feature (1)..(1025): Ortholog of  Ceres SEQ ID NO 13656436 as cited in SEQ ID NO 69154
aaaaaaacttctgaatctccgaaaaaagccaatcgggggaagaaaaaaattcaacggccgtctggttactgtcttgcttgcttccgacgatctatcttccccgagtagatttgaaatggctgctcctcctgctagagctcgtgctgattacgattacctcattaaacttctgctgatcggagacagcggtgttggtaagagttgccttctcttacgtttctcagatggctcgtttaccaccagtttcattacaactattgggattgattttaagatacggactattgagctcgatgggaagagaattaagctgcaaatctgggatactgccggacaggagcggttccgcacaatcacaactgcgtactaccgtggagccatggggattttgcttgtgtatgatgtgactgatgaatcatctttcaacaacatcaggaattggatccgtaacattgagcagcatgcttctgatagtgtcaacaagattctagttgggaacaaagcagatatggatgaaagcaaaagagctgtgccaaaatctaagggccaagctcttgcagatgaatatggaatgaagtttttcgagactagtgctaagactaacttaaacgttgaggaagttttcttctctattgctaaagacattaagcaaagacttgcagataccgatgcacgagctgagccgcaaacaatcaaaatcaaccaatccgaccaaggtgcgggaacatctcaagctactcagaaatcagcatgttgcggcacataaaaattgggtccacgacgcctgtcaaaggagagaatctggctagtgaaagagaaatggtatttggaaagaaaaaatgaaaaaggaaatcaatcttcttttgcttttcttctatatgagatggtgtttctacgtattcttttaagattctctctttccctaatggtatagtgtgactgtgaaggacacaattcgtattccatatttctggaatggattctctgacatcagattatgacttatgataatatcagtttatctc

SEQ ID NO: 20797 - protein, 254 aa, Arabidopsis thaliana
  peptide (1)..(254): Ceres Seq. ID no. 12738514
KKLLNLRKKPIGGRKKFNGRLVTVLLASDDLSSPSRFEMAAPPARARADYDYLIKLLLIGDSGVGKSCLLLRFSDGSFTTSFITTIGIDFKIRTIELDGKRIKLQIWDTAGQERFRTITTAYYRGAMGILLVYDVTDESSFNNIRNWIRNIEQHASDSVNKILVGNKADMDESKRAVPKSKGQALADEYGMKFFETSAKTNLNVEEVFFSIAKDIKQRLADTDARAEPQTIKINQSDQGAGTSQATQKSACCGT

SEQ ID NO: 20798 - protein, 216 aa, Arabidopsis thaliana
  peptide (1)..(216): Ceres Seq. ID no. 12738515
MAAPPARARADYDYLIKLLLIGDSGVGKSCLLLRFSDGSFTTSFITTIGIDFKIRTIELDGKRIKLQIWDTAGQERFRTITTAYYRGAMGILLVYDVTDESSFNNIRNWIRNIEQHASDSVNKILVGNKADMDESKRAVPKSKGQALADEYGMKFFETSAKTNLNVEEVFFSIAKDIKQRLADTDARAEPQTIKINQSDQGAGTSQATQKSACCGT

SEQ ID NO: 20799 - protein, 128 aa, Arabidopsis thaliana
  peptide (1)..(128): Ceres Seq. ID no. 12738516
MGILLVYDVTDESSFNNIRNWIRNIEQHASDSVNKILVGNKADMDESKRAVPKSKGQALADEYGMKFFETSAKTNLNVEEVFFSIAKDIKQRLADTDARAEPQTIKINQSDQGAGTSQATQKSACCGT

SEQ ID NO: 20800 - DNA, 893 bp, Arabidopsis thaliana
  misc_feature (1)..(893): Ceres Seq. ID no. 12489296
  misc_feature (1)..(893): Ortholog of  Ceres SEQ ID NO 13595433 as cited in SEQ ID NO 56659
agcttcgtcaccgaaccttactttatatattagtccttcttcttctcatcttctcgcaacgtaggttctggtgaatgatcctaatccgtttagcttttaaaaaaataagaagacatatttatcaacttgagcaagttgcagcagatattttcctcggccaagatctagagttttgagaatggcgatggtatcaggaagacgatctactctaaaccccgacgcacctctttttattccggcagctgtacgacaagtggaagatttctcaccggagtggtggcaattggtgacaacttcgacttggtaccctgattactggatcagtcagcagcagcaaggcgcggatggtttctatgacaacggagagaatgagaatggtggaggtcatatcgatgtagctgatcttcttccagaatcatttgattttgatgatatggaagatttctttgacactgatgctgctgagtttgatcaaggattcgatggaagaatgtattaccaagcaccttccgaatttggctttggaaagaatggtgagatggttaagaaatcaagtggaaacaggagcccgagatcgattgtggaaccagctaagtatgcggaaaagccagcgaaatggggaaaccagagggttgctgctgctccgagaaacatccaccagcctcgctgaagagatatgttgttaactagtcagagaagtcagagcagttcggtctgtgtatctttagccaccactgtacctttgtaatttttagtatttgcttccacaacaaaaatctgtaactttgtatctttatgatgttcgttctcaaacttgctatcacaaaaatgtaaaaacataaaaaaaaaaaaatgtaaactttgaagagaaatgagaactagagtttatttcc

SEQ ID NO: 20801 - protein, 163 aa, Arabidopsis thaliana
  peptide (1)..(163): Ceres Seq. ID no. 12489297
MAMVSGRRSTLNPDAPLFIPAAVRQVEDFSPEWWQLVTTSTWYPDYWISQQQQGADGFYDNGENENGGGHIDVADLLPESFDFDDMEDFFDTDAAEFDQGFDGRMYYQAPSEFGFGKNGEMVKKSSGNRSPRSIVEPAKYAEKPAKWGNQRVAAAPRNIHQPR

SEQ ID NO: 20802 - protein, 161 aa, Arabidopsis thaliana
  peptide (1)..(161): Ceres Seq. ID no. 12489298
MVSGRRSTLNPDAPLFIPAAVRQVEDFSPEWWQLVTTSTWYPDYWISQQQQGADGFYDNGENENGGGHIDVADLLPESFDFDDMEDFFDTDAAEFDQGFDGRMYYQAPSEFGFGKNGEMVKKSSGNRSPRSIVEPAKYAEKPAKWGNQRVAAAPRNIHQPR

SEQ ID NO: 20803 - protein, 85 aa, Arabidopsis thaliana
  peptide (1)..(85): Ceres Seq. ID no. 12489299
MIWKISLTLMLLSLIKDSMEECITKHLPNLALERMVRWLRNQVETGARDRLWNQLSMRKSQRNGETRGLLLLRETSTSLAEEICC

SEQ ID NO: 20804 - DNA, 1618 bp, Arabidopsis thaliana
  misc_feature (1)..(1618): Ceres Seq. ID no. 12385174
  misc_feature (1)..(1618): Ortholog of  Ceres SEQ ID NO 13654166 as cited in SEQ ID NO 68381
  misc_feature (1)..(1618): Ortholog of  Ceres SEQ ID NO 13599720 as cited in SEQ ID NO 0
aatagattagttttgtacttctgttacgtggtgattattaaaacttgtaataacagtataatctggttttgttggtgtagattgatgatttcaacattgcaaagaaggaagaggacattgggttctacgctggatttgttggttgctctttcatgctcggacgagcttttacatctgtggcatggggacttgttgctgatcgttatggtagaaaacctgtaatcctcataggaaccgcttcagtggtcgtttttaatactctgtttggcctaagtttaaatttctggatggctattatcacaagattttgcctcggtagtttcaacggtttacttggtcctatcaaggcttacgcaatggaaatattccgtgatgagtatcaaggtttagcactctcagcagttagtacagcttggggaattggactcatcattggccctgctataggaggttttcttgctcagcctgcaaagcaatatccaagtttattctcacaggactccatttttggcaaatttcccttctttttgccatgcttagcaatatccgtttttgcattcttggtgaccatagtttcatcaaggattccggaaacattgcacaatcacaagtttaatgatgatgagtcttatgatgctctcaaagatttgtctgatgaccctgaatctaataaagtggcagagagaaatggaaaaagttctctcttgaacaactggccattaatttcatctatcatcgtatactgcgtcttttcactacatgatatggcttacacagagatcttttcattgtgggcaaacagtccgaggaaatatggaggtttgggatactccactgcagatgttggttctgttcttgccttttcaggctttggtctccttatctttcagctttcgctctactcttacgcagagaggcttttaggacctatcatagttacacgtatatctgggagcctagcaatggtcgtcttatcatgttacccactaatagcaaagttatctggtttagtccttaccgtgactgtaacttctgcatccgtagcaaagagtgttttaggtacttctgctataactggattattcatccttcaaaacaaggctgtgagacaagaccaaagaggagcagctaatggaattgccatgacagcgatgtctcttttcaaagccataggtccagcagcagcaggaatcattttttcgtggagcgagaaacgtcagggtgctgcttttctccctggcacccaaatggtattctttatactgaatgtggttttggcacttggagttgtattgacattcaaaccatttctagctgaaacacaacagtagaaaatgatgaagattttgatggtattcaaattacataatcagaatgtattgtataatatatagatttgtatgtctgatccaaagttagattagaaaaatggcaagagaaaaagaaaaaaaacttgttagaattgttgtcatcatcctttgtatgttataggacaagttgttcacaaaattttgtctaatgtgtcagaaccattgtaagaaggattcaataatgttttttgtacatgatgtttcgcgaataatattgacaagtcgtcaaatcctatcctgagattccc

SEQ ID NO: 20805 - protein, 392 aa, Arabidopsis thaliana
  peptide (1)..(392): Ceres Seq. ID no. 12385175
MLGRAFTSVAWGLVADRYGRKPVILIGTASVVVFNTLFGLSLNFWMAIITRFCLGSFNGLLGPIKAYAMEIFRDEYQGLALSAVSTAWGIGLIIGPAIGGFLAQPAKQYPSLFSQDSIFGKFPFFLPCLAISVFAFLVTIVSSRIPETLHNHKFNDDESYDALKDLSDDPESNKVAERNGKSSLLNNWPLISSIIVYCVFSLHDMAYTEIFSLWANSPRKYGGLGYSTADVGSVLAFSGFGLLIFQLSLYSYAERLLGPIIVTRISGSLAMVVLSCYPLIAKLSGLVLTVTVTSASVAKSVLGTSAITGLFILQNKAVRQDQRGAANGIAMTAMSLFKAIGPAAAGIIFSWSEKRQGAAFLPGTQMVFFILNVVLALGVVLTFKPFLAETQQ

SEQ ID NO: 20806 - protein, 347 aa, Arabidopsis thaliana
  peptide (1)..(347): Ceres Seq. ID no. 12385176
MAIITRFCLGSFNGLLGPIKAYAMEIFRDEYQGLALSAVSTAWGIGLIIGPAIGGFLAQPAKQYPSLFSQDSIFGKFPFFLPCLAISVFAFLVTIVSSRIPETLHNHKFNDDESYDALKDLSDDPESNKVAERNGKSSLLNNWPLISSIIVYCVFSLHDMAYTEIFSLWANSPRKYGGLGYSTADVGSVLAFSGFGLLIFQLSLYSYAERLLGPIIVTRISGSLAMVVLSCYPLIAKLSGLVLTVTVTSASVAKSVLGTSAITGLFILQNKAVRQDQRGAANGIAMTAMSLFKAIGPAAAGIIFSWSEKRQGAAFLPGTQMVFFILNVVLALGVVLTFKPFLAETQQ

SEQ ID NO: 20807 - protein, 324 aa, Arabidopsis thaliana
  peptide (1)..(324): Ceres Seq. ID no. 12385177
MEIFRDEYQGLALSAVSTAWGIGLIIGPAIGGFLAQPAKQYPSLFSQDSIFGKFPFFLPCLAISVFAFLVTIVSSRIPETLHNHKFNDDESYDALKDLSDDPESNKVAERNGKSSLLNNWPLISSIIVYCVFSLHDMAYTEIFSLWANSPRKYGGLGYSTADVGSVLAFSGFGLLIFQLSLYSYAERLLGPIIVTRISGSLAMVVLSCYPLIAKLSGLVLTVTVTSASVAKSVLGTSAITGLFILQNKAVRQDQRGAANGIAMTAMSLFKAIGPAAAGIIFSWSEKRQGAAFLPGTQMVFFILNVVLALGVVLTFKPFLAETQQ

SEQ ID NO: 20808 - DNA, 1693 bp, Arabidopsis thaliana
  misc_feature (1)..(1693): Ceres Seq. ID no. 13509182
  misc_feature (1)..(1693): Ortholog of  Ceres SEQ ID NO 13656177 as cited in SEQ ID NO 64997
gattcattctcttcagtcagagatttcgaaaccctagtcgatttcgagatccaaccaactctgctccttatctcagcttgttgaatttgcgaagtatgggagacgctagagacaacgaagcctacgaggaggagctcttggactatgaagaagaagacgagaaggtcccagattctggaaacaaagttaacggtgaagccgtgaaaaaagggtacgtgggaatacacagttctggattcagagacttccttttaaaaccggagcttctcagagctattgttgactctggatttgaacatccatctgaagtgcaacatgaatgtatccctcaagctatcttgggcatggatgtcatctgccaagcaaagtctggtatggggaagactgctgtgtttgtcctgtctactctacaacagattgaaccatctcctggccaggtttctgcacttgtcttgtgccatacaagagagctagcttaccagatctgcaatgagtttgtgcgattcagtacctatctgcctgatacaaaggtttcggtgttctatggtggagtcaacattaaaattcacaaagacttgctgaagaatgaatgtcctcacattgttgttggtacccctggtcgggtgcttgcacttgccagggagaaagatctctctttgaagaatgtgaggcattttattcttgatgaatgtgataaaatgctcgagtcacttgacatgcgaagggatgtgcaggagattttcaagatgactcctcatgacaaacaagtaatgatgttctcagcaacgctcagcaaagagatacgcccagtctgcaaaaaatttatgcaagatccaatggaaatatatgtcgatgatgaagccaagttgactcttcatgggcttgtccagcactacatcaaactgagcgagatggagaaaaaccggaagttgaatgaccttcttgatgcgttggacttcaatcaagttgtcatttttgtgaagagcgtgagcagggctgctgagctgaacaagttactggtggaatgcaatttcccctcaatatgcatccactctggaatgtctcaagaagagaggttgactcgatacaaaagtttcaaggaagggcacaaaaggatccttgtggcgactgacttggtaggaagagggattgacattgagcgtgtcaacattgtcatcaactatgacatgccagattctgctgatacctatcttcacagggttggcagagctggtagatttggaaccaagggtcttgcaatcacatttgttgcatctgcttcagattcagaggttcttaaccaggtacaagagaggtttgaggttgatataaaggaacttccggagcagattgatacttcaacctacatgccttcttaaacaagtagcacgtccctcaggaaagaagctcttcagatttcaaccttgtaggtgttcgaagggtgatgggggttcacaactatctctcgctccgtttgttttagtgttttctatgacgacatttttttccatatgtttagaacgtctgttgtactctttaaaggagattcgagtcactctccaaatcgcacagttaaaagctgtccagttttttgtacaagagattattatgtttgaaatatcaggatttagtctcgacctgattactgtgttccttaggaatcgatctattatcaatttatcatggtgttgct

SEQ ID NO: 20809 - protein, 458 aa, Arabidopsis thaliana
  peptide (1)..(458): Ceres Seq. ID no. 13509183
FILFSQRFRNPSRFRDPTNSAPYLSLLNLRSMGDARDNEAYEEELLDYEEEDEKVPDSGNKVNGEAVKKGYVGIHSSGFRDFLLKPELLRAIVDSGFEHPSEVQHECIPQAILGMDVICQAKSGMGKTAVFVLSTLQQIEPSPGQVSALVLCHTRELAYQICNEFVRFSTYLPDTKVSVFYGGVNIKIHKDLLKNECPHIVVGTPGRVLALAREKDLSLKNVRHFILDECDKMLESLDMRRDVQEIFKMTPHDKQVMMFSATLSKEIRPVCKKFMQDPMEIYVDDEAKLTLHGLVQHYIKLSEMEKNRKLNDLLDALDFNQVVIFVKSVSRAAELNKLLVECNFPSICIHSGMSQEERLTRYKSFKEGHKRILVATDLVGRGIDIERVNIVINYDMPDSADTYLHRVGRAGRFGTKGLAITFVASASDSEVLNQVQERFEVDIKELPEQIDTSTYMPS

SEQ ID NO: 20810 - protein, 427 aa, Arabidopsis thaliana
  peptide (1)..(427): Ceres Seq. ID no. 13509184
MGDARDNEAYEEELLDYEEEDEKVPDSGNKVNGEAVKKGYVGIHSSGFRDFLLKPELLRAIVDSGFEHPSEVQHECIPQAILGMDVICQAKSGMGKTAVFVLSTLQQIEPSPGQVSALVLCHTRELAYQICNEFVRFSTYLPDTKVSVFYGGVNIKIHKDLLKNECPHIVVGTPGRVLALAREKDLSLKNVRHFILDECDKMLESLDMRRDVQEIFKMTPHDKQVMMFSATLSKEIRPVCKKFMQDPMEIYVDDEAKLTLHGLVQHYIKLSEMEKNRKLNDLLDALDFNQVVIFVKSVSRAAELNKLLVECNFPSICIHSGMSQEERLTRYKSFKEGHKRILVATDLVGRGIDIERVNIVINYDMPDSADTYLHRVGRAGRFGTKGLAITFVASASDSEVLNQVQERFEVDIKELPEQIDTSTYMPS

SEQ ID NO: 20811 - protein, 344 aa, Arabidopsis thaliana
  peptide (1)..(344): Ceres Seq. ID no. 13509185
MDVICQAKSGMGKTAVFVLSTLQQIEPSPGQVSALVLCHTRELAYQICNEFVRFSTYLPDTKVSVFYGGVNIKIHKDLLKNECPHIVVGTPGRVLALAREKDLSLKNVRHFILDECDKMLESLDMRRDVQEIFKMTPHDKQVMMFSATLSKEIRPVCKKFMQDPMEIYVDDEAKLTLHGLVQHYIKLSEMEKNRKLNDLLDALDFNQVVIFVKSVSRAAELNKLLVECNFPSICIHSGMSQEERLTRYKSFKEGHKRILVATDLVGRGIDIERVNIVINYDMPDSADTYLHRVGRAGRFGTKGLAITFVASASDSEVLNQVQERFEVDIKELPEQIDTSTYMPS

SEQ ID NO: 20812 - DNA, 2516 bp, Arabidopsis thaliana
  misc_feature (1)..(2516): Ceres Seq. ID no. 13491793
  misc_feature (1)..(2516): Ortholog of  Ceres SEQ ID NO 14308455 as cited in SEQ ID NO 55108
gtttccatagaatatgtattcctatgattttttttttatagaattaattgtgttagttaatgccaaattaagattctcttttttttaaaatcactttttgaagaagcacttacaagagagttgtgttaagaatagattccagatggaaaagttggcaagaaaagatgttttaagtttttgccttgtcgtctaatccaacggtcgatcttcgttcatatcaagaatccttatgacgtggaccattctcttccctccatctgtacctcttcccaacctctattttttaatttacatcgaaaataaataagaaggattgcaaaagaaaaaatagaaaaaaaactctctgttcttctttcttcttcttcttcgtcgtaagccattaccatttcttctccctctctctgtttttctttgttgcgtatctgtacttagttttcaaacataaaaataaaacatatctttagctgatgttgtcttcttcttgataaacagattttctacagctttttttctttctaatttaataattcttgagactttttaaaaccctctgcgaaacagatgattcgagttttggtttcttcatctgtgttttgattttttcgtcttttattcttagtcaaacacataaatttcttttactactcttcgtagatgacttctcatgttccaaaacatcctcgtaaatcctttgaagatatggtgaagaatcttaaagtggatcctcttgctaaggtcactgcctccaccacttccatggtttctgcaaaagagaataagaatcagtcagaggcagagccatcatattatgaaactcttgagacatatcaaggcctgccttgtccttatggtggctactatggatactactatccaggtcttgatggttcagttggagaagcaaaggataatggatactatggttatggaacagaagttcagtacccggtaatgcaaggggaaaatgggtctgtgatctacttgatgccagggtttcagtcttatgatgcaagccaaacttatatgcctataaacccggttggtgtatcgagtcaagcacttcattcgccgatgtatgctgctcagggttattatcagaaccaatttggttatgcagatgtttcatcgcccacatatttatgggaccctgttggagacaggtatgtgtatggtgttgcttcatataccccacccttgaaacagaacatatcttcttcaagtcataaccacaacaattattattcaaagagcaagaactccttcacgggtcacggcatgggagatcgtcctaaaacaccgcgaaaagcatcacagaacagctatgccccacccccactgcttaaccaagaaaaaggtcgcattgcttacccgatggacccagtaaagaaaaagtctggagctttaaatcgggatgaaacagagaaggcgaaagcgaggacaaaagaaaatggtacaagtatgaatgacttagcaaacggtcaagatcatattaccaatggagaatgtgagtcatgttcgttggatgctgaagggaatgaaagaagcaacggtgttggttctgtgatcagaagggatcaatataacctccctagctttcagaccaaatacgaggaagcaatcttttttgtgataaaatcgtatagcgaagacgacatacacaagagcatcaagtacaatgtctggtctagtactctcaatgggaacaagaagttagacagtgcatatcaagaatctcagaagaaggctgcagacaaaagtggaaagtgcccggttttcctgttcttctcggtgaatgcaagtggccaattctgcggtgtagctgagatgattggacgagttgattatgagaaaagcatggagttctggcaacaagataagtggactggctattttccggtgaagtggcacatcatcaaagatgttccaaatccgcaactacgacatatcatactagagaacaatgagaacaagcctgtaaccaatagcagagacacacaagaggtgaggttgcctcaagggaatgaagtgttgaacatctttaagaactacgcagctaagacatctattttagatgattttgatttttatgaaaacagagagaaggttatggtacagaagaagctaaggttccctccggtattaaagaagaaagaagaagacttggttgctgattttaaaacaatggagatgtctaatacagtcgaagagggaaacacagagttaaccgggacagtgagctaactagaagaacatgtagtgtttttggtttggttttttaaggatcaatataaaccgtccgattgtttcggattgctttgattttattacaagcgagatggcttcttcttctattgtttcgttgtatggtgtaatgttgggttttttcttcactttttttttttggttttgtgttgtgtttatgatatgttttgcaatttgtaatcattggcaaaaatgataggtttgattttatagtgatataagaaaaccgggatacaaaaagaaaagaggtttag

SEQ ID NO: 20813 - protein, 528 aa, Arabidopsis thaliana
  peptide (1)..(528): Ceres Seq. ID no. 13491794
MTSHVPKHPRKSFEDMVKNLKVDPLAKVTASTTSMVSAKENKNQSEAEPSYYETLETYQGLPCPYGGYYGYYYPGLDGSVGEAKDNGYYGYGTEVQYPVMQGENGSVIYLMPGFQSYDASQTYMPINPVGVSSQALHSPMYAAQGYYQNQFGYADVSSPTYLWDPVGDRYVYGVASYTPPLKQNISSSSHNHNNYYSKSKNSFTGHGMGDRPKTPRKASQNSYAPPPLLNQEKGRIAYPMDPVKKKSGALNRDETEKAKARTKENGTSMNDLANGQDHITNGECESCSLDAEGNERSNGVGSVIRRDQYNLPSFQTKYEEAIFFVIKSYSEDDIHKSIKYNVWSSTLNGNKKLDSAYQESQKKAADKSGKCPVFLFFSVNASGQFCGVAEMIGRVDYEKSMEFWQQDKWTGYFPVKWHIIKDVPNPQLRHIILENNENKPVTNSRDTQEVRLPQGNEVLNIFKNYAAKTSILDDFDFYENREKVMVQKKLRFPPVLKKKEEDLVADFKTMEMSNTVEEGNTELTGTVS

SEQ ID NO: 20814 - protein, 513 aa, Arabidopsis thaliana
  peptide (1)..(513): Ceres Seq. ID no. 13491795
MVKNLKVDPLAKVTASTTSMVSAKENKNQSEAEPSYYETLETYQGLPCPYGGYYGYYYPGLDGSVGEAKDNGYYGYGTEVQYPVMQGENGSVIYLMPGFQSYDASQTYMPINPVGVSSQALHSPMYAAQGYYQNQFGYADVSSPTYLWDPVGDRYVYGVASYTPPLKQNISSSSHNHNNYYSKSKNSFTGHGMGDRPKTPRKASQNSYAPPPLLNQEKGRIAYPMDPVKKKSGALNRDETEKAKARTKENGTSMNDLANGQDHITNGECESCSLDAEGNERSNGVGSVIRRDQYNLPSFQTKYEEAIFFVIKSYSEDDIHKSIKYNVWSSTLNGNKKLDSAYQESQKKAADKSGKCPVFLFFSVNASGQFCGVAEMIGRVDYEKSMEFWQQDKWTGYFPVKWHIIKDVPNPQLRHIILENNENKPVTNSRDTQEVRLPQGNEVLNIFKNYAAKTSILDDFDFYENREKVMVQKKLRFPPVLKKKEEDLVADFKTMEMSNTVEEGNTELTGTVS

SEQ ID NO: 20815 - protein, 494 aa, Arabidopsis thaliana
  peptide (1)..(494): Ceres Seq. ID no. 13491796
MVSAKENKNQSEAEPSYYETLETYQGLPCPYGGYYGYYYPGLDGSVGEAKDNGYYGYGTEVQYPVMQGENGSVIYLMPGFQSYDASQTYMPINPVGVSSQALHSPMYAAQGYYQNQFGYADVSSPTYLWDPVGDRYVYGVASYTPPLKQNISSSSHNHNNYYSKSKNSFTGHGMGDRPKTPRKASQNSYAPPPLLNQEKGRIAYPMDPVKKKSGALNRDETEKAKARTKENGTSMNDLANGQDHITNGECESCSLDAEGNERSNGVGSVIRRDQYNLPSFQTKYEEAIFFVIKSYSEDDIHKSIKYNVWSSTLNGNKKLDSAYQESQKKAADKSGKCPVFLFFSVNASGQFCGVAEMIGRVDYEKSMEFWQQDKWTGYFPVKWHIIKDVPNPQLRHIILENNENKPVTNSRDTQEVRLPQGNEVLNIFKNYAAKTSILDDFDFYENREKVMVQKKLRFPPVLKKKEEDLVADFKTMEMSNTVEEGNTELTGTVS

SEQ ID NO: 20816 - DNA, 1124 bp, Arabidopsis thaliana
  misc_feature (1)..(1124): Ceres Seq. ID no. 12396129
  misc_feature (1)..(1124): Ortholog of  Ceres SEQ ID NO 13597538 as cited in SEQ ID NO 64966
aatttatattgttgagctgtgtgtgtggagatgatgatgatgatgatgataaacccaatagaattttaaaaggataagaatcgcaaagctcatatcacaaaactttgagatctcatttcatctttcttcgattctacctactccgattcaatcgatcttatcgagacatggatgctcgtaagagaggacgccctgaagctgctgcctctcacaactccaatggcggattcaagaggtctaagcaagagatggaatcaatttcaactggtttaggaagcaaatccaagccatgcactaaatttttcagcacttctggatgtccatttggtgacaattgccacttcttgcactatgtgcccggtgggtacaatgctgcagcgcagcatgaaaaatctccgaccaccggtttctcaagtttccagaaatatgcaaggatctggtggtcccggcggcagattctcagggagaggagatccaggatcaggccctgtttcaatctttggtgcttctacttccaagatcagtgtagatgcttctttagccggtgccatcattggaaaaggtggaatccattccaaacagatatgccgtgaaacaggagcaaaattatcgattaaagatcatgaaagagacccaaacttgaagattatcgagctggaaggaacatttgaacagatcaatgtagcgagtgggatggtgagagagcttatagggaggcttggatcagtgaagaaacctcaagggattggtggtcctgaagggaaaccacatcctgggagcaactacaaaaccaagatctgtgataggtactctaaagggaactgtacatatggagatagatgccattttgctcatggtgaatctgagctgcgcaggtcaggaatcgcttagttatgtctttagactcttgagaacagattatgcattgttagctccattatcattgtgactttttgctctctctttttgttttatcaatttgttttatgcgactccctttgaaaactttagcccattctgtattgagctctgaagattcgacgagttctgtaagttaccgatcacagttaaaagactttgatatgttaaaacccttatattacagctacatactttttttgtcc

SEQ ID NO: 20817 - protein, 179 aa, Arabidopsis thaliana
  peptide (1)..(179): Ceres Seq. ID no. 12396130
MCPVGTMLQRSMKNLRPPVSQVSRNMQGSGGPGGRFSGRGDPGSGPVSIFGASTSKISVDASLAGAIIGKGGIHSKQICRETGAKLSIKDHERDPNLKIIELEGTFEQINVASGMVRELIGRLGSVKKPQGIGGPEGKPHPGSNYKTKICDRYSKGNCTYGDRCHFAHGESELRRSGIA

SEQ ID NO: 20818 - protein, 173 aa, Arabidopsis thaliana
  peptide (1)..(173): Ceres Seq. ID no. 12396131
MLQRSMKNLRPPVSQVSRNMQGSGGPGGRFSGRGDPGSGPVSIFGASTSKISVDASLAGAIIGKGGIHSKQICRETGAKLSIKDHERDPNLKIIELEGTFEQINVASGMVRELIGRLGSVKKPQGIGGPEGKPHPGSNYKTKICDRYSKGNCTYGDRCHFAHGESELRRSGIA

SEQ ID NO: 20819 - protein, 168 aa, Arabidopsis thaliana
  peptide (1)..(168): Ceres Seq. ID no. 12396132
MKNLRPPVSQVSRNMQGSGGPGGRFSGRGDPGSGPVSIFGASTSKISVDASLAGAIIGKGGIHSKQICRETGAKLSIKDHERDPNLKIIELEGTFEQINVASGMVRELIGRLGSVKKPQGIGGPEGKPHPGSNYKTKICDRYSKGNCTYGDRCHFAHGESELRRSGIA

SEQ ID NO: 20820 - DNA, 840 bp, Arabidopsis thaliana
  misc_feature (1)..(840): Ceres Seq. ID no. 13496712
  misc_feature (1)..(840): Ortholog of  Ceres SEQ ID NO 15172783 as cited in SEQ ID NO 52143
  misc_feature (1)..(840): Ortholog of  Ceres SEQ ID NO 13599514 as cited in SEQ ID NO 0
tcttcttcttcttcctcttcgatattcgtcagtgtgtgtattttggggaaaactttgtgagcaaagagcgagaaaatgagcggagccggtaagaaaatcgcggatgtggctttcaaagcttcaaggactatcgattgggatggtatggctaaggtccttgtcacagatgaggctcgtagagagttctctaaccttcgtcgtgctttcgatgaggttaacacacagctccagaccaaatttagtcaggaacctgaacctatagattgggattactataggaagggtattggagctggcattgttgacaagtacaaggaagcttatgacagcattgagattccaaagtacgttgacaaagttactcctgaatacaagccaaagtttgatgctttgttggtggaactgaaagaagcagaacagaaatcgctcaaggagtctgaacggttggagaaagaaattgctgatgtccaagagatcagcaaaaagctcagcaccatgactgcagatgagtactttgagaagcacccggaactcaaaaagaagtttgatgacgaaatccgtaatgacaactggggatactgatcatgtttctccatctccggcttggaaagaaaactctctttctctttctctgttctcttactgtgattttgtgagccaatcataacaataataagtacaccattcacttaagcagtgttgagatcttcattccaaggaagataaacgcatttggttttagttatcaatttcacaaattgtttcgtttcgttcttcagtgaataataagagtcaaaaaaattatcattgtcaaggaatgaagaagactcttgactcgtc

SEQ ID NO: 20821 - protein, 168 aa, Arabidopsis thaliana
  peptide (1)..(168): Ceres Seq. ID no. 13496713
MSGAGKKIADVAFKASRTIDWDGMAKVLVTDEARREFSNLRRAFDEVNTQLQTKFSQEPEPIDWDYYRKGIGAGIVDKYKEAYDSIEIPKYVDKVTPEYKPKFDALLVELKEAEQKSLKESERLEKEIADVQEISKKLSTMTADEYFEKHPELKKKFDDEIRNDNWGY

SEQ ID NO: 20822 - protein, 145 aa, Arabidopsis thaliana
  peptide (1)..(145): Ceres Seq. ID no. 13496714
MAKVLVTDEARREFSNLRRAFDEVNTQLQTKFSQEPEPIDWDYYRKGIGAGIVDKYKEAYDSIEIPKYVDKVTPEYKPKFDALLVELKEAEQKSLKESERLEKEIADVQEISKKLSTMTADEYFEKHPELKKKFDDEIRNDNWGY

SEQ ID NO: 20823 - DNA, 800 bp, Arabidopsis thaliana
  misc_feature (1)..(800): Ceres Seq. ID no. 13499739
  misc_feature (1)..(800): Ortholog of  Ceres SEQ ID NO 14306406 as cited in SEQ ID NO 1412
  misc_feature (1)..(800): Ortholog of  Ceres SEQ ID NO 14309488 as cited in SEQ ID NO 52755
  misc_feature (1)..(800): Ortholog of  Ceres SEQ ID NO 15178824 as cited in SEQ ID NO 0
gctcacactcctaatccctcccatttttcaaaccactctctctttctctttctctaagtctttaacaatggcgcgccttctcttccgtcttctccaagaagccaattctacatctccggctgaagcttctccgcctttcaactccgacctcgtcctcatccttgcggttcttctttgtgcactgacatgtatcatcggcttaatagccgtctctcgatgcgcttggctccgccgtatcgcctcaagaaacagatcggatcaaactcatccaccgccggtagctgcagccaacaaaggattgaaaaagaaagtcctccggtcgttaccgaaactcacctactcgccggattctccgccggcggagaaactcgtggagtgtgctatctgtttaacggaattcgccgccggagacgagcttagggtgttgccgcagtgtggacatggtttccacgtatcgtgtatcgacacgtggcttggatcacactcttcttgtccttcttgccgtcaaatcttggtggttaccaggtgtcataaatgtggcgggttacccggtagctcaagttcaggacccgaacccgatacccgaatcaaacaacgtgaagatggtcctgataacttgccttgattcttttctttagacatatcccattttattttttataaagggaattcgattaaacaaagatataatattaattaaaaagtgttctttatcattttaaaggataatgttactctgtcatgtatatatttaattatctattgtaaatctatcatggaatggaaactttatgtcattc

SEQ ID NO: 20824 - protein, 207 aa, Arabidopsis thaliana
  peptide (1)..(207): Ceres Seq. ID no. 13499740
LTLLIPPIFQTTLSFSFSKSLTMARLLFRLLQEANSTSPAEASPPFNSDLVLILAVLLCALTCIIGLIAVSRCAWLRRIASRNRSDQTHPPPVAAANKGLKKKVLRSLPKLTYSPDSPPAEKLVECAICLTEFAAGDELRVLPQCGHGFHVSCIDTWLGSHSSCPSCRQILVVTRCHKCGGLPGSSSSGPEPDTRIKQREDGPDNLP

SEQ ID NO: 20825 - protein, 185 aa, Arabidopsis thaliana
  peptide (1)..(185): Ceres Seq. ID no. 13499741
MARLLFRLLQEANSTSPAEASPPFNSDLVLILAVLLCALTCIIGLIAVSRCAWLRRIASRNRSDQTHPPPVAAANKGLKKKVLRSLPKLTYSPDSPPAEKLVECAICLTEFAAGDELRVLPQCGHGFHVSCIDTWLGSHSSCPSCRQILVVTRCHKCGGLPGSSSSGPEPDTRIKQREDGPDNLP

SEQ ID NO: 20826 - DNA, 1257 bp, Arabidopsis thaliana
  misc_feature (1)..(1257): Ceres Seq. ID no. 13486837
  misc_feature (1)..(1257): Ortholog of  Ceres SEQ ID NO 13594544 as cited in SEQ ID NO 51236
agattcacgcatcacacaatcgagtttttagggttttagcggttgctctctcggaagccagagagaagagggaagaggaagtctaattcctctgcgttttttgcaattagggttttctcaattggaatcgaaaatggtgacagacaagagcaagaaggcgaaaaccgaagaagaaaacgtcgagcaaatcgatgcagagcttgtcctctcaatcgaaaagcttcaagagatccaagacgacctcgagaagataaatgaaaaggctagtgatgaagtgttggaagtggagcagaaatataatgtgataaggaaacctgtttatgacaagcgtaacgagatcatcaaaaccatccctgatttctggttaactgctttcttgagtcaccctgctttaggtgaacttttgactgaagaagaccaaaagattttcaaatatcttagctctcttgatgttgaggatgccaaagatgtgaaatctggatactctatcactttttccttcaatcccaatccattttttgaagatggaaaactgacaaagacttttacctttctcgaagaagggacaaccaaaatcacagccacgcctatcaaatggaaagagggcaaaggcctggcgaatggagtgaatcatgagaagaatggaaacaaacgtgcactacctgaagagagcttctttacctggtttagtgatgctcaacacaaggaggatgttgaggatgagatgcaagacgagcaggttgcagatatcatcaaggaagatttgtggcccaaccctctcacctacttcaacaatgacgctgatgaagaggactttgatggagacgatgatggagatgaagaggagaaagaaggtgactctgatgaagatgatgacgaagaagacgaagttggtgaggaatgatggcagggatacccagaaaccacatttgcttacatgtcttctctataacagagtgtgtaaagttttgtgtgttgaaaggtttttaattttaagcaaaagtggattatgacgacaacagacaagcttttaattttattttaccgtaatagttatatcttgttgtaagaaaccattttcagccttttgttggaaaatcctgcttaaatggtttttgagtcttacataatagcttcttcatcttttgtcttcttaaagagaattatatttgtaatttcatgtctgttgtgtttctttgactttactgaatagagaatttgtgtgtttatggtgaaaatatagccgatctgcttgac

SEQ ID NO: 20827 - protein, 256 aa, Arabidopsis thaliana
  peptide (1)..(256): Ceres Seq. ID no. 13486838
MVTDKSKKAKTEEENVEQIDAELVLSIEKLQEIQDDLEKINEKASDEVLEVEQKYNVIRKPVYDKRNEIIKTIPDFWLTAFLSHPALGELLTEEDQKIFKYLSSLDVEDAKDVKSGYSITFSFNPNPFFEDGKLTKTFTFLEEGTTKITATPIKWKEGKGLANGVNHEKNGNKRALPEESFFTWFSDAQHKEDVEDEMQDEQVADIIKEDLWPNPLTYFNNDADEEDFDGDDDGDEEEKEGDSDEDDDEEDEVGEE

SEQ ID NO: 20828 - DNA, 1318 bp, Arabidopsis thaliana
  misc_feature (1)..(1318): Ceres Seq. ID no. 12321933
  misc_feature (1)..(1318): Ortholog of  Ceres SEQ ID NO 15171501 as cited in SEQ ID NO 58322
ttccatttttattcccaaattaataaatatctttttttcttttattttcttttactttaaaaaaaaacttaaaaattaataaattaataaagatgggttacatatctctagccctagttgcattacttgtattttttgcctcgccggtggttctcgccgacgatataaccccaattccggcagacagagcccaaatcccacaatggttcatggccaacgttaaacccttttcccagagacggggcacgctagaccccgaacttgaagctgcagaagcatcgcgacgtgtcatcatcgtgaatcaaaatggaggcggcgattttaagacaataaacgcggcaatcaagagcattccattagcaaacaagaaccgtgtgatcataaagttggctcctggtatataccatgagaaagttaccgtcgacgtaggccgaccatacgttacattgcttggcaaacctggtgcggaaaccaacttgacttatgccggaacagccgctaaatacggcaccgtggagagtgccacgcttatcgtctgggccacaaattttttggcagccaacctaaacattataaacacttctccaatgccaaagcctggtacacaaggacaagctctagctatgagaatcaacggcgataaggctgctttctacaactgcagattctatggttttcaagacactctttgcgacgatagaggcaaccatttctttaagaattgttacatcgaaggaacctatgattttatctttggaagaggagcttccttgtacttgactacgcaattgcatgctgttggagacggattaagagtgatcgcggcacacaatcgacagagtacaactgagcaaaacgggtattcgttcgtgcattgcaaggttactggagtcggaaccgggatctacttgggtagggcttggatgagccaccctaaggtcgtctactcctacactgaaatgtctagtgtcgtcaacccatctggatggcaagagaacagagtgcgtgcgcatgacaagacggtgttctatggagaatacatgtgcacgggaccaggatcacacaaagcgaagagagtggcacacacacaagacattgacaacaaagaagctagccaattccttaccctcggctacatcaagggctccaaatggcttctacctcctcccgcttactaaacagacccaatcatcactaaaattctgtatatgttacaattgtacgttttgttttcgaagtgtcctctcttcctgtatataatggaggagtagagacttgtgtaattttgggttcatgataataaaatactcaatggttc

SEQ ID NO: 20829 - protein, 361 aa, Arabidopsis thaliana
  peptide (1)..(361): Ceres Seq. ID no. 12321934
MGYISLALVALLVFFASPVVLADDITPIPADRAQIPQWFMANVKPFSQRRGTLDPELEAAEASRRVIIVNQNGGGDFKTINAAIKSIPLANKNRVIIKLAPGIYHEKVTVDVGRPYVTLLGKPGAETNLTYAGTAAKYGTVESATLIVWATNFLAANLNIINTSPMPKPGTQGQALAMRINGDKAAFYNCRFYGFQDTLCDDRGNHFFKNCYIEGTYDFIFGRGASLYLTTQLHAVGDGLRVIAAHNRQSTTEQNGYSFVHCKVTGVGTGIYLGRAWMSHPKVVYSYTEMSSVVNPSGWQENRVRAHDKTVFYGEYMCTGPGSHKAKRVAHTQDIDNKEASQFLTLGYIKGSKWLLPPPAY

SEQ ID NO: 20830 - protein, 322 aa, Arabidopsis thaliana
  peptide (1)..(322): Ceres Seq. ID no. 12321935
MANVKPFSQRRGTLDPELEAAEASRRVIIVNQNGGGDFKTINAAIKSIPLANKNRVIIKLAPGIYHEKVTVDVGRPYVTLLGKPGAETNLTYAGTAAKYGTVESATLIVWATNFLAANLNIINTSPMPKPGTQGQALAMRINGDKAAFYNCRFYGFQDTLCDDRGNHFFKNCYIEGTYDFIFGRGASLYLTTQLHAVGDGLRVIAAHNRQSTTEQNGYSFVHCKVTGVGTGIYLGRAWMSHPKVVYSYTEMSSVVNPSGWQENRVRAHDKTVFYGEYMCTGPGSHKAKRVAHTQDIDNKEASQFLTLGYIKGSKWLLPPPAY

SEQ ID NO: 20831 - protein, 196 aa, Arabidopsis thaliana
  peptide (1)..(196): Ceres Seq. ID no. 12321936
MPKPGTQGQALAMRINGDKAAFYNCRFYGFQDTLCDDRGNHFFKNCYIEGTYDFIFGRGASLYLTTQLHAVGDGLRVIAAHNRQSTTEQNGYSFVHCKVTGVGTGIYLGRAWMSHPKVVYSYTEMSSVVNPSGWQENRVRAHDKTVFYGEYMCTGPGSHKAKRVAHTQDIDNKEASQFLTLGYIKGSKWLLPPPAY

SEQ ID NO: 20832 - DNA, 1347 bp, Arabidopsis thaliana
  misc_feature (1)..(1347): Ceres Seq. ID no. 13486853
  misc_feature (1)..(1347): Ortholog of  Ceres SEQ ID NO 13598741 as cited in SEQ ID NO 62749
  misc_feature (1)..(1347): Ortholog of  Ceres SEQ ID NO 12587535 as cited in SEQ ID NO 64020
  misc_feature (1)..(1347): Ortholog of  Ceres SEQ ID NO 12586366 as cited in SEQ ID NO 68983
agcatctcgagatcgtcttcctctcacaatctcaaattcttcggaccttttctctctcccctgaagctcccctcactcactcttctccgaggaagaacaacagagacaatggcggttcccaaagccattattctacctatcttgctactcatctgtggtgctgctctcggagctcctgcttctgaaggttatcttcgtaatggaaacttcgaagagtcaccaaagaaaaccgacatgaagaaaacagttctactaggcaaaaacgccttgcccgaatgggaaaccaccggtttcgtcgagtacatcgccggcggtcctcagccaggaggcatgtacttcccagtggctcatggagtccacgccgtgaggctcggaaacgaagctacaatctctcagaagttagaagtgaagccaggttctctctacgcactcacgtttggtgcgtcgagaacttgtgcacaagacgaagttcttagagtctctgtaccttctcagtccggtgacttgccacttcaaacactttacaacagtttcggaggtgacgtgtacgcttgggccttcgtcgccaagacttctcaagttactgtgactttccacaatcctggagttcaagaagatcctgcttgtggtcctttgttggacgctgtcgccattaaagagcttgttcatccaatctacaccagagggaacttggtgaagaatggagggttcgaagaaggtcctcaccgtctagtgaactccacacaaggagtcctactcccacctaaacaagaagatctcacatcacctttacctggttggatcatagagtcactcaaggcagtgaaattcatagactctaagtactttaatgtcccctttggacatgctgcgatcgagctagttgcaggcaaagaaagtgccattgcacaagtcattagaacctctcctggtcaaacttacaccctctccttcgtcgttggagatgctaagaatgactgccatggttccatgatggttgaagcttttgcagccagagatacactcaaagtaccacacacttccgttggtggaggtcatgtcaagaccgcgagtttcaagttcaaggcggttgaggcaagaactagaattactttcttcagtggtttttaccataccaagaagactgatactgtatctttatgtggtcctgtcattgacgagattgtggtttctcatgtcgcttagattaagtttactctttatgacaactgcacttgtgttcttagactggtcatggacttggtgccttgctttgtatgtcttggctccttttggaattgagttattgtcatcaagttaaaatgaatgatatattattgtaatatg

SEQ ID NO: 20833 - protein, 401 aa, Arabidopsis thaliana
  peptide (1)..(401): Ceres Seq. ID no. 13486854
SISRSSSSHNLKFFGPFLSPLKLPSLTLLRGRTTETMAVPKAIILPILLLICGAALGAPASEGYLRNGNFEESPKKTDMKKTVLLGKNALPEWETTGFVEYIAGGPQPGGMYFPVAHGVHAVRLGNEATISQKLEVKPGSLYALTFGASRTCAQDEVLRVSVPSQSGDLPLQTLYNSFGGDVYAWAFVAKTSQVTVTFHNPGVQEDPACGPLLDAVAIKELVHPIYTRGNLVKNGGFEEGPHRLVNSTQGVLLPPKQEDLTSPLPGWIIESLKAVKFIDSKYFNVPFGHAAIELVAGKESAIAQVIRTSPGQTYTLSFVVGDAKNDCHGSMMVEAFAARDTLKVPHTSVGGGHVKTASFKFKAVEARTRITFFSGFYHTKKTDTVSLCGPVIDEIVVSHVA

SEQ ID NO: 20834 - protein, 365 aa, Arabidopsis thaliana
  peptide (1)..(365): Ceres Seq. ID no. 13486855
MAVPKAIILPILLLICGAALGAPASEGYLRNGNFEESPKKTDMKKTVLLGKNALPEWETTGFVEYIAGGPQPGGMYFPVAHGVHAVRLGNEATISQKLEVKPGSLYALTFGASRTCAQDEVLRVSVPSQSGDLPLQTLYNSFGGDVYAWAFVAKTSQVTVTFHNPGVQEDPACGPLLDAVAIKELVHPIYTRGNLVKNGGFEEGPHRLVNSTQGVLLPPKQEDLTSPLPGWIIESLKAVKFIDSKYFNVPFGHAAIELVAGKESAIAQVIRTSPGQTYTLSFVVGDAKNDCHGSMMVEAFAARDTLKVPHTSVGGGHVKTASFKFKAVEARTRITFFSGFYHTKKTDTVSLCGPVIDEIVVSHVA

SEQ ID NO: 20835 - protein, 323 aa, Arabidopsis thaliana
  peptide (1)..(323): Ceres Seq. ID no. 13486856
MKKTVLLGKNALPEWETTGFVEYIAGGPQPGGMYFPVAHGVHAVRLGNEATISQKLEVKPGSLYALTFGASRTCAQDEVLRVSVPSQSGDLPLQTLYNSFGGDVYAWAFVAKTSQVTVTFHNPGVQEDPACGPLLDAVAIKELVHPIYTRGNLVKNGGFEEGPHRLVNSTQGVLLPPKQEDLTSPLPGWIIESLKAVKFIDSKYFNVPFGHAAIELVAGKESAIAQVIRTSPGQTYTLSFVVGDAKNDCHGSMMVEAFAARDTLKVPHTSVGGGHVKTASFKFKAVEARTRITFFSGFYHTKKTDTVSLCGPVIDEIVVSHVA

SEQ ID NO: 20836 - DNA, 1534 bp, Arabidopsis thaliana
  misc_feature (1)..(1534): Ceres Seq. ID no. 13492473
  misc_feature (1)..(1534): Ortholog of  Ceres SEQ ID NO 15171430 as cited in SEQ ID NO 51500
  misc_feature (1)..(1534): Ortholog of  Ceres SEQ ID NO 15172476 as cited in SEQ ID NO 54945
  misc_feature (1)..(1534): Ortholog of  Ceres SEQ ID NO 15176106 as cited in SEQ ID NO 60324
  misc_feature (1)..(1534): Ortholog of  Ceres SEQ ID NO 13654989 as cited in SEQ ID NO 63117
  misc_feature (1)..(1534): Ortholog of  Ceres SEQ ID NO 13584744 as cited in SEQ ID NO 69137
gctcaattttctttctttctttctttctttctctgggagtttgggattttcttaagggtctttttcaatctcgctccattttgtacgcatagaactgggtttgtgtttacacacataaagctcttatcttttttcttctttcaatcgagaagattatagagctgagtgactgattggtggtttcttggagttttaatgggaggttgtttcagcaatcggattaaaacagatattgcttccagtacatggctaagttcgaaattcttgagtagagatgggagcaagggctcgtcgaccgcttccttctcttatatgcctcgaacagaaggcgagatcttgcaaaatgctaatctcaagaactttagtctcagtgaactgaaatctgcaactaggaatttccggcctgatagtgtggttggtgaaggtggatttggttgcgttttcaaaggctggatcgatgagtcctctctcgctccttctaaaccggggaccgggattgtcattgctgtgaaaagacttaaccaagaagggtttcaaggtcatcgagagtggctggctgagatcaattatttaggccagctggatcatcctaaccttgtgaaactgattggatactgcttggaagaggagcacaggcttcttgtttacgagtttatgactcgtggtagtcttgagaatcacttattcagaagaggaacattctatcagccactttcatggaacacgcgggttcgtatggctcttggtgcagctagaggacttgcttttcttcacaatgctcaaccgcaagttatataccgagacttcaaagcatctaacatcttgctagattcgaactacaacgcaaagctttcggatttcggtttggctagagatggtccaatgggtgacaacagccatgtttctaccagagtcatgggaactcagggatacgctgctccagaatatctagctacaggtcatttatcggtgaagagcgatgtatacagttttggggttgtgttactggagttgttatcaggaagacgagcaattgacaagaatcaaccagtaggagaacacaatctcgtggattgggcaagaccctacttaacaaacaagagaagacttctgcgagtgatggatcctcgtctccaaggtcaatactcactaacccgagctttgaaaattgcagttcttgcactcgattgcatatctatagatgccaagagtagaccgaccatgaacgaaatcgtcaagacaatggaagaacttcatatccagaaggaagcatcaaaagagcagcagaatcctcaaatcagcattgacaacatcatcaacaaatctccacaagctgtgaattatcctaggccttcaattatgtaacaatcctaggcgagctatttacccgggttttagagatgtatagactctttaccttctgtctgtttagatatgttgtttggtagtaacaaaagagctggcaatgtaagggagagaaggaaacttactagttgtaaacttaggttctcttacaacgttcacatgttatctc

SEQ ID NO: 20837 - protein, 389 aa, Arabidopsis thaliana
  peptide (1)..(389): Ceres Seq. ID no. 13492474
MGGCFSNRIKTDIASSTWLSSKFLSRDGSKGSSTASFSYMPRTEGEILQNANLKNFSLSELKSATRNFRPDSVVGEGGFGCVFKGWIDESSLAPSKPGTGIVIAVKRLNQEGFQGHREWLAEINYLGQLDHPNLVKLIGYCLEEEHRLLVYEFMTRGSLENHLFRRGTFYQPLSWNTRVRMALGAARGLAFLHNAQPQVIYRDFKASNILLDSNYNAKLSDFGLARDGPMGDNSHVSTRVMGTQGYAAPEYLATGHLSVKSDVYSFGVVLLELLSGRRAIDKNQPVGEHNLVDWARPYLTNKRRLLRVMDPRLQGQYSLTRALKIAVLALDCISIDAKSRPTMNEIVKTMEELHIQKEASKEQQNPQISIDNIINKSPQAVNYPRPSIM

SEQ ID NO: 20838 - protein, 350 aa, Arabidopsis thaliana
  peptide (1)..(350): Ceres Seq. ID no. 13492475
MPRTEGEILQNANLKNFSLSELKSATRNFRPDSVVGEGGFGCVFKGWIDESSLAPSKPGTGIVIAVKRLNQEGFQGHREWLAEINYLGQLDHPNLVKLIGYCLEEEHRLLVYEFMTRGSLENHLFRRGTFYQPLSWNTRVRMALGAARGLAFLHNAQPQVIYRDFKASNILLDSNYNAKLSDFGLARDGPMGDNSHVSTRVMGTQGYAAPEYLATGHLSVKSDVYSFGVVLLELLSGRRAIDKNQPVGEHNLVDWARPYLTNKRRLLRVMDPRLQGQYSLTRALKIAVLALDCISIDAKSRPTMNEIVKTMEELHIQKEASKEQQNPQISIDNIINKSPQAVNYPRPSIM

SEQ ID NO: 20839 - protein, 236 aa, Arabidopsis thaliana
  peptide (1)..(236): Ceres Seq. ID no. 13492476
MTRGSLENHLFRRGTFYQPLSWNTRVRMALGAARGLAFLHNAQPQVIYRDFKASNILLDSNYNAKLSDFGLARDGPMGDNSHVSTRVMGTQGYAAPEYLATGHLSVKSDVYSFGVVLLELLSGRRAIDKNQPVGEHNLVDWARPYLTNKRRLLRVMDPRLQGQYSLTRALKIAVLALDCISIDAKSRPTMNEIVKTMEELHIQKEASKEQQNPQISIDNIINKSPQAVNYPRPSIM

SEQ ID NO: 20840 - DNA, 2064 bp, Arabidopsis thaliana
  misc_feature (1)..(2064): Ceres Seq. ID no. 13494142
  misc_feature (1)..(2064): Ortholog of  Ceres SEQ ID NO 14307896 as cited in SEQ ID NO 66915
  misc_feature (1)..(2064): Ortholog of  Ceres SEQ ID NO 13657008 as cited in SEQ ID NO 69164
agaaacaagaaaaagaaagatgggagatttaatggctcggtctctctcttgatctgacgacgacgatgatggtgaagcttcgcaatcttgttcttttcttcatgctcctcaccgtcgttgctcatatccttctctacaccgatcccgctgcctccttcaagacccccttttctaaacgcgatttcctcgaggacgtaaccgccttgactttcaattccgatgagaatcgtttgaatcttcttcctcgggaatctcccgctgtgctcagaggaggactcgtcggtgctgtctattccgataagaattcacggcggctagaccaattgtctgctcgagttctttccgccaccgacgatgatactcactcacatactgacatttccatcaaacaagtcactcatgatgcagcctcagactcgcatattaatagggaaaatatgcatgttcaattgacccaacaaacctctgaaaaagttgatgagcaaccagagcctaatgcttttggagctaagaaagatactggaaacgtgttgatgcctgatgctcaagtgaggcatcttaaagatcagcttattagggcaaaggtttatctttcccttccatctgcaaaggccaatgctcattttgtgagagagcttcgactccgtattaaagaagttcaacgggcacttgcagatgcctccaaggattcggatctgccaaagactgctatagaaaagctaaaagcaatggagcaaacactggccaaaggcaagcagatccaagatgactgttctacagtggtcaagaagctacgtgctatgctccactccgcagatgagcagctacgggtccataagaagcaaaccatgtttttgactcaattgactgctaagaccattcctaaaggacttcactgccttcctctgcgcctcactacagactattatgctttaaattcatctgaacaacaatttccaaatcaggagaaactagaagatactcagctgtatcactatgcccttttctctgataatgttttggctacgtcagttgttgttaactctaccataaccaatgcaaagcatcccttaaagcatgtcttccacatcgtcacagacagactcaattatgcggcaatgaggatgtggttcctggacaatccacctggcaaagccaccatccaggttcagaatgttgaagaatttacatggctgaattcaagctacagtcccgttctcaaacagcttagttctagatcgatgatagattattacttcagagcccaccatacaaattcagacaccaacttgaagttccggaatccaaaatacttatcgatccttaatcatcttcgtttttacttgcctgagatctttcccaagctcagcaaagtgctcttcttggatgatgatatagttgtgcagaaggacctttctggtctttggtcagttgatctgaaaggtaatgttaacggtgctgtagagacgtgtggggaaagctttcatcgctttgaccgttatctgaacttctcaaatccactcatttccaagaactttgaccctcgagcttgtggttgggcgtatggtatgaatgtctttgatctggatgaatggaagaggcaaaacatcacagaagtttatcatcgatggcaggatctgaatcaagaccgagaattgtggaagctagggacgttgccgcctggtctaatcacattttggagacgaacatatccgctagaccggaaatggcacatactagggcttggatacaacccgagtgtgaaccaaagggatattgagagggcagccgtgatacactataatggcaacctcaaaccatggctagagattgggattccaagatacagaggcttctggtcaaagcatgtagactatgagcacgtttatctcagagaatgcaacatcaatccttagaattagagtctgttgtgagggcaatattatacgtttataatctgacgagatgatcattacatgaaattgtatatgtcacggtaaaaggagttccaataggcacgaccgatgttattattgcaacatatatatcaacaagaggaatgac

SEQ ID NO: 20841 - protein, 616 aa, Arabidopsis thaliana
  peptide (1)..(616): Ceres Seq. ID no. 13494143
MMVKLRNLVLFFMLLTVVAHILLYTDPAASFKTPFSKRDFLEDVTALTFNSDENRLNLLPRESPAVLRGGLVGAVYSDKNSRRLDQLSARVLSATDDDTHSHTDISIKQVTHDAASDSHINRENMHVQLTQQTSEKVDEQPEPNAFGAKKDTGNVLMPDAQVRHLKDQLIRAKVYLSLPSAKANAHFVRELRLRIKEVQRALADASKDSDLPKTAIEKLKAMEQTLAKGKQIQDDCSTVVKKLRAMLHSADEQLRVHKKQTMFLTQLTAKTIPKGLHCLPLRLTTDYYALNSSEQQFPNQEKLEDTQLYHYALFSDNVLATSVVVNSTITNAKHPLKHVFHIVTDRLNYAAMRMWFLDNPPGKATIQVQNVEEFTWLNSSYSPVLKQLSSRSMIDYYFRAHHTNSDTNLKFRNPKYLSILNHLRFYLPEIFPKLSKVLFLDDDIVVQKDLSGLWSVDLKGNVNGAVETCGESFHRFDRYLNFSNPLISKNFDPRACGWAYGMNVFDLDEWKRQNITEVYHRWQDLNQDRELWKLGTLPPGLITFWRRTYPLDRKWHILGLGYNPSVNQRDIERAAVIHYNGNLKPWLEIGIPRYRGFWSKHVDYEHVYLRECNINP

SEQ ID NO: 20842 - protein, 615 aa, Arabidopsis thaliana
  peptide (1)..(615): Ceres Seq. ID no. 13494144
MVKLRNLVLFFMLLTVVAHILLYTDPAASFKTPFSKRDFLEDVTALTFNSDENRLNLLPRESPAVLRGGLVGAVYSDKNSRRLDQLSARVLSATDDDTHSHTDISIKQVTHDAASDSHINRENMHVQLTQQTSEKVDEQPEPNAFGAKKDTGNVLMPDAQVRHLKDQLIRAKVYLSLPSAKANAHFVRELRLRIKEVQRALADASKDSDLPKTAIEKLKAMEQTLAKGKQIQDDCSTVVKKLRAMLHSADEQLRVHKKQTMFLTQLTAKTIPKGLHCLPLRLTTDYYALNSSEQQFPNQEKLEDTQLYHYALFSDNVLATSVVVNSTITNAKHPLKHVFHIVTDRLNYAAMRMWFLDNPPGKATIQVQNVEEFTWLNSSYSPVLKQLSSRSMIDYYFRAHHTNSDTNLKFRNPKYLSILNHLRFYLPEIFPKLSKVLFLDDDIVVQKDLSGLWSVDLKGNVNGAVETCGESFHRFDRYLNFSNPLISKNFDPRACGWAYGMNVFDLDEWKRQNITEVYHRWQDLNQDRELWKLGTLPPGLITFWRRTYPLDRKWHILGLGYNPSVNQRDIERAAVIHYNGNLKPWLEIGIPRYRGFWSKHVDYEHVYLRECNINP

SEQ ID NO: 20843 - protein, 604 aa, Arabidopsis thaliana
  peptide (1)..(604): Ceres Seq. ID no. 13494145
MLLTVVAHILLYTDPAASFKTPFSKRDFLEDVTALTFNSDENRLNLLPRESPAVLRGGLVGAVYSDKNSRRLDQLSARVLSATDDDTHSHTDISIKQVTHDAASDSHINRENMHVQLTQQTSEKVDEQPEPNAFGAKKDTGNVLMPDAQVRHLKDQLIRAKVYLSLPSAKANAHFVRELRLRIKEVQRALADASKDSDLPKTAIEKLKAMEQTLAKGKQIQDDCSTVVKKLRAMLHSADEQLRVHKKQTMFLTQLTAKTIPKGLHCLPLRLTTDYYALNSSEQQFPNQEKLEDTQLYHYALFSDNVLATSVVVNSTITNAKHPLKHVFHIVTDRLNYAAMRMWFLDNPPGKATIQVQNVEEFTWLNSSYSPVLKQLSSRSMIDYYFRAHHTNSDTNLKFRNPKYLSILNHLRFYLPEIFPKLSKVLFLDDDIVVQKDLSGLWSVDLKGNVNGAVETCGESFHRFDRYLNFSNPLISKNFDPRACGWAYGMNVFDLDEWKRQNITEVYHRWQDLNQDRELWKLGTLPPGLITFWRRTYPLDRKWHILGLGYNPSVNQRDIERAAVIHYNGNLKPWLEIGIPRYRGFWSKHVDYEHVYLRECNINP

SEQ ID NO: 20844 - DNA, 987 bp, Arabidopsis thaliana
  misc_feature (1)..(987): Ceres Seq. ID no. 12327780
  misc_feature (1)..(987): Ortholog of  Ceres SEQ ID NO 15226238 as cited in SEQ ID NO 68840
  misc_feature (1)..(987): Ortholog of  Ceres SEQ ID NO 12635175 as cited in SEQ ID NO 0
  misc_feature (1)..(987): Ortholog of  Ceres SEQ ID NO 14306100 as cited in SEQ ID NO 0
acatgtaaattcacatatctctctctcttatttgatcataaagatattattgcttcttcaagtaaacaaaaaatgggaagctttctcttcctcatcgtagtcatcttcctcttctcttcatccgttaacgcttgtgatcgatgtcttcaccgttctaaagcagcttatttctcctctgcctctgctctctcttctggagcttgtgcttatggctctatggctacgagtttcttcgccggacatatcgctgcagctatcccttctatctacaaagacggtgctggctgtggagcttgctttcaagtcagatgcaagaaccctaagctgtgtagcactaaaggaaccattgtgatgatcacagacttaaacaagagtaaccaaaccgatcttgtccttagtagcagagcttttagagctatggctaaacctattgttggtgctgacaaagaccttctcaaacaaggcattgtcgacatcgaataccaaagagttccttgcgattacggcaacaagaacatgaacgtgagagtagaagaagcaagcaagaaaccaaactacttagagataaagcttttataccaaggaggtcaaacagaagtagtatccatcgacattgctcaagtcggttcatcgccaaattggggttacatgacaagaagccacggagctgtttgggtaactgacaaagtacccaccggagctatccagttcaggttcgtagtaaccggtggatacgacggtaaaatgatttggtcacagagtgttcttccatccaattgggaagctgggaaaatttacgacgccggtgttcaaatcactgacattgctcaagaaggttgtgatccttgcgatgctcacatctggaactaagttatttagtggcacacaaacaaacatctttcataggtttatatataatgtgtgacagaggttattaatgaacatagttaaagaatgcttaatctaatgattctcatgattctacac

SEQ ID NO: 20845 - protein, 289 aa, Arabidopsis thaliana
  peptide (1)..(289): Ceres Seq. ID no. 12327781
TCKFTYLSLLFDHKDIIASSSKQKMGSFLFLIVVIFLFSSSVNACDRCLHRSKAAYFSSASALSSGACAYGSMATSFFAGHIAAAIPSIYKDGAGCGACFQVRCKNPKLCSTKGTIVMITDLNKSNQTDLVLSSRAFRAMAKPIVGADKDLLKQGIVDIEYQRVPCDYGNKNMNVRVEEASKKPNYLEIKLLYQGGQTEVVSIDIAQVGSSPNWGYMTRSHGAVWVTDKVPTGAIQFRFVVTGGYDGKMIWSQSVLPSNWEAGKIYDAGVQITDIAQEGCDPCDAHIWN

SEQ ID NO: 20846 - protein, 265 aa, Arabidopsis thaliana
  peptide (1)..(265): Ceres Seq. ID no. 12327782
MGSFLFLIVVIFLFSSSVNACDRCLHRSKAAYFSSASALSSGACAYGSMATSFFAGHIAAAIPSIYKDGAGCGACFQVRCKNPKLCSTKGTIVMITDLNKSNQTDLVLSSRAFRAMAKPIVGADKDLLKQGIVDIEYQRVPCDYGNKNMNVRVEEASKKPNYLEIKLLYQGGQTEVVSIDIAQVGSSPNWGYMTRSHGAVWVTDKVPTGAIQFRFVVTGGYDGKMIWSQSVLPSNWEAGKIYDAGVQITDIAQEGCDPCDAHIWN

SEQ ID NO: 20847 - protein, 217 aa, Arabidopsis thaliana
  peptide (1)..(217): Ceres Seq. ID no. 12327783
MATSFFAGHIAAAIPSIYKDGAGCGACFQVRCKNPKLCSTKGTIVMITDLNKSNQTDLVLSSRAFRAMAKPIVGADKDLLKQGIVDIEYQRVPCDYGNKNMNVRVEEASKKPNYLEIKLLYQGGQTEVVSIDIAQVGSSPNWGYMTRSHGAVWVTDKVPTGAIQFRFVVTGGYDGKMIWSQSVLPSNWEAGKIYDAGVQITDIAQEGCDPCDAHIWN

SEQ ID NO: 20848 - DNA, 863 bp, Arabidopsis thaliana
  misc_feature (1)..(863): Ceres Seq. ID no. 12322956
  misc_feature (1)..(863): Ortholog of  Ceres SEQ ID NO 15173284 as cited in SEQ ID NO 61828
  misc_feature (1)..(863): Ortholog of  Ceres SEQ ID NO 15178906 as cited in SEQ ID NO 0
aattggtcaaagaaaaaaaaagaaagacatagaggattgaacggtagacgtagacgccattggagtttgaaagggaattagtcgacgttttatggatcattgtcgtttcggtgtcattttcttcttcttctttcgctagcacgatttaaagcctgactagatccatcatcggccatggaggattctacagccacggctacgtcttcgtcttccactcattatctctccattttcacgaattatcctctcatttccgccgtcacctctttcactatcgctcaattcatcaaactcttcacctcctggtatagggaacggagatgggatctcaaacagcttattgggtctggaggaatgccttcttcgcattcagcgaccgttacagctctcgctgtagctattggtttacaagaaggctttggtggatcacattttgccattgctttgattttggcatctgttgtgatgtatgatgctaccggtgttagattacatgctggtcgtcaagctgaggttctcaatcagattgtatatgaacttcctgcagaacatccgctggctgaaagcagacctttgcgggaacttcttggtcatacccctccccaggtcgttgctggtggaatgcttggaagtgctacagcagtcaccggatacttatttttcaggatagctacaagctaacgtcaagaacatgcatagacacaactcttctgcttcattgcctattgaagccactggagagtaccaaaacagatttacaaccgaatccgagttaaaaatatatttattcttgtttaacattaccattaccatatgtaaagaaatcgtgaaacaccattacaaaaataacgtgattttatttg

SEQ ID NO: 20849 - protein, 168 aa, Arabidopsis thaliana
  peptide (1)..(168): Ceres Seq. ID no. 12322957
MEDSTATATSSSSTHYLSIFTNYPLISAVTSFTIAQFIKLFTSWYRERRWDLKQLIGSGGMPSSHSATVTALAVAIGLQEGFGGSHFAIALILASVVMYDATGVRLHAGRQAEVLNQIVYELPAEHPLAESRPLRELLGHTPPQVVAGGMLGSATAVTGYLFFRIATS

SEQ ID NO: 20850 - protein, 108 aa, Arabidopsis thaliana
  peptide (1)..(108): Ceres Seq. ID no. 12322958
MPSSHSATVTALAVAIGLQEGFGGSHFAIALILASVVMYDATGVRLHAGRQAEVLNQIVYELPAEHPLAESRPLRELLGHTPPQVVAGGMLGSATAVTGYLFFRIATS

SEQ ID NO: 20851 - DNA, 1016 bp, Arabidopsis thaliana
  misc_feature (1)..(1016): Ceres Seq. ID no. 12329124
  misc_feature (1)..(1016): Ortholog of  Ceres SEQ ID NO 13596519 as cited in SEQ ID NO 62572
  misc_feature (1)..(1016): Ortholog of  Ceres SEQ ID NO 12625108 as cited in SEQ ID NO 68102
ccatattattcacgattctcatcaaatcatctccgatactcacaaccgaaataactaacccctcctcaacaaaaaacaacaaaacatgtacactccatcatacttaaaatattcaataatctcaattatatccgtattattcctccaaggaactcatggagacgacggaggttggcaaggtggtcacgccacgttttacggcggcgaagatgcttccggcaccatgggcggagcttgtggctatggaaatttgtatggccaaggttacgggacgaacacggcggctttaagtacggctctattcaacaacggactcacgtgtggcgcgtgctatgagatgaagtgtaacgatgacccgaggtggtgtctcgggtcaaccatcaccgtcacagctacaaacttttgcccacctaaccctggcctctccaacgataatggaggttggtgcaatcctcctcttcagcatttcgacctcgccgagccagcttttcttcagatcgctcagtatcgtgccggcattgttcctgtctctttccgaagagtaccatgtatgaagaaaggaggaataaggtttacgatcaacggacactcatacttcaacctcgttctgatctccaacgtaggaggagcaggagacgtacacgccgtctcaatcaaaggctcaaaaacacagtcgtggcaagcgatgtctagaaactggggacaaaactggcagagcaattcatacatgaacgaccaaagcctttccttccaggtaacgaccagcgatggtcgcacactcgttagcaacgacgtggctccttctaattggcagttcggacaaacctaccaaggtggtcagttctgatccaaaccatcatccacatctctctgttttgggtgctgacgtggctgcatattgctgaggtggctcgtaagcacccgcttaattagcttagcctttttttctcttatttacgaattattgcttcaatggttgtattttcattgtgcctacaaaaaagcaaggttttttt

SEQ ID NO: 20852 - protein, 253 aa, Arabidopsis thaliana
  peptide (1)..(253): Ceres Seq. ID no. 12329125
MYTPSYLKYSIISIISVLFLQGTHGDDGGWQGGHATFYGGEDASGTMGGACGYGNLYGQGYGTNTAALSTALFNNGLTCGACYEMKCNDDPRWCLGSTITVTATNFCPPNPGLSNDNGGWCNPPLQHFDLAEPAFLQIAQYRAGIVPVSFRRVPCMKKGGIRFTINGHSYFNLVLISNVGGAGDVHAVSIKGSKTQSWQAMSRNWGQNWQSNSYMNDQSLSFQVTTSDGRTLVSNDVAPSNWQFGQTYQGGQF

SEQ ID NO: 20853 - protein, 207 aa, Arabidopsis thaliana
  peptide (1)..(207): Ceres Seq. ID no. 12329126
MGGACGYGNLYGQGYGTNTAALSTALFNNGLTCGACYEMKCNDDPRWCLGSTITVTATNFCPPNPGLSNDNGGWCNPPLQHFDLAEPAFLQIAQYRAGIVPVSFRRVPCMKKGGIRFTINGHSYFNLVLISNVGGAGDVHAVSIKGSKTQSWQAMSRNWGQNWQSNSYMNDQSLSFQVTTSDGRTLVSNDVAPSNWQFGQTYQGGQF

SEQ ID NO: 20854 - protein, 169 aa, Arabidopsis thaliana
  peptide (1)..(169): Ceres Seq. ID no. 12329127
MKCNDDPRWCLGSTITVTATNFCPPNPGLSNDNGGWCNPPLQHFDLAEPAFLQIAQYRAGIVPVSFRRVPCMKKGGIRFTINGHSYFNLVLISNVGGAGDVHAVSIKGSKTQSWQAMSRNWGQNWQSNSYMNDQSLSFQVTTSDGRTLVSNDVAPSNWQFGQTYQGGQF

SEQ ID NO: 20855 - DNA, 665 bp, Arabidopsis thaliana
  misc_feature (1)..(665): Ceres Seq. ID no. 12329987
  misc_feature (1)..(665): Ortholog of  Ceres SEQ ID NO 14304167 as cited in SEQ ID NO 56367
ttttggaatctgaagtgaatcgtcgaaaaaatttatcagtttcgagattcggagatctgcaagggagaagatgatcgtttgcgtcgccgtcgtcggccaccagaacaatccgctttacatacaaagcttcacggatgttgacgatgctctcaagctccaccacattgttcattgctcccttgatgtcatcgaagagcgagtgaacaatccgaaaaagtctggtacaacactgaacgaggcttttcttggcttgctctatcctactgtgaactacaaagtgtatggttacttgactaataccaaggttaaatttatattggtcactactgatttggatgttagagacaccgatgtgagaagtttcttcaggaagttccatgctgcttacgttgatgcagtctcaaacccctttcatgtccctggcaaaaagataacctcgagaacctttgcgcaaactgtaagcaacatcgttggatcgtacggtttgaactgaccttctcttataagttgctttttgtacctcaaacttgtgttttacggagcattgagcaagtctcatttctttatcatcatatgttgttaatatcaactctgaaattgctgtaaggtgacttgttgcttcacatgttacctttttactcgactagttcctctcaatttgaccc

SEQ ID NO: 20856 - protein, 140 aa, Arabidopsis thaliana
  peptide (1)..(140): Ceres Seq. ID no. 12329988
MIVCVAVVGHQNNPLYIQSFTDVDDALKLHHIVHCSLDVIEERVNNPKKSGTTLNEAFLGLLYPTVNYKVYGYLTNTKVKFILVTTDLDVRDTDVRSFFRKFHAAYVDAVSNPFHVPGKKITSRTFAQTVSNIVGSYGLN

SEQ ID NO: 20857 - DNA, 2269 bp, Arabidopsis thaliana
  misc_feature (1)..(2269): Ceres Seq. ID no. 13491872
  misc_feature (1)..(2269): Ortholog of  Ceres SEQ ID NO 12627433 as cited in SEQ ID NO 61601
atgtggaagtttaaaccttttgctcaaaaagaacctgcgggtctcgaaggtcgatttctcgagataggaaatctgaaagttcaagttagaaatgtcattgcggaaggaggtttctccagtgtttacttagctcaagatgtaaatcacgcgtcaaagcaatatgctttgaagcacatgatatgcaatgacgaggagtcacttgaactcgtaatgaaagagatctcggttctgaaatccctcaagggacatccaaatgttgtcacgctctacgcacatggtatcttggatatggggaggaataaaaaagaagctcttttggctatggatttttgtggtaaatctcttgtggatgtgcttgagaatagaggtgctggttactttgaagagaaacaagctcttacgatttttagagatgtgtgtaatgctgtctttgcaatgcattgtcaatccccacgcattgctcacagagacttgaaggctgagaatcttctattgagctcagatggacaatggaaattgtgtgattttggaagcgtttcgacaaatcacaagatttttgaaagagcagaagagatgggaattgaagaagataatattagaaaatacacaacaccaacatatagagctcctgagatgtgggatctctttcgaagggagatgataagcgagaaggtcgatatatgggctcttggatgtctcttgtttcggatatgctatttcaagaatgcatttgatggagaatcaaagctgcaaatcttaaacgggaattatcgtattccagaatcgcctaaatacagtgtatttattacggatctcatcaaagaaatgctccaagcttcacccgatgaacgaccagatattacacagatttggtttcgtgtcaatgagcagcttcctgctaatttacagaaatcattaccggatcgaccacctgaaatgcaatctactggagtccatgatggctcatcaaaatcagcaactaaaccttctccagcacctcgtagaagtccgccaccgccgccaccatcttctggagaatcagatagtggaggaccgctcggtgccttttgggcgactcagcatgctaaaacctcagttgtatcagaagataacaaaaacatgcctaaatttgatgaaccaaacagtaacacatctaaatctgaaagagttcgtgtggatagtcatcaacccaaaaaaccaagtcctgtgagaggagaggctcgtggtattcaaagaaataaagatcttgaaactacgatttctcagaagaatacaactcctgctgcagccaataacatgacaagagtgtccaaggatgatgccttcaactcgtttgttgctgactttgataccacaaagttcgataatggtaataaacctggcaaagaagaggcattggaagctgagatacagaggttaaaagacgagttgaagcaaacaaaatcagagaaggcagaaataactgctaagtttgaaaagctttctgctatctgcagatcgcaaaggcaagagttgcaggatctcaaacaaacacttgcctctaaaagtgcctcaccgtcaccgagcagagactcttcacaaaatcaaccctctccagggatgcattccatgtcatcaactccatcgagagataagatggaaggaacaatgtgggaacttcaacaggacagatctaactggtcaactggcagctctgatacaaattcatggcaaccttttagtgatgaagcgaaacccgtgatggaatctgcatcaaagggtaacaataatacgattaatcagtctgtgagaaccagaagtaaaccagcttctgctgcaggtactcaaggttttgagccatggggtttcgagacagaatcctttagagccgctgcaacgtctgcagctgctacttctgcatctggaacacaaagatctatgggctctggaaacagcacttcacagagatatgggaactcaaagatgagagaaaaccagaaaacagctcaacctgctggatgggccggcttctaaaactcactcagatgcgcattgctatttcttcctcatgcaacaacaacagcttcatgttgctgccattacagaatcttgaatctttttgtagatgatgatcatcccctgtttttgtgctgctgctaaatataccccacccatatccattatgttttatgtagagtcttaaactttacacattctctgagctgtggccagatatctcagcttatggattattattggaaaaataaataattcaagattcagacagctt

SEQ ID NO: 20858 - protein, 670 aa, Arabidopsis thaliana
  peptide (1)..(670): Ceres Seq. ID no. 13491873
MWKFKPFAQKEPAGLEGRFLEIGNLKVQVRNVIAEGGFSSVYLAQDVNHASKQYALKHMICNDEESLELVMKEISVLKSLKGHPNVVTLYAHGILDMGRNKKEALLAMDFCGKSLVDVLENRGAGYFEEKQALTIFRDVCNAVFAMHCQSPRIAHRDLKAENLLLSSDGQWKLCDFGSVSTNHKIFERAEEMGIEEDNIRKYTTPTYRAPEMWDLFRREMISEKVDIWALGCLLFRICYFKNAFDGESKLQILNGNYRIPESPKYSVFITDLIKEMLQASPDERPDITQIWFRVNEQLPANLQKSLPDRPPEMQSTGVHDGSSKSATKPSPAPRRSPPPPPPSSGESDSGGPLGAFWATQHAKTSVVSEDNKNMPKFDEPNSNTSKSERVRVDSHQPKKPSPVRGEARGIQRNKDLETTISQKNTTPAAANNMTRVSKDDAFNSFVADFDTTKFDNGNKPGKEEALEAEIQRLKDELKQTKSEKAEITAKFEKLSAICRSQRQELQDLKQTLASKSASPSPSRDSSQNQPSPGMHSMSSTPSRDKMEGTMWELQQDRSNWSTGSSDTNSWQPFSDEAKPVMESASKGNNNTINQSVRTRSKPASAAGTQGFEPWGFETESFRAAATSAAATSASGTQRSMGSGNSTSQRYGNSKMRENQKTAQPAGWAGF

SEQ ID NO: 20859 - protein, 612 aa, Arabidopsis thaliana
  peptide (1)..(612): Ceres Seq. ID no. 13491874
MICNDEESLELVMKEISVLKSLKGHPNVVTLYAHGILDMGRNKKEALLAMDFCGKSLVDVLENRGAGYFEEKQALTIFRDVCNAVFAMHCQSPRIAHRDLKAENLLLSSDGQWKLCDFGSVSTNHKIFERAEEMGIEEDNIRKYTTPTYRAPEMWDLFRREMISEKVDIWALGCLLFRICYFKNAFDGESKLQILNGNYRIPESPKYSVFITDLIKEMLQASPDERPDITQIWFRVNEQLPANLQKSLPDRPPEMQSTGVHDGSSKSATKPSPAPRRSPPPPPPSSGESDSGGPLGAFWATQHAKTSVVSEDNKNMPKFDEPNSNTSKSERVRVDSHQPKKPSPVRGEARGIQRNKDLETTISQKNTTPAAANNMTRVSKDDAFNSFVADFDTTKFDNGNKPGKEEALEAEIQRLKDELKQTKSEKAEITAKFEKLSAICRSQRQELQDLKQTLASKSASPSPSRDSSQNQPSPGMHSMSSTPSRDKMEGTMWELQQDRSNWSTGSSDTNSWQPFSDEAKPVMESASKGNNNTINQSVRTRSKPASAAGTQGFEPWGFETESFRAAATSAAATSASGTQRSMGSGNSTSQRYGNSKMRENQKTAQPAGWAGF

SEQ ID NO: 20860 - protein, 600 aa, Arabidopsis thaliana
  peptide (1)..(600): Ceres Seq. ID no. 13491875
MKEISVLKSLKGHPNVVTLYAHGILDMGRNKKEALLAMDFCGKSLVDVLENRGAGYFEEKQALTIFRDVCNAVFAMHCQSPRIAHRDLKAENLLLSSDGQWKLCDFGSVSTNHKIFERAEEMGIEEDNIRKYTTPTYRAPEMWDLFRREMISEKVDIWALGCLLFRICYFKNAFDGESKLQILNGNYRIPESPKYSVFITDLIKEMLQASPDERPDITQIWFRVNEQLPANLQKSLPDRPPEMQSTGVHDGSSKSATKPSPAPRRSPPPPPPSSGESDSGGPLGAFWATQHAKTSVVSEDNKNMPKFDEPNSNTSKSERVRVDSHQPKKPSPVRGEARGIQRNKDLETTISQKNTTPAAANNMTRVSKDDAFNSFVADFDTTKFDNGNKPGKEEALEAEIQRLKDELKQTKSEKAEITAKFEKLSAICRSQRQELQDLKQTLASKSASPSPSRDSSQNQPSPGMHSMSSTPSRDKMEGTMWELQQDRSNWSTGSSDTNSWQPFSDEAKPVMESASKGNNNTINQSVRTRSKPASAAGTQGFEPWGFETESFRAAATSAAATSASGTQRSMGSGNSTSQRYGNSKMRENQKTAQPAGWAGF

SEQ ID NO: 20861 - DNA, 924 bp, Arabidopsis thaliana
  misc_feature (1)..(924): Ceres Seq. ID no. 12327509
  misc_feature (1)..(924): Ortholog of  Ceres SEQ ID NO 14311392 as cited in SEQ ID NO 58307
  misc_feature (1)..(924): Ortholog of  Ceres SEQ ID NO 13599348 as cited in SEQ ID NO 0
gtcttcgcaaaagaaaattccgaaattgtttcgaaaaatcctgaagaagaagaggtctttgaatcaacaacagttccatgttgtgcccaacgtatacaccaagtgtttaccattttcaaacgcaaaagccagttttccggaaacagaggtttcgggtttgttcatctacttctggtggtgagaatgatagattcaaagtagagtacactccttggcttatcgttgggttgggcaatccaggaaacaagtatcatggaacaagacacaatgttggtttcgagatgatcgatgtgttggctagaaaagaaggggtgttgatgaacactatacagtccaaagctctaatcggaataggtgctattgaagatgtacctatcttgttggctaaacctcagacttatatgaacttcagcggcgaatcggttggatctctagcttcacactatcgagtaccattgcgccacattttaatgatttacgatgagatggctttaccaaatggggttttgagacttcaaccgaaaggaggtcaaggctatcacaacggagtgaagagtgtaatggggcatttggatggtcgtcgaaactttcctcgtttaagcataggcattggtaaaccacctggaaacatggatatgaaagcttttcttcttcagaagtttagtccattggaacagaaacagatcgaggaagcactcgagcaaggaagtgaagcagtgaagactcttgtgcttaatggcttcaatcaaggaatttcgagatttaatcttgtgcagaaatataaattccataaagtatagactccgatttgcaacaaaagcaatcatgtagagattggtttagcactatcattttatcgtctcaagagacactctttcgttacgaagtgtatgaagtttcttagattaatataattcagtctcg

SEQ ID NO: 20862 - protein, 240 aa, Arabidopsis thaliana
  peptide (1)..(240): Ceres Seq. ID no. 12327510
MLCPTYTPSVYHFQTQKPVFRKQRFRVCSSTSGGENDRFKVEYTPWLIVGLGNPGNKYHGTRHNVGFEMIDVLARKEGVLMNTIQSKALIGIGAIEDVPILLAKPQTYMNFSGESVGSLASHYRVPLRHILMIYDEMALPNGVLRLQPKGGQGYHNGVKSVMGHLDGRRNFPRLSIGIGKPPGNMDMKAFLLQKFSPLEQKQIEEALEQGSEAVKTLVLNGFNQGISRFNLVQKYKFHKV

SEQ ID NO: 20863 - protein, 172 aa, Arabidopsis thaliana
  peptide (1)..(172): Ceres Seq. ID no. 12327511
MIDVLARKEGVLMNTIQSKALIGIGAIEDVPILLAKPQTYMNFSGESVGSLASHYRVPLRHILMIYDEMALPNGVLRLQPKGGQGYHNGVKSVMGHLDGRRNFPRLSIGIGKPPGNMDMKAFLLQKFSPLEQKQIEEALEQGSEAVKTLVLNGFNQGISRFNLVQKYKFHKV

SEQ ID NO: 20864 - protein, 160 aa, Arabidopsis thaliana
  peptide (1)..(160): Ceres Seq. ID no. 12327512
MNTIQSKALIGIGAIEDVPILLAKPQTYMNFSGESVGSLASHYRVPLRHILMIYDEMALPNGVLRLQPKGGQGYHNGVKSVMGHLDGRRNFPRLSIGIGKPPGNMDMKAFLLQKFSPLEQKQIEEALEQGSEAVKTLVLNGFNQGISRFNLVQKYKFHKV

SEQ ID NO: 20865 - DNA, 751 bp, Arabidopsis thaliana
  misc_feature (1)..(751): Ceres Seq. ID no. 12562691
  misc_feature (1)..(751): Ortholog of  Ceres SEQ ID NO 12584790 as cited in SEQ ID NO 62648
aaaaagcatagtctctctctctctctctctctcataatacatagaggagaataaaaaaatgatgtgtttccaaaacttcaaagttcgtaaattctttacgtcgaggaactccggtaaagtatctccagacaccgtctcaaaatcagcggagaacagattgtggaaagaatttcaagaaaaagatgacgttctgaagatccatgtgagatcgtggttaccttcgccggaaaatattttccggtgggaagccaccgttagcggcccggtgggttgcccttacgaaaaaggagtcttcaccgtctctgttcacatcccacccaaatatccttatgaaccacccaaaatcacattcaagactaagatttttcatcctaatataagcgaaattggagaaagctttgttgatatattgggatcacgatggtcatcagccttgaccattaacttggtgttgctctctatatgttcgattttatcgaacccggttgaaccgttattggttagcaatcatgccgcgagactgtaccagaaagaccggaaagcttacgagaaagttgcgcgagaatggactttgaagtatgcaaagggatgattagttgttctcaagtttttttgatgtctattgcgattaaactatatgacttctgttttgtttcgtcagtttagtgtcgtgtaaggtcgtttactaccgagagattggatacaatagttgtatttgtattcaagacgtcagcagctgctaaaccttgtt

SEQ ID NO: 20866 - protein, 177 aa, Arabidopsis thaliana
  peptide (1)..(177): Ceres Seq. ID no. 12562692
MMCFQNFKVRKFFTSRNSGKVSPDTVSKSAENRLWKEFQEKDDVLKIHVRSWLPSPENIFRWEATVSGPVGCPYEKGVFTVSVHIPPKYPYEPPKITFKTKIFHPNISEIGESFVDILGSRWSSALTINLVLLSICSILSNPVEPLLVSNHAARLYQKDRKAYEKVAREWTLKYAKG

SEQ ID NO: 20867 - protein, 176 aa, Arabidopsis thaliana
  peptide (1)..(176): Ceres Seq. ID no. 12562693
MCFQNFKVRKFFTSRNSGKVSPDTVSKSAENRLWKEFQEKDDVLKIHVRSWLPSPENIFRWEATVSGPVGCPYEKGVFTVSVHIPPKYPYEPPKITFKTKIFHPNISEIGESFVDILGSRWSSALTINLVLLSICSILSNPVEPLLVSNHAARLYQKDRKAYEKVAREWTLKYAKG

SEQ ID NO: 20868 - DNA, 856 bp, Arabidopsis thaliana
  misc_feature (1)..(856): Ceres Seq. ID no. 12712848
  misc_feature (1)..(856): Ortholog of  Ceres SEQ ID NO 12474478 as cited in SEQ ID NO 96
  misc_feature (1)..(856): Ortholog of  Ceres SEQ ID NO 14309053 as cited in SEQ ID NO 0
atgccttttaattgaaacgcaccacaaatagaacaaagaaccccacacacacaccaatggaaccaaagctaacccatctttgttattgccttctactttttcttccactactctgccaatccaccatagccaaaccttcatcatcaccaaaccctagcagcagcatcaacttcattgtctcatcatgccgcgtcacgcgttaccaaactctctgcgtcaaatgccttgccgcttttgcagacaaaatccgccgcaacgaaaaccagttagctcaaaccgctttagccgttactctagtccgggttcagtccacgacaatctatgtagggaagctgactaaagctaggagaatcaaaaggagagagtacttagccgtgaaggattgtgttgaaaatcttggagacggtttagagatgttggctcagtcgatgagggagttgaagcaagttggtcgatctggtcgtgatcgagacgagttcttgtggagactaagtaacgttgagacttgggttagtgctgccttaacggatgagacaacgtgtctggatgggttcgatggaaaggttatggacggtgtggtaaaatcagcgattagaagaagagtggttcatgtggctcgagttactagtaatgcattggctcttgtaaaccggttcgcggctaggcataagtcatagaatattcggctaataaattaaaattcggtccttaataaggttttgtcatgtattttcttttttgtcctagtgggtgatttgtttctttatgatactttgtatttatgtgtaggcttgggatgtttatgcttttgtcatggtttcgactagagataacgatgattttaacgggtttatgg

SEQ ID NO: 20869 - protein, 206 aa, Arabidopsis thaliana
  peptide (1)..(206): Ceres Seq. ID no. 12712849
MEPKLTHLCYCLLLFLPLLCQSTIAKPSSSPNPSSSINFIVSSCRVTRYQTLCVKCLAAFADKIRRNENQLAQTALAVTLVRVQSTTIYVGKLTKARRIKRREYLAVKDCVENLGDGLEMLAQSMRELKQVGRSGRDRDEFLWRLSNVETWVSAALTDETTCLDGFDGKVMDGVVKSAIRRRVVHVARVTSNALALVNRFAARHKS

SEQ ID NO: 20870 - DNA, 599 bp, Arabidopsis thaliana
  misc_feature (1)..(599): Ceres Seq. ID no. 12334009
  misc_feature (1)..(599): Ortholog of  Ceres SEQ ID NO 13595226 as cited in SEQ ID NO 56331
  misc_feature (1)..(599): Ortholog of  Ceres SEQ ID NO 13661903 as cited in SEQ ID NO 61722
  misc_feature (1)..(599): Ortholog of  Ceres SEQ ID NO 15173940 as cited in SEQ ID NO 61934
accttttcggatcactcacacaacttccaacgatcacacacaaatggcgatgacgtcagcagctaccggatttattctcacggccaacgtcccggcggcaataggcggtggttcttcaaagagcaccaccattgtgtctttcttgccgatgagaagcttcggttcaaggctagtagtcagagcggcggaagatacacctccggcaaccgcctcgtcggatagttcttccaccaccgctgctgctgctccggcgaaagttccggccgctaaggctaaacctcctccaattggcccaaagagaggatccaaggtcaagattctaaggaaagaatcatactggtacaagaacgttggatcagttgtggccgttgatcaggacccgaagacccgatatccggttgtggtccggttcgccaaggtgaattacgcgaatatatcgaccaacaactacgcattggacgaggtggaagaagtaaaatgagagacatggtttatctctaaaccggttcgtctgtttgtaatcttaaacaaaaccgtatgtaccaaaaagttaaccaacaattcatcttttatcttttacaatctcaagatcgatttcc

SEQ ID NO: 20871 - protein, 159 aa, Arabidopsis thaliana
  peptide (1)..(159): Ceres Seq. ID no. 12334010
PFRITHTTSNDHTQMAMTSAATGFILTANVPAAIGGGSSKSTTIVSFLPMRSFGSRLVVRAAEDTPPATASSDSSSTTAAAAPAKVPAAKAKPPPIGPKRGSKVKILRKESYWYKNVGSVVAVDQDPKTRYPVVVRFAKVNYANISTNNYALDEVEEVK

SEQ ID NO: 20872 - protein, 145 aa, Arabidopsis thaliana
  peptide (1)..(145): Ceres Seq. ID no. 12334011
MAMTSAATGFILTANVPAAIGGGSSKSTTIVSFLPMRSFGSRLVVRAAEDTPPATASSDSSSTTAAAAPAKVPAAKAKPPPIGPKRGSKVKILRKESYWYKNVGSVVAVDQDPKTRYPVVVRFAKVNYANISTNNYALDEVEEVK

SEQ ID NO: 20873 - protein, 143 aa, Arabidopsis thaliana
  peptide (1)..(143): Ceres Seq. ID no. 12334012
MTSAATGFILTANVPAAIGGGSSKSTTIVSFLPMRSFGSRLVVRAAEDTPPATASSDSSSTTAAAAPAKVPAAKAKPPPIGPKRGSKVKILRKESYWYKNVGSVVAVDQDPKTRYPVVVRFAKVNYANISTNNYALDEVEEVK

SEQ ID NO: 20874 - DNA, 614 bp, Arabidopsis thaliana
  misc_feature (1)..(614): Ceres Seq. ID no. 13499463
  misc_feature (1)..(614): Ortholog of  Ceres SEQ ID NO 13600048 as cited in SEQ ID NO 377
  misc_feature (1)..(614): Ortholog of  Ceres SEQ ID NO 15173379 as cited in SEQ ID NO 63694
gtcccgaaagtcgcagagcgagctacaagaagaagcgaaacacacccagaagaagaagaagaacaacaacgaagtaaacaatggagtctgagaaaaagatagctcatgagatcggtggtgtcaaaaacgacgctcttcgatttggtcttcacggcgttaagagcaacatcatcggatctcacccactcgaatcgtcatacgaatctgaaaagaaatcgaaagaggcgttgaagaggacggtcattgcgcatgcctacgggactgcacttccgttgaagatggatatggataggcaaattctctcaaggtttcagagacctcctggaccaattccgtcgtcgatgctcggtttagaagtctacacgggagctgtggatgactttggttttgaggattacttgaatgatcctcgtgattccgagacattcaagccggtagacttccaccacgggatggaagttcgtcttggcatctcaaagggaccgatttacccaagtttcatgtaacccttcatgggtggttttttttatcggttgtttttggatcatgactcatcgtgtatgaacttatttcaaccttagacttgtactctctcttgagttaagtttgaaatc

SEQ ID NO: 20875 - protein, 141 aa, Arabidopsis thaliana
  peptide (1)..(141): Ceres Seq. ID no. 13499464
MESEKKIAHEIGGVKNDALRFGLHGVKSNIIGSHPLESSYESEKKSKEALKRTVIAHAYGTALPLKMDMDRQILSRFQRPPGPIPSSMLGLEVYTGAVDDFGFEDYLNDPRDSETFKPVDFHHGMEVRLGISKGPIYPSFM

SEQ ID NO: 20876 - protein, 75 aa, Arabidopsis thaliana
  peptide (1)..(75): Ceres Seq. ID no. 13499465
MDMDRQILSRFQRPPGPIPSSMLGLEVYTGAVDDFGFEDYLNDPRDSETFKPVDFHHGMEVRLGISKGPIYPSFM

SEQ ID NO: 20877 - protein, 73 aa, Arabidopsis thaliana
  peptide (1)..(73): Ceres Seq. ID no. 13499466
MDRQILSRFQRPPGPIPSSMLGLEVYTGAVDDFGFEDYLNDPRDSETFKPVDFHHGMEVRLGISKGPIYPSFM

SEQ ID NO: 20878 - DNA, 855 bp, Arabidopsis thaliana
  misc_feature (1)..(855): Ceres Seq. ID no. 12332387
  misc_feature (1)..(855): Ortholog of  Ceres SEQ ID NO 13624608 as cited in SEQ ID NO 0
atgatgtcctcacaaacttcttcacataacaaactcatcaaacttcctcagcgtttctttttcttacataaacaatttttcttacataaacaaatcttgttgtttgttgttgtcatggcaccgacagttaaaacggcggccgtcaaaaccaacgaaggtaacggagtccgttacagaggagtgaggaagagaccatggggacgttacgcagccgagatcagagatcctttcaagaagtcacgtgtctggctcggtactttcgacactcctgaagaagccgctcgtgcctacgacaaacgtgctattgagtttcgtggagctaaagccaaaaccaacttcccttgttacaacatcaacgcccactgcttgagtttgacacagagcctgagccagagcagcaccgtggaatcatcgtttcctaatctcaacctcggatctgactctgttagttcgagattcccttttcctaagattcaggttaaggctgggatgatggtgttcgatgaaaggagtgaatcggattcttcgtcggtggtgatggatgtcgttagatatgaaggacgacgtgtggttttggacttggatcttaatttccctcctccacctgagaactgattaagatttaattatgattattagatataattaaatgtttctgaattgagtattatttgatcatcatctaagtagaagctttaagtttaagtggtgccaataattttttttttttttttggtcatcagcagatagttttaaagaattttttagtgttgagatcgtgtttcgttcagatctgctgatgttcttttaaatatcattaatgataatcctgatcaactaaaatgatactttgtt

SEQ ID NO: 20879 - protein, 204 aa, Arabidopsis thaliana
  peptide (1)..(204): Ceres Seq. ID no. 12332388
MMSSQTSSHNKLIKLPQRFFFLHKQFFLHKQILLFVVVMAPTVKTAAVKTNEGNGVRYRGVRKRPWGRYAAEIRDPFKKSRVWLGTFDTPEEAARAYDKRAIEFRGAKAKTNFPCYNINAHCLSLTQSLSQSSTVESSFPNLNLGSDSVSSRFPFPKIQVKAGMMVFDERSESDSSSVVMDVVRYEGRRVVLDLDLNFPPPPEN

SEQ ID NO: 20880 - protein, 203 aa, Arabidopsis thaliana
  peptide (1)..(203): Ceres Seq. ID no. 12332389
MSSQTSSHNKLIKLPQRFFFLHKQFFLHKQILLFVVVMAPTVKTAAVKTNEGNGVRYRGVRKRPWGRYAAEIRDPFKKSRVWLGTFDTPEEAARAYDKRAIEFRGAKAKTNFPCYNINAHCLSLTQSLSQSSTVESSFPNLNLGSDSVSSRFPFPKIQVKAGMMVFDERSESDSSSVVMDVVRYEGRRVVLDLDLNFPPPPEN

SEQ ID NO: 20881 - protein, 166 aa, Arabidopsis thaliana
  peptide (1)..(166): Ceres Seq. ID no. 12332390
MAPTVKTAAVKTNEGNGVRYRGVRKRPWGRYAAEIRDPFKKSRVWLGTFDTPEEAARAYDKRAIEFRGAKAKTNFPCYNINAHCLSLTQSLSQSSTVESSFPNLNLGSDSVSSRFPFPKIQVKAGMMVFDERSESDSSSVVMDVVRYEGRRVVLDLDLNFPPPPEN

SEQ ID NO: 20882 - DNA, 1038 bp, Arabidopsis thaliana
  misc_feature (1)..(1038): Ceres Seq. ID no. 13490394
  misc_feature (1)..(1038): Ortholog of  Ceres SEQ ID NO 13494980 as cited in SEQ ID NO 51049
actcttattacttcctaaatccgatcgaaacaactgttgggttagtttctaatttccaagaatggcgcaagatcacgacgagacggagaataaaacctttgccgacgttgtcggtggcgatgatgtcggcgaaattgtcaacggaggaacaaagaatggctatcgtaaaccggactctgtggagaaggaagatgatgaggatttgaagagtctctattccttgatttgtctcacgatcggttcgattatgtttccagattcgaaaaccggtgatgcgtcttcgtttcttgaacgtgtaagaaactccgtcgctgaaaatgggcctaagcttcgagaagcttctgaaagaacaggacgcgagattcttctctggactcgtagaggcagctcgcttcgtgctctgcttgtcatcactatgggaacaatagttcttttgacaacaatggctttggttgtattcacactcttctttgtagctgcaacagccaatgctatcataatctctcttctgatttcacttgctgttgctggtggcttcttggcactcttctttctctgcttgactggtgtttacattggagccttatccgttgctgcattcgtcatctctaccgctacagtttctgctgtcgtttctgtcttaatagcttcaggttggattgggtttttctatgcggtgtggttgggaacaagaggaagcctacgcttggctaagcaatcggtttcagtggtgggatcagccatttcaggtaacactatcagtcgtcatcaacaccaagaccgggaggtaaacatcgaatcaaccaactgagaatccgtccttaccgcgtttgtaaataaaccccgacttttggttgttaatggaagcttgatataaatatgatctatggagtttgttgtgaagaagcagagaaagaatgataagaatatttcaaaatgcaacttgaaacattttgtgatcaatgtctacggatttttggatctatgtatgcatacattgtgtgttttatgtacttaagaaagaataatgatcagtag

SEQ ID NO: 20883 - protein, 249 aa, Arabidopsis thaliana
  peptide (1)..(249): Ceres Seq. ID no. 13490395
MAQDHDETENKTFADVVGGDDVGEIVNGGTKNGYRKPDSVEKEDDEDLKSLYSLICLTIGSIMFPDSKTGDASSFLERVRNSVAENGPKLREASERTGREILLWTRRGSSLRALLVITMGTIVLLTTMALVVFTLFFVAATANAIIISLLISLAVAGGFLALFFLCLTGVYIGALSVAAFVISTATVSAVVSVLIASGWIGFFYAVWLGTRGSLRLAKQSVSVVGSAISGNTISRHQHQDREVNIESTN

SEQ ID NO: 20884 - protein, 187 aa, Arabidopsis thaliana
  peptide (1)..(187): Ceres Seq. ID no. 13490396
MFPDSKTGDASSFLERVRNSVAENGPKLREASERTGREILLWTRRGSSLRALLVITMGTIVLLTTMALVVFTLFFVAATANAIIISLLISLAVAGGFLALFFLCLTGVYIGALSVAAFVISTATVSAVVSVLIASGWIGFFYAVWLGTRGSLRLAKQSVSVVGSAISGNTISRHQHQDREVNIESTN

SEQ ID NO: 20885 - protein, 131 aa, Arabidopsis thaliana
  peptide (1)..(131): Ceres Seq. ID no. 13490397
MGTIVLLTTMALVVFTLFFVAATANAIIISLLISLAVAGGFLALFFLCLTGVYIGALSVAAFVISTATVSAVVSVLIASGWIGFFYAVWLGTRGSLRLAKQSVSVVGSAISGNTISRHQHQDREVNIESTN

SEQ ID NO: 20886 - DNA, 1179 bp, Arabidopsis thaliana
  misc_feature (1)..(1179): Ceres Seq. ID no. 12377405
  misc_feature (1)..(1179): Ortholog of  Ceres SEQ ID NO 13581848 as cited in SEQ ID NO 51340
  misc_feature (1)..(1179): Ortholog of  Ceres SEQ ID NO 13595392 as cited in SEQ ID NO 56164
  misc_feature (1)..(1179): Ortholog of  Ceres SEQ ID NO 14316412 as cited in SEQ ID NO 59209
  misc_feature (1)..(1179): Ortholog of  Ceres SEQ ID NO 12618341 as cited in SEQ ID NO 64256
ctctctctctctctctctctctctctctctcttgtattatttctatctcccccgccgtcgaaagagaaacgtcgatcggagaacctttgaaatgtcgactggattagatatgtctctcgacgacatgatcgccaagaaccgtaagtctcgtggtggagccggccccgctcgtggaaccggatccggatccggaccgggtccgactcgccgcaacaaccctaatcggaaatcaacccgatctgctccataccaatcagccaaggcgccggagtccacctggggtcacgacatgttctccgatagatctgaagatcaccgatcgggacgttcctccgccggaatcgaaactggaaccaagctctacatttccaatttggattacggtgtcatgaacgaagacatcaaggaactgtttgctgaagttggagaacttaaacgctacacagttcattttgatagaagtggaagatcaaagggaactgctgaagtagtgtattctcggcgtggcgatgcactcgcagctgtgaagaagtataatgatgttcagctggatggaaaacccatgaagatagagattgtgggcactaatcttcaaactgctgcagccccgtctggtagacctgcgaatggaaactccaatggtgctccatggagaggaggacaagggagaggaggtcaacaacgaggtggtggacgaggaggcggtggccgaggtggtggtggtcgtggtaggcgtcctggtaagggccctgcagagaagatttctgcggaagatcttgatgcggatcttgataagtaccattctggagatatggagacaaactaaggaacgtgactgatcttctcaaaccggtaggggttttaggaggaagagaatcgagaaaatgtttgccagaggctttaccacttagcgcctttttggctgtgttgttcatttgtttcattagaatgactttacagaattgagaatatgtgttatttaaagttgttgtctatcttaataccctcaagtgaaaggcagaggaaggaataccaatttcgtttacagatcatatgcaggcaaaagagttttcagaaatcaggtttagttacttgtattgtgtctcttatccaagccatgccttgtggtattatgagcgcagaattttgattgaatattgttcatttgcattaaagtat

SEQ ID NO: 20887 - protein, 274 aa, Arabidopsis thaliana
  peptide (1)..(274): Ceres Seq. ID no. 12377406
SLSLSLSLSLLYYFYLPRRRKRNVDRRTFEMSTGLDMSLDDMIAKNRKSRGGAGPARGTGSGSGPGPTRRNNPNRKSTRSAPYQSAKAPESTWGHDMFSDRSEDHRSGRSSAGIETGTKLYISNLDYGVMNEDIKELFAEVGELKRYTVHFDRSGRSKGTAEVVYSRRGDALAAVKKYNDVQLDGKPMKIEIVGTNLQTAAAPSGRPANGNSNGAPWRGGQGRGGQQRGGGRGGGGRGGGGRGRRPGKGPAEKISAEDLDADLDKYHSGDMETN

SEQ ID NO: 20888 - protein, 244 aa, Arabidopsis thaliana
  peptide (1)..(244): Ceres Seq. ID no. 12377407
MSTGLDMSLDDMIAKNRKSRGGAGPARGTGSGSGPGPTRRNNPNRKSTRSAPYQSAKAPESTWGHDMFSDRSEDHRSGRSSAGIETGTKLYISNLDYGVMNEDIKELFAEVGELKRYTVHFDRSGRSKGTAEVVYSRRGDALAAVKKYNDVQLDGKPMKIEIVGTNLQTAAAPSGRPANGNSNGAPWRGGQGRGGQQRGGGRGGGGRGGGGRGRRPGKGPAEKISAEDLDADLDKYHSGDMETN

SEQ ID NO: 20889 - protein, 238 aa, Arabidopsis thaliana
  peptide (1)..(238): Ceres Seq. ID no. 12377408
MSLDDMIAKNRKSRGGAGPARGTGSGSGPGPTRRNNPNRKSTRSAPYQSAKAPESTWGHDMFSDRSEDHRSGRSSAGIETGTKLYISNLDYGVMNEDIKELFAEVGELKRYTVHFDRSGRSKGTAEVVYSRRGDALAAVKKYNDVQLDGKPMKIEIVGTNLQTAAAPSGRPANGNSNGAPWRGGQGRGGQQRGGGRGGGGRGGGGRGRRPGKGPAEKISAEDLDADLDKYHSGDMETN

SEQ ID NO: 20890 - DNA, 1007 bp, Arabidopsis thaliana
  misc_feature (1)..(1007): Ceres Seq. ID no. 12325471
  misc_feature (1)..(1007): Ortholog of  Ceres SEQ ID NO 13583434 as cited in SEQ ID NO 62329
agaaacctcttcttcttcaatttcacagcttcacgtcgtcgtctttgagtcgccggagctgtagctactgatttggtaccagaaagagagtgcgacggtggacgatgacgctttttcacttcttcaactgtgcgattctcacattcggtcctcacgcggtctactactccgccactcccttatctgaatatgatacacttggaacctccgtgaaagctgctgttgtttaccttgctactgcattggttaagcttgtttgtttggcgacttttctgcaagtgtctgagactgaagtgtttgacccataccaggaagcattgaaagcgatgattggattcatagatgtcgctggtctgtattatgctctggcccagctgactcacaggaacatctcccaaaaccataagtttcaggctgttggtctcgggtgggcattcgcggattctgttttgcacaggttggcacctctctgggttggtgctcgaggactggagttcacttgggattatgttttgcaagggcttgaagccaatgcaaatctggtgttcacgatatctctagctgcactaggttcattaatgtggctacgcaagaacaagccgaagagtctgatccccatcatatacacatgtgcagtcatcattgcgacaatgccttcgatcacaagctatctaaagagagtcaatggatggcatttcccgaaaattgttgggtttgagctggcgacttctctggtaatggcttttatcagttgtcaactcttcatcctctgtcagagaccgtctttgtgagtgattccacttcccagcagagctttttgttaatgggaaactcttgcgacgcacttgccttgttttctgcaggactcggttccatggaaactttgatctttcccatctttatttgtagaagaatattgaaccatcctttcataacttattgatttgggaagtgtcattcgttagagcatagacttagaatcataattactaagagatgtttatctc

SEQ ID NO: 20891 - protein, 228 aa, Arabidopsis thaliana
  peptide (1)..(228): Ceres Seq. ID no. 12325472
MTLFHFFNCAILTFGPHAVYYSATPLSEYDTLGTSVKAAVVYLATALVKLVCLATFLQVSETEVFDPYQEALKAMIGFIDVAGLYYALAQLTHRNISQNHKFQAVGLGWAFADSVLHRLAPLWVGARGLEFTWDYVLQGLEANANLVFTISLAALGSLMWLRKNKPKSLIPIIYTCAVIIATMPSITSYLKRVNGWHFPKIVGFELATSLVMAFISCQLFILCQRPSL

SEQ ID NO: 20892 - protein, 154 aa, Arabidopsis thaliana
  peptide (1)..(154): Ceres Seq. ID no. 12325473
MIGFIDVAGLYYALAQLTHRNISQNHKFQAVGLGWAFADSVLHRLAPLWVGARGLEFTWDYVLQGLEANANLVFTISLAALGSLMWLRKNKPKSLIPIIYTCAVIIATMPSITSYLKRVNGWHFPKIVGFELATSLVMAFISCQLFILCQRPSL

SEQ ID NO: 20893 - DNA, 757 bp, Arabidopsis thaliana
  misc_feature (1)..(757): Ceres Seq. ID no. 12347035
  misc_feature (1)..(757): Ortholog of  Ceres SEQ ID NO 13599506 as cited in SEQ ID NO 334
  misc_feature (1)..(757): Ortholog of  Ceres SEQ ID NO 15172970 as cited in SEQ ID NO 51736
  misc_feature (1)..(757): Ortholog of  Ceres SEQ ID NO 13598157 as cited in SEQ ID NO 61570
  misc_feature (1)..(757): Ortholog of  Ceres SEQ ID NO 15173774 as cited in SEQ ID NO 61771
  misc_feature (1)..(757): Ortholog of  Ceres SEQ ID NO 15175549 as cited in SEQ ID NO 0
acacccaattcactcacaacctagctagctagtaaacagtattttctatataccaaaaatggcttcaagttccatagctcttttcttggctctcaatcttctctttttcacaacaatctccgcctgtggtagctgtactccgtgcggcggaggttgcccctctcccaagccaaagccaactcctaaaccaaccccaagccctagctctggctcgagcaagtgccctaaagacaccctcaagctcggtgtctgcgctaatgtgctcaacggcctcctggacttgacccttggcaagccaccggtcgagccatgctgcagcctcatccaaggactcgctgatgttgaggcagccgtttgtctctgcaccgctcttaaggctaacattcttggaatcaacttgaacctcccaatatctttaagtctactccttaatgtttgcagcaaacaacttcctcctggcttccaatgctaaaaaccatattgatatataatttaaatacacttatgtgtgtattaatttatcttcttgttttaaagagacagggtgattctctatactcttatattgtgtctttatatatcttgatctgtggtttcttctactctgcttgctctggtgttcattggggtgatccgtaagattcctgaagtttacagtttcattatttcctattatatatactcttaccattgggggtattgttgtattggtttgtattatgattctatgaattaataagaatttaacttttatgtt

SEQ ID NO: 20894 - protein, 137 aa, Arabidopsis thaliana
  peptide (1)..(137): Ceres Seq. ID no. 12347036
MASSSIALFLALNLLFFTTISACGSCTPCGGGCPSPKPKPTPKPTPSPSSGSSKCPKDTLKLGVCANVLNGLLDLTLGKPPVEPCCSLIQGLADVEAAVCLCTALKANILGINLNLPISLSLLLNVCSKQLPPGFQC

SEQ ID NO: 20895 - DNA, 809 bp, Arabidopsis thaliana
  misc_feature (1)..(809): Ceres Seq. ID no. 13490058
  misc_feature (1)..(809): Ortholog of  Ceres SEQ ID NO 13598227 as cited in SEQ ID NO 61591
  misc_feature (1)..(809): Ortholog of  Ceres SEQ ID NO 12584790 as cited in SEQ ID NO 62648
agcattcctgtttgcaagagaatcacaaatctttgcttacggttcacgctttaaaaacacaactctcattctccttctcttcacaaaccactcatattttttttcacatacttctttgtagtgctactttccattatatcaaacactcagcaacctgatggcaacgagacggatattgaaagaattgaaggagttgcaaagagaccctcctgtatcatgcagtgcaggtccaacaggagaagatatgttccactggcaagctactataatgggtccgaatgaaagtccttactccggaggtgttttccttgtcaatattcatttccctcctgattatccttttaaacctcccaaggttgtattcagaaccaaagtgtttcacccaaacatcaacagtaatggaaacatatgtttggacattctcaaagaccaatggagccctgcccttaccatttctaaggtgcttctctctatatgctctcttctaacagatccaaaccctgacgaccctctggtgccagagatagctcacatatacaaaactgacaagaccaaatatgaagccatggctcgaagctggacccagaagtatgccttgttttaaagctcacaattcctctttttttcctttttattttggtttggtcttatttgtaataaaaaaagaagaagaagaaattgttataattttaatacaaacatatataatatataaagtagagttttcaaagttgttaactcatatgattgatgagatatcgacatgtattaaatctaattttgttaatatataaaaaatcttctaactc

SEQ ID NO: 20896 - protein, 148 aa, Arabidopsis thaliana
  peptide (1)..(148): Ceres Seq. ID no. 13490059
MATRRILKELKELQRDPPVSCSAGPTGEDMFHWQATIMGPNESPYSGGVFLVNIHFPPDYPFKPPKVVFRTKVFHPNINSNGNICLDILKDQWSPALTISKVLLSICSLLTDPNPDDPLVPEIAHIYKTDKTKYEAMARSWTQKYALF

SEQ ID NO: 20897 - protein, 119 aa, Arabidopsis thaliana
  peptide (1)..(119): Ceres Seq. ID no. 13490060
MFHWQATIMGPNESPYSGGVFLVNIHFPPDYPFKPPKVVFRTKVFHPNINSNGNICLDILKDQWSPALTISKVLLSICSLLTDPNPDDPLVPEIAHIYKTDKTKYEAMARSWTQKYALF

SEQ ID NO: 20898 - protein, 111 aa, Arabidopsis thaliana
  peptide (1)..(111): Ceres Seq. ID no. 13490061
MGPNESPYSGGVFLVNIHFPPDYPFKPPKVVFRTKVFHPNINSNGNICLDILKDQWSPALTISKVLLSICSLLTDPNPDDPLVPEIAHIYKTDKTKYEAMARSWTQKYALF

SEQ ID NO: 20899 - DNA, 789 bp, Arabidopsis thaliana
  misc_feature (1)..(789): Ceres Seq. ID no. 12393420
  misc_feature (1)..(789): Ortholog of  Ceres SEQ ID NO 15172783 as cited in SEQ ID NO 52143
  misc_feature (1)..(789): Ortholog of  Ceres SEQ ID NO 13599514 as cited in SEQ ID NO 0
agggattctagggctttccttcattggtcagatcagacgacgttttacatcttcttcttcttcctcttcgatattcgtcagtgtgtgtattttggggaaaactttgtgagcaaagagcgagaaaatgagcggagccggtaagaaaatcgcggatgtggctttcaaagcttcgaggactatcgattgggatggtatggctaaggtccttgtcacagatgaggctcgtagagagttctctaaccttcgtcgtgctttcgatgaggttaacacacagctccagaccaaatttagtcaggaacctgaacccatagattgggattactataggaagggtattggagctggcattgttgacaagtacaaggaagcttatgacagcattgagattccaaagtacgttgacaaagttactcctgaatacaagccaaagtttgatgctttgttggtggaactgaaagaagcagaacagaaatcgctcaaggagtctgaacggttggagaaagaaattgctgatgtccaagagatcagcaaaaagctcagcaccatgactgcagatgagtactttgagaagcacccggaactcaaaaagaagtttgatgacgaaatccgtaatgacaactggggatactgatcatgtttctccatctccggcttggaaagaaaactctctttctctttctctgttctcttactgtgattttgtgagccaatcataacaataataagtacaccattcacttaagcagtgttgagatcttcattccaaggaagataaacgcatttggtttt

SEQ ID NO: 20900 - protein, 168 aa, Arabidopsis thaliana; identical to SEQ ID NO: 20821
  peptide (1)..(168): Ceres Seq. ID no. 12393421

SEQ ID NO: 20901 - protein, 145 aa, Arabidopsis thaliana; identical to SEQ ID NO: 20822
  peptide (1)..(145): Ceres Seq. ID no. 12393422

SEQ ID NO: 20902 - DNA, 712 bp, Arabidopsis thaliana
  misc_feature (1)..(712): Ceres Seq. ID no. 12333121
  misc_feature (1)..(712): Ortholog of  Ceres SEQ ID NO 12329459 as cited in SEQ ID NO 20533
ccgtcaaattcaattgatcctctctccaaatcatcttaaaagtatcttcttcttctccatctggtttattgttcgatcgtcaattcaattgattgatttggaaatctagcgtttctgttcgttaccattcactgaataatttattttctgttcttcacagtcacagatctttgggtatcaagtaaaactgtgaagtgatgtcgggaagaggaaagggaggaaaaggattgggaaagggaggagcgaagaggcacaggaaggttctgagggataacattcaaggaatcaccaagcctgccattcgtcgtcttgctcgtagaggtggtgtcaagcgtatcagtggtctcatctacgaagagaccagaggtgtcctcaagatcttcctcgagaatgtcatccgtgacgccgttacttacactgagcacgctagaaggaagacggtgaccgccatggatgttgtctacgctttgaagaggcaaggtcgtactctctacggtttcggaggttaatccgatttgggggattagggtttatgcaagtttggggatttcttcttgtttctgagatctgtgttaaatggtttgaattagtctaaagtaaatctaggagtgttagctactgcttttgttttctattgtgatgtcgttgttagccaatgcggtgtagttgaaaatctttgcaaacttaaagctaagaaaatctaatgaggatg

SEQ ID NO: 20903 - protein, 103 aa, Arabidopsis thaliana; identical to SEQ ID NO: 7737
  peptide (1)..(103): Ceres Seq. ID no. 12333122

SEQ ID NO: 20904 - DNA, 580 bp, Arabidopsis thaliana
  misc_feature (1)..(580): Ceres Seq. ID no. 12322761
  misc_feature (1)..(580): Ortholog of  Ceres SEQ ID NO 12563124 as cited in SEQ ID NO 57104
  misc_feature (1)..(580): Ortholog of  Ceres SEQ ID NO 12617639 as cited in SEQ ID NO 65219
acataagtctctctcttacattttgaaaccctaatttctcaaaaaaaatgtctgaagttgagtaccggtgctttgtcggcggccttgcctgggccaccaatgatgaagatcttcaaaggacgttctcacagttcggcgacgttatcgattctaagatcattaacgaccgcgagagtggaagatcaaggggattcggattcgtcaccttcaaggacgagaaagccatgagggatgcgattgaagagatgaacggtaaagagctcgatggacgtgtcatcaccgtgaacgaggctcagtcgagaggtagcggcggtggcggaggaggttacggatctggtggaggcggtggtggccgaggatacggtggtggtggacgccgtgagggaggtggctacggaggcggtgatggtggaagttacggcggcggtggtggcggctggtaatcaaagatagagttgtttgcgtgctgctgctctgtttttggtttagatttggatttgtgtcaccacttctggtttggttatcgttcgtttggtttacttttttgatgaaacagtttcatttaagtcttctttgtctg

SEQ ID NO: 20905 - protein, 131 aa, Arabidopsis thaliana
  peptide (1)..(131): Ceres Seq. ID no. 12322762
MSEVEYRCFVGGLAWATNDEDLQRTFSQFGDVIDSKIINDRESGRSRGFGFVTFKDEKAMRDAIEEMNGKELDGRVITVNEAQSRGSGGGGGGYGSGGGGGGRGYGGGGRREGGGYGGGDGGSYGGGGGGW

SEQ ID NO: 20906 - protein, 72 aa, Arabidopsis thaliana
  peptide (1)..(72): Ceres Seq. ID no. 12322763
MRDAIEEMNGKELDGRVITVNEAQSRGSGGGGGGYGSGGGGGGRGYGGGGRREGGGYGGGDGGSYGGGGGGW

SEQ ID NO: 20907 - protein, 65 aa, Arabidopsis thaliana
  peptide (1)..(65): Ceres Seq. ID no. 12322764
MNGKELDGRVITVNEAQSRGSGGGGGGYGSGGGGGGRGYGGGGRREGGGYGGGDGGSYGGGGGGW

SEQ ID NO: 20908 - DNA, 611 bp, Arabidopsis thaliana
  misc_feature (1)..(611): Ceres Seq. ID no. 12673265
  misc_feature (1)..(611): Ortholog of  Ceres SEQ ID NO 13600689 as cited in SEQ ID NO 0
tcctcttcttcttctacaatcaaaattcatttttttttcctctgatcatcatcgaaccctagtttcgtcttttggatactaaccgaatcatcatggagaagaactccttcaagctttctaatcctctggagatgagaatggctgagtctactcgtatcagagcgaaataccctgaaagagttcccgtgattgtggaaaaagctggacagagtgatgttcctgacattgacaagaagaagtatcttgtaccagctgatctaaccattggccaatttgtgtacgttgtgaggaaaagaatcaagcttggagctgaaaaagccatctttgtctttgtcaagaacacattaccaccaactgcggcattgatgtctgcaatctacgaagaacacaaagacgaagacgggtttctctacatgacatacagtggagagaacacatttggtggatctttctactgctaattacctcagcttctacgtctgatcctcttgatgattgtacattctcgtcgaccttaataatgtcattttactttcttggtttaaccttttgagctctcttactatctcttgcatttgaagatggtatttgaaacaagattctaatttgac

SEQ ID NO: 20909 - protein, 122 aa, Arabidopsis thaliana
  peptide (1)..(122): Ceres Seq. ID no. 12673266
MEKNSFKLSNPLEMRMAESTRIRAKYPERVPVIVEKAGQSDVPDIDKKKYLVPADLTIGQFVYVVRKRIKLGAEKAIFVFVKNTLPPTAALMSAIYEEHKDEDGFLYMTYSGENTFGGSFYC

SEQ ID NO: 20910 - protein, 109 aa, Arabidopsis thaliana
  peptide (1)..(109): Ceres Seq. ID no. 12673267
MRMAESTRIRAKYPERVPVIVEKAGQSDVPDIDKKKYLVPADLTIGQFVYVVRKRIKLGAEKAIFVFVKNTLPPTAALMSAIYEEHKDEDGFLYMTYSGENTFGGSFYC

SEQ ID NO: 20911 - protein, 107 aa, Arabidopsis thaliana
  peptide (1)..(107): Ceres Seq. ID no. 12673268
MAESTRIRAKYPERVPVIVEKAGQSDVPDIDKKKYLVPADLTIGQFVYVVRKRIKLGAEKAIFVFVKNTLPPTAALMSAIYEEHKDEDGFLYMTYSGENTFGGSFYC

SEQ ID NO: 20912 - DNA, 690 bp, Arabidopsis thaliana
  misc_feature (1)..(690): Ceres Seq. ID no. 13580505
  misc_feature (1)..(690): Ortholog of  Ceres SEQ ID NO 15224680 as cited in SEQ ID NO 59829
  misc_feature (1)..(690): Ortholog of  Ceres SEQ ID NO 13594273 as cited in SEQ ID NO 60013
ttggagaaaataaatatagaagaaagcctctctgctcgttttgcgtttccgagcaacaatgtcggtaactttgcacacgaacctgggtgacatcaagtgcgaaatcttctgtgacgaggttcccaagagtgctgagaactttttggcgttgtgtgctagtggctactacgatggtactatctttcatagaaatatcaaagggttcatgattcaaggaggagaccccaaggggaccggaaaaggaggaactagcatctggggcaagaaattcaatgatgagatccgagactcccttaagcacaatgcaagagggatgctgtcaatggcaaacagcggtccaaacaccaacggaagccagttcttcataacctatgcaaaacaaccacatctcaatggattatacaccatctttggcaaagtcattcatggcttcgaagtgcttgacattatggaaaagactcaaacaggaccaggagataggccgcttgctgagataaggctaaaccgtgtgacgatccacgccaatccacttgctggttaagtctaatgtggcagaaccgagccaagccaaaagtgttgttctctttatttgtttcgatagagctgacatgtacactcagaaactgaactaagaccactgtttcacccaattaaaaagtttgtactggaggatttaccaattactgtctt

SEQ ID NO: 20913 - protein, 160 aa, Arabidopsis thaliana
  peptide (1)..(160): Ceres Seq. ID no. 13580506
MSVTLHTNLGDIKCEIFCDEVPKSAENFLALCASGYYDGTIFHRNIKGFMIQGGDPKGTGKGGTSIWGKKFNDEIRDSLKHNARGMLSMANSGPNTNGSQFFITYAKQPHLNGLYTIFGKVIHGFEVLDIMEKTQTGPGDRPLAEIRLNRVTIHANPLAG

SEQ ID NO: 20914 - protein, 111 aa, Arabidopsis thaliana
  peptide (1)..(111): Ceres Seq. ID no. 13580507
MIQGGDPKGTGKGGTSIWGKKFNDEIRDSLKHNARGMLSMANSGPNTNGSQFFITYAKQPHLNGLYTIFGKVIHGFEVLDIMEKTQTGPGDRPLAEIRLNRVTIHANPLAG

SEQ ID NO: 20915 - DNA, 688 bp, Arabidopsis thaliana
  misc_feature (1)..(688): Ceres Seq. ID no. 12340083
  misc_feature (1)..(688): Ortholog of  Ceres SEQ ID NO 14304941 as cited in SEQ ID NO 53358
  misc_feature (1)..(688): Ortholog of  Ceres SEQ ID NO 15176197 as cited in SEQ ID NO 58416
tccgtcaaccctacaaagtcctttgcgacggcactttcgtccaccatcttgtcactaatgagatcactcccgccgacactgctgtctctgaactcctcggaggtcccgtcaagctcttcaccaccagatgtgtgattgcggagttggagaaactgggtaaagattttgcggaatctctcgaagctgcccagacgcttaatacagcaacatgtgagcacgaggaggcaaaaacagcagacgagtgtttgtcagaggtaataggggtacaaaatactgagcatttcttccttggtactcaggacgcggagtttaggagaaagcttcagcaggagtctatcgttcctcttgtgtttggtctaaggaacatactgctgattgatcaaccttctgatttccaacgtcagagtgccaaagactctgaaaataagcgcttaactatgaccgatacggaaaaaaagttgttggtgaaacagactgcgaaaatcatagcttctaatagaaaagaagcaacaattgcaaatgaagaatggggaatgcctcgagtagtttctacaaaaaatggacttggtgtgaaggatagacctcagttcaagcgaaatagagccaagggtccaaacccactttcatgcatgaagaaaaagaaggagaatcctcaatccaaatccaaagccgattctaactctaatgc

SEQ ID NO: 20916 - protein, 228 aa, Arabidopsis thaliana
  peptide (1)..(228): Ceres Seq. ID no. 12340084
RQPYKVLCDGTFVHHLVTNEITPADTAVSELLGGPVKLFTTRCVIAELEKLGKDFAESLEAAQTLNTATCEHEEAKTADECLSEVIGVQNTEHFFLGTQDAEFRRKLQQESIVPLVFGLRNILLIDQPSDFQRQSAKDSENKRLTMTDTEKKLLVKQTAKIIASNRKEATIANEEWGMPRVVSTKNGLGVKDRPQFKRNRAKGPNPLSCMKKKKENPQSKSKADSNSN

SEQ ID NO: 20917 - DNA, 1526 bp, Arabidopsis thaliana
  misc_feature (1)..(1526): Ceres Seq. ID no. 12326423
  misc_feature (1)..(1526): Ortholog of  Ceres SEQ ID NO 15180036 as cited in SEQ ID NO 0
aaagaaggaaaaaatataaagtttcctttccctctcgttcgttggctttgccttcccgagagagaaagataagatttggttttgcattcctcttctctctcgccgctctcaatatgcttcgatttctattctcctcttcctcttgattttgtcttcttctctttgctgcggagagattaagaaacccaagggttttaagcaagagacgcggcgaggaagctatccagaactctctgaaacatccattcctttttctcatggacgtagtgttgccggaaactgccgtggtaaccggtggttcggttatcggagattatggatttaatgtggatccttttctcgttgaggcgttgcacaactctcgccatcgtctcacgattttgcggatggaacttgatgttcaaaggttgttgcagaaccctgaacagcagcagtttgagttccagcattttcctacttcgtatcttcgtcttgcagcccatcgtgttgctaaccattatgggctagctacagctgtccaagagagtggtgctgatggaaatgaaaacagaatccttgtgacgaaaactacagagagcaaatttcctgctgttcggttgtctgaaatcccggtggctaaacaatcagaaaatggtaagtttgagagcaggaaagtttccatcaagactcgaccttctaaaggatctggatatggcgctggtgatctggaaaagaatcgtggtcctcttagaagtgttgaagagaggaaagaagagtatgacaaggctcgagaacgcatattcagtggtcttactggtcttagttgtgatgactcttcatctgaaactcaggtgtatgagaggaatgcaagtcttagcagagatgacaagcaagtatctaagaatgcttacgttgaggtcaagaagaacttaagcatcagggaaagtggtccaacatctcgtgttgcaatatttagagacagagagaaagatcggtttgaccctgattatgaccgcagacaccaaaggtacattaggagccttccggtgaatcagaacttcaatctaccacccttcaacattcagcaaataccgacaccatactacgaaatgggattcactggatataaccaaattccaagtcctcctgctcctcttggcttcggaccacatcctagctcaatcatgagtccctatggcaccacaatggatgcaatgtatatgcattggcctaatgcagctatgatgtatgctcatccgtatgagcagttcaggaatggctctcttcaggcacagttcgttcaacaacccttgagcttcgactacatgcagaaccgctaggtgcttgcctctttgtcgatctttatctctgtttaccatttttttttgtagaacctaggaactgttgtaatggaaattttggagttgtaatgtcaaaattcagaatgaagagaccttttgttccttttacaattatcagattctgtctattatggaaaaccaatgaactacctgtgggtcaaatcttcatcgaaattctctgttttg

SEQ ID NO: 20918 - protein, 353 aa, Arabidopsis thaliana
  peptide (1)..(353): Ceres Seq. ID no. 12326424
MDVVLPETAVVTGGSVIGDYGFNVDPFLVEALHNSRHRLTILRMELDVQRLLQNPEQQQFEFQHFPTSYLRLAAHRVANHYGLATAVQESGADGNENRILVTKTTESKFPAVRLSEIPVAKQSENGKFESRKVSIKTRPSKGSGYGAGDLEKNRGPLRSVEERKEEYDKARERIFSGLTGLSCDDSSSETQVYERNASLSRDDKQVSKNAYVEVKKNLSIRESGPTSRVAIFRDREKDRFDPDYDRRHQRYIRSLPVNQNFNLPPFNIQQIPTPYYEMGFTGYNQIPSPPAPLGFGPHPSSIMSPYGTTMDAMYMHWPNAAMMYAHPYEQFRNGSLQAQFVQQPLSFDYMQNR

SEQ ID NO: 20919 - protein, 310 aa, Arabidopsis thaliana
  peptide (1)..(310): Ceres Seq. ID no. 12326425
MELDVQRLLQNPEQQQFEFQHFPTSYLRLAAHRVANHYGLATAVQESGADGNENRILVTKTTESKFPAVRLSEIPVAKQSENGKFESRKVSIKTRPSKGSGYGAGDLEKNRGPLRSVEERKEEYDKARERIFSGLTGLSCDDSSSETQVYERNASLSRDDKQVSKNAYVEVKKNLSIRESGPTSRVAIFRDREKDRFDPDYDRRHQRYIRSLPVNQNFNLPPFNIQQIPTPYYEMGFTGYNQIPSPPAPLGFGPHPSSIMSPYGTTMDAMYMHWPNAAMMYAHPYEQFRNGSLQAQFVQQPLSFDYMQNR

SEQ ID NO: 20920 - DNA, 1424 bp, Arabidopsis thaliana
  misc_feature (1)..(1424): Ceres Seq. ID no. 13580799
  misc_feature (1)..(1424): Ortholog of  Ceres SEQ ID NO 15168521 as cited in SEQ ID NO 58180
aattgataatttgttacactagttgtgaattgagtttcttggttctttcattaattttgatttggttttgtagcctacgaattcgaatcatcagcatcatcttcaacaccagcttaacgaaaatggaagtataataagtggccacggactagtactctctcaccaacttccacctctccaagcaaaccctaaccctaaccaccaccatgtcgctacctctgctggtcttccgtcaaggatgggtggatcgatggcggagagagcaaggcaggccaacattcctccactagcgggacccctaaagtgtcctcgatgcgactccagcaacactaagttctgttactacaacaactataacctcactcagcctcgtcacttctgcaaaggttgccgtcgctactggacacaagggggcgccctgagaaacgtccctgtaggtggaggctgccggaggaataacaagaagggcaaaaatggaaatttaaaatcttcttcttcttcgtccaaacagtcttcctcggtcaacgctcaaagtcctagctcaggacagctaaggacaaatcatcagttccctttttcaccaactctttacaatctcactcaactcggaggtattggtttgaacttagccgctactaatggcaacaaccaagctcaccagatcggttccagtttgatgatgagcgatctagggtttctccatggacgaaatacttcaactccgatgacgggaaacattcatgaaaacaacaacaataataacaatgaaaacaacctaatggcatccgttggatctttgagcccctttgctctcttcgatccaacgacggggctatacgctttccagaacgacggtaatatcgggaacaacgttgggatatctggttcttctacttccatggttgattctagggtttatcagacgcctccggtgaagatggaagaacaacctaatttggctaacttgtctagaccggtctccggtttgacgtctcctgggaatcaaacaaatcagtacttttggcctggttcggatttctcgggtccttctaatgatctcttgtgagatttttgtgtgttttgtcggatcattaacgtatgttacgacttacgacgtggagattgattaaaaggactaccaacggtcaggattaactgcatgcatagtctgtgctcaagacgatgatcgtggagaagtacaaggacaaactaaaaggtatcttaattagagattgtggttttacaacttaaattcgatacttatttatataatcaggtgtgtcatataatttgtttgtattgcgtgatttcatggttgatctgatttctcaagttgctatatatgcctcaatacatgtgtgtaacagtccaatttgtatactctttagactgaattttatcgaatatataatatttttcagttt

SEQ ID NO: 20921 - protein, 275 aa, Arabidopsis thaliana
  peptide (1)..(275): Ceres Seq. ID no. 13580800
MGGSMAERARQANIPPLAGPLKCPRCDSSNTKFCYYNNYNLTQPRHFCKGCRRYWTQGGALRNVPVGGGCRRNNKKGKNGNLKSSSSSSKQSSSVNAQSPSSGQLRTNHQFPFSPTLYNLTQLGGIGLNLAATNGNNQAHQIGSSLMMSDLGFLHGRNTSTPMTGNIHENNNNNNNENNLMASVGSLSPFALFDPTTGLYAFQNDGNIGNNVGISGSSTSMVDSRVYQTPPVKMEEQPNLANLSRPVSGLTSPGNQTNQYFWPGSDFSGPSNDLL

SEQ ID NO: 20922 - protein, 271 aa, Arabidopsis thaliana
  peptide (1)..(271): Ceres Seq. ID no. 13580801
MAERARQANIPPLAGPLKCPRCDSSNTKFCYYNNYNLTQPRHFCKGCRRYWTQGGALRNVPVGGGCRRNNKKGKNGNLKSSSSSSKQSSSVNAQSPSSGQLRTNHQFPFSPTLYNLTQLGGIGLNLAATNGNNQAHQIGSSLMMSDLGFLHGRNTSTPMTGNIHENNNNNNNENNLMASVGSLSPFALFDPTTGLYAFQNDGNIGNNVGISGSSTSMVDSRVYQTPPVKMEEQPNLANLSRPVSGLTSPGNQTNQYFWPGSDFSGPSNDLL

SEQ ID NO: 20923 - DNA, 1256 bp, Arabidopsis thaliana
  misc_feature (1)..(1256): Ceres Seq. ID no. 13486719
  misc_feature (1)..(1256): Ortholog of  Ceres SEQ ID NO 13596891 as cited in SEQ ID NO 62868
  misc_feature (1)..(1256): Ortholog of  Ceres SEQ ID NO 12617235 as cited in SEQ ID NO 63990
  misc_feature (1)..(1256): Ortholog of  Ceres SEQ ID NO 13655371 as cited in SEQ ID NO 68945
acactcgtcttaccaaactctctcctacacaaccaaaaccatctctttgcaacaaaacttgttgtaactcatcttcttcttcttcttctccatcacagactcataacaaatgggagaagtttcagtggtggagaacaagaaagtgatactaaagaattatgtagatggtattcctacagaaacagacatggaagtgaaactcggagaaacaattgagctaaaagcaccaaaaggatcttcttgtttcctcgtcaaaaatctatacttgtcttgtgatccttacatgagaggtcgtatgcgtgattttcacggttcctatctcccgccttttgttcctggccaacgtatcgaagggtttggtttagcaagagtgatagattctgatgatactaattataagcccggcgatatagtctctggtatcattggttgggaagaatacagtttgctacgtagttcagataacctacagttgagaaatattcaattagacgacgacattccgctttcttatcatctcggacttctcgggatggctggatttacagcatatgcagggtttaatgagatatgttgtcctaagaaaggggacagtgtttttgtctctgcagcatgtggagcagttggacaacttgttggtcagctagctaagttgcacggctgctatgttgttggtagcgccggtagtaagcaaaaggttgagatccttaaaaacgagcttggatatgatgaagcctttaactacaaggaagaggctgatcttgatactgctttgaagaggtacttcccagaggggatcgatatctacttcgataacgtgggtggatccatgcttgatgcagcactcctcaacatgaaggttcgtggaagaatcgcgctctgtggaatggtgtctttacaaagcctctcaacttcatcacaaggaatcaagaacctatacagcgctatctacaaacgtttaaggctagaagggttcttgcagagtgattaccttcatatcttcccacagtttcttgaaaatgtcaagagatattacaaagaaggcaagattgtctacatcgaagatatatctgaaggcctcgaccatcgctcccgctgcacttgttgggctgttttccgggaaaaatatcggtaaacaggttgttcgggttgctaaagagtgattgtttctaaaaagtatattgtaagtgacttaaaacagacattatatgaaataaagccgccataagtctcttatggaaaaacgttagttaatc

SEQ ID NO: 20924 - protein, 341 aa, Arabidopsis thaliana
  peptide (1)..(341): Ceres Seq. ID no. 13486720
MGEVSVVENKKVILKNYVDGIPTETDMEVKLGETIELKAPKGSSCFLVKNLYLSCDPYMRGRMRDFHGSYLPPFVPGQRIEGFGLARVIDSDDTNYKPGDIVSGIIGWEEYSLLRSSDNLQLRNIQLDDDIPLSYHLGLLGMAGFTAYAGFNEICCPKKGDSVFVSAACGAVGQLVGQLAKLHGCYVVGSAGSKQKVEILKNELGYDEAFNYKEEADLDTALKRYFPEGIDIYFDNVGGSMLDAALLNMKVRGRIALCGMVSLQSLSTSSQGIKNLYSAIYKRLRLEGFLQSDYLHIFPQFLENVKRYYKEGKIVYIEDISEGLDHRSRCTCWAVFREKYR

SEQ ID NO: 20925 - protein, 315 aa, Arabidopsis thaliana
  peptide (1)..(315): Ceres Seq. ID no. 13486721
MEVKLGETIELKAPKGSSCFLVKNLYLSCDPYMRGRMRDFHGSYLPPFVPGQRIEGFGLARVIDSDDTNYKPGDIVSGIIGWEEYSLLRSSDNLQLRNIQLDDDIPLSYHLGLLGMAGFTAYAGFNEICCPKKGDSVFVSAACGAVGQLVGQLAKLHGCYVVGSAGSKQKVEILKNELGYDEAFNYKEEADLDTALKRYFPEGIDIYFDNVGGSMLDAALLNMKVRGRIALCGMVSLQSLSTSSQGIKNLYSAIYKRLRLEGFLQSDYLHIFPQFLENVKRYYKEGKIVYIEDISEGLDHRSRCTCWAVFREKYR

SEQ ID NO: 20926 - protein, 283 aa, Arabidopsis thaliana
  peptide (1)..(283): Ceres Seq. ID no. 13486722
MRGRMRDFHGSYLPPFVPGQRIEGFGLARVIDSDDTNYKPGDIVSGIIGWEEYSLLRSSDNLQLRNIQLDDDIPLSYHLGLLGMAGFTAYAGFNEICCPKKGDSVFVSAACGAVGQLVGQLAKLHGCYVVGSAGSKQKVEILKNELGYDEAFNYKEEADLDTALKRYFPEGIDIYFDNVGGSMLDAALLNMKVRGRIALCGMVSLQSLSTSSQGIKNLYSAIYKRLRLEGFLQSDYLHIFPQFLENVKRYYKEGKIVYIEDISEGLDHRSRCTCWAVFREKYR

SEQ ID NO: 20927 - DNA, 1067 bp, Arabidopsis thaliana
  misc_feature (1)..(1067): Ceres Seq. ID no. 12340120
  misc_feature (1)..(1067): Ortholog of  Ceres SEQ ID NO 14307424 as cited in SEQ ID NO 54228
  misc_feature (1)..(1067): Ortholog of  Ceres SEQ ID NO 13664279 as cited in SEQ ID NO 61603
  misc_feature (1)..(1067): Ortholog of  Ceres SEQ ID NO 13584254 as cited in SEQ ID NO 63465
caaaaaatcgagagagacactgttctcattcattcgcaaattcgttgaccatatttgatagaatcaagcgatgatgaatcttagggttttgttcctcgctctccttctccttgcatctcctctgcttcaagttgctagatgtcaatcggatgccgaggatcattcaagtcttgttgacgatgttgtgggagaaaacactgatgatgcggttgaggaagatgaccatgatttggatatgaacttgtcctcatttccaggagttgagactgtttgtgttttccccaaaaacagtgccaaattggttccagctggagaagagactgagctccttgttggtcttaaaaatgaagggaaaactagagtaggtgtgatgggaattagggccagcgttcatcttccttatgatcataagttgttggttcagaatctaaccatgttgagacttaacaatgcatccatcccaacgtctcttcaagcaacattcccatacatctttgcagtcagccagtacttgcagcctggagcatttgatctggtgggttatatcatatacgatgtggaaggaaagccataccagagtgtcttctacaatggaaccatagaggtagttgaatctggaggtcttctcagcggcgaatctgttttccttttaacactcggaatcggtctcctcctcctcctcggtctatgggcatacagccaagttcagcgtctcaccaagaaaaccaaaaaggtttccaaggtggaagtaggaactaggtctaccgaggcatcactcgatgaatggctcgagggaactactttggccaagacatcgtctgggaaaacaaagaacaagaagaactaaagtagagctgttttgctccttccagttgttatagactcagcttcggcgttttgaaagagtttccaagtttaaagttcagtcttgaggaaatttagggttttaaacgacactttttttgttccagcattgtactctttagacaatctttacttcttgtcataaatattctcctcatgaaacaagttaacttataaatggtttagatctgtttttcgttgcg

SEQ ID NO: 20928 - protein, 258 aa, Arabidopsis thaliana
  peptide (1)..(258): Ceres Seq. ID no. 12340121
MMNLRVLFLALLLLASPLLQVARCQSDAEDHSSLVDDVVGENTDDAVEEDDHDLDMNLSSFPGVETVCVFPKNSAKLVPAGEETELLVGLKNEGKTRVGVMGIRASVHLPYDHKLLVQNLTMLRLNNASIPTSLQATFPYIFAVSQYLQPGAFDLVGYIIYDVEGKPYQSVFYNGTIEVVESGGLLSGESVFLLTLGIGLLLLLGLWAYSQVQRLTKKTKKVSKVEVGTRSTEASLDEWLEGTTLAKTSSGKTKNKKN

SEQ ID NO: 20929 - protein, 257 aa, Arabidopsis thaliana
  peptide (1)..(257): Ceres Seq. ID no. 12340122
MNLRVLFLALLLLASPLLQVARCQSDAEDHSSLVDDVVGENTDDAVEEDDHDLDMNLSSFPGVETVCVFPKNSAKLVPAGEETELLVGLKNEGKTRVGVMGIRASVHLPYDHKLLVQNLTMLRLNNASIPTSLQATFPYIFAVSQYLQPGAFDLVGYIIYDVEGKPYQSVFYNGTIEVVESGGLLSGESVFLLTLGIGLLLLLGLWAYSQVQRLTKKTKKVSKVEVGTRSTEASLDEWLEGTTLAKTSSGKTKNKKN

SEQ ID NO: 20930 - protein, 203 aa, Arabidopsis thaliana
  peptide (1)..(203): Ceres Seq. ID no. 12340123
MNLSSFPGVETVCVFPKNSAKLVPAGEETELLVGLKNEGKTRVGVMGIRASVHLPYDHKLLVQNLTMLRLNNASIPTSLQATFPYIFAVSQYLQPGAFDLVGYIIYDVEGKPYQSVFYNGTIEVVESGGLLSGESVFLLTLGIGLLLLLGLWAYSQVQRLTKKTKKVSKVEVGTRSTEASLDEWLEGTTLAKTSSGKTKNKKN

SEQ ID NO: 20931 - DNA, 1206 bp, Arabidopsis thaliana
  misc_feature (1)..(1206): Ceres Seq. ID no. 13492134
  misc_feature (1)..(1206): Ortholog of  Ceres SEQ ID NO 14310920 as cited in SEQ ID NO 54622
aaataaaacaataaacagtcgaaattctccggcgaagatgagaaccggaaaaggaaatcaagaggaagaagattacggagaagaagactttaactctaaacgtgaaggtccttcttccaacactactgttcatagcaacagagattcaaaggaaaatgataaagctagtgcgatacgttctaaacattcggtcactgagcaacgtagaagaagcaaaatcaatgaaagatttcagatattgagagaactaattcccaacagtgaacaaaaacgtgacactgcttcattccttttagaggtgatagattatgttcagtatttacaagagaaggtgcaaaagtatgaaggatcgtatccaggttggagtcaggaaccaacaaagttgacgccatggaggaataatcattggcgagttcaaagtttggggaaccacccagtagctataaataatggatctggtccagggataccttttcctggaaagtttgaagacaacactgtgacttcgacacctgcaattattgcagaaccgcaaatcccgattgaatctgacaaagcaagagctataaccggcatatcgattgaaagtcaacctgagttagacgacaaaggattaccaccactacaaccaattcttccaatggtacaaggcgaacaagctaatgaatgtcctgcaactagtgatgggctaggccaaagtaatgacctggttattgaaggtggaaccattagcatctctagtgcctactcgcatgagttattgagctcattaacacaagcactccagaatgcaggcattgatctgtcgcaagcaaagctttctgtgcagatcgatcttgggaagcgagccaatcaaggtctaactcatgaagagccatcaagtaagaatccattatcatatgatacgcaaggaagggattcaagcgttgaggaagaatctgaacattctcacaagcggatgaaaacactgtgacatttctctctcaggctccacggcgctggaatatataaatgtattgacagattccttgtatcgtgtacattgttcggcttctaggggttcctatagtactcgttaagataaactttggttagtagattctgcgtttttttgtggttctgagtttgtatcatcttctgcatcattcatgtaacctatcaaatatgatctcttgtggtttcaagttattgcatcatttttttccg

SEQ ID NO: 20932 - protein, 323 aa, Arabidopsis thaliana
  peptide (1)..(323): Ceres Seq. ID no. 13492135
NKTINSRNSPAKMRTGKGNQEEEDYGEEDFNSKREGPSSNTTVHSNRDSKENDKASAIRSKHSVTEQRRRSKINERFQILRELIPNSEQKRDTASFLLEVIDYVQYLQEKVQKYEGSYPGWSQEPTKLTPWRNNHWRVQSLGNHPVAINNGSGPGIPFPGKFEDNTVTSTPAIIAEPQIPIESDKARAITGISIESQPELDDKGLPPLQPILPMVQGEQANECPATSDGLGQSNDLVIEGGTISISSAYSHELLSSLTQALQNAGIDLSQAKLSVQIDLGKRANQGLTHEEPSSKNPLSYDTQGRDSSVEEESEHSHKRMKTL

SEQ ID NO: 20933 - protein, 311 aa, Arabidopsis thaliana
  peptide (1)..(311): Ceres Seq. ID no. 13492136
MRTGKGNQEEEDYGEEDFNSKREGPSSNTTVHSNRDSKENDKASAIRSKHSVTEQRRRSKINERFQILRELIPNSEQKRDTASFLLEVIDYVQYLQEKVQKYEGSYPGWSQEPTKLTPWRNNHWRVQSLGNHPVAINNGSGPGIPFPGKFEDNTVTSTPAIIAEPQIPIESDKARAITGISIESQPELDDKGLPPLQPILPMVQGEQANECPATSDGLGQSNDLVIEGGTISISSAYSHELLSSLTQALQNAGIDLSQAKLSVQIDLGKRANQGLTHEEPSSKNPLSYDTQGRDSSVEEESEHSHKRMKTL

SEQ ID NO: 20934 - DNA, 1188 bp, Arabidopsis thaliana
  misc_feature (1)..(1188): Ceres Seq. ID no. 12370501
  misc_feature (1)..(1188): Ortholog of  Ceres SEQ ID NO 14316075 as cited in SEQ ID NO 60059
acaaatcgctaatcaaattctatagtaagctttacttcacactactctctcactttctgggcagaaactttgtggatctagaagaacacactaatcagaagagtgaaaaagatgaacgacttgatgacgaaatcgtttatgagttacgttgacttgaaaaaagcagcgatgaaggatatggaagcaggacctgactttgatcttgagatggcttctacgaaagcagacaagatggatgagaatctgtcatctttcttagaagaagcagagtatgtgaaagcagagatgggtttgattagtgagacgctggctcggatcgaacagtaccatgaagagagtaaaggtgttcacaaggcagagtctgtgaagtctcttcgtaacaagatctctaacgagattgtgtctggtttgaggaaggcgaaatcgattaagtcgaagctggaagagatggataaagccaacaaggagattaaaaggctctctgggactccggtttataggagcagaaccgctgtgactaatgggctgaggaagaaacttaaggaagtgatgatggagtttcaggggctgaggcaaaagatgatgagtgagtacaaggagactgttgagagaaggtacttcactgtcactggagaacatgctaatgatgagatgattgagaagatcatcactgataacgctggaggtgaagagtttctcacgcgagcaattcaggaacatggtaaaggaaaggtcttggaaactgtggttgagattcaagacaggtatgatgcagcaaaggagattgagaagagtctgttggagcttcaccaagtgtttcttgatatggctgtgatggttgaatcgcaaggtgaacagatggacgagatcgagcatcatgtgattaatgcgagccattacgtggctgatggagctaatgagctgaagactgcaaagagtcatcagagaaacagcagaaaatggatgtgcattggtatcattgtgctgcttttgatcattctcattgttgtcatccccatcattaccagtttcagctcttcttgagatactggctatgttcactccttttgttttgtttcgctcttctttgtaccaatggatgtcttaatccttttgtgttcttcaaggatgtcttaatcctttcgtgtcttgtatccaatttcaatgaaatggtgaatgtttacaaag

SEQ ID NO: 20935 - protein, 310 aa, Arabidopsis thaliana
  peptide (1)..(310): Ceres Seq. ID no. 12370502
MNDLMTKSFMSYVDLKKAAMKDMEAGPDFDLEMASTKADKMDENLSSFLEEAEYVKAEMGLISETLARIEQYHEESKGVHKAESVKSLRNKISNEIVSGLRKAKSIKSKLEEMDKANKEIKRLSGTPVYRSRTAVTNGLRKKLKEVMMEFQGLRQKMMSEYKETVERRYFTVTGEHANDEMIEKIITDNAGGEEFLTRAIQEHGKGKVLETVVEIQDRYDAAKEIEKSLLELHQVFLDMAVMVESQGEQMDEIEHHVINASHYVADGANELKTAKSHQRNSRKWMCIGIIVLLLIILIVVIPIITSFSSS

SEQ ID NO: 20936 - protein, 306 aa, Arabidopsis thaliana
  peptide (1)..(306): Ceres Seq. ID no. 12370503
MTKSFMSYVDLKKAAMKDMEAGPDFDLEMASTKADKMDENLSSFLEEAEYVKAEMGLISETLARIEQYHEESKGVHKAESVKSLRNKISNEIVSGLRKAKSIKSKLEEMDKANKEIKRLSGTPVYRSRTAVTNGLRKKLKEVMMEFQGLRQKMMSEYKETVERRYFTVTGEHANDEMIEKIITDNAGGEEFLTRAIQEHGKGKVLETVVEIQDRYDAAKEIEKSLLELHQVFLDMAVMVESQGEQMDEIEHHVINASHYVADGANELKTAKSHQRNSRKWMCIGIIVLLLIILIVVIPIITSFSSS

SEQ ID NO: 20937 - protein, 301 aa, Arabidopsis thaliana
  peptide (1)..(301): Ceres Seq. ID no. 12370504
MSYVDLKKAAMKDMEAGPDFDLEMASTKADKMDENLSSFLEEAEYVKAEMGLISETLARIEQYHEESKGVHKAESVKSLRNKISNEIVSGLRKAKSIKSKLEEMDKANKEIKRLSGTPVYRSRTAVTNGLRKKLKEVMMEFQGLRQKMMSEYKETVERRYFTVTGEHANDEMIEKIITDNAGGEEFLTRAIQEHGKGKVLETVVEIQDRYDAAKEIEKSLLELHQVFLDMAVMVESQGEQMDEIEHHVINASHYVADGANELKTAKSHQRNSRKWMCIGIIVLLLIILIVVIPIITSFSSS

SEQ ID NO: 20938 - DNA, 1042 bp, Arabidopsis thaliana
  misc_feature (1)..(1042): Ceres Seq. ID no. 12328103
  misc_feature (1)..(1042): Ortholog of  Ceres SEQ ID NO 13594298 as cited in SEQ ID NO 57803
  misc_feature (1)..(1042): Ortholog of  Ceres SEQ ID NO 13503476 as cited in SEQ ID NO 61978
  misc_feature (1)..(1042): Ortholog of  Ceres SEQ ID NO 12578438 as cited in SEQ ID NO 62201
  misc_feature (1)..(1042): Ortholog of  Ceres SEQ ID NO 12617675 as cited in SEQ ID NO 64656
aaaaacacaacatgaagattatgtgggaaacagcagttgtgttctgtctctgttcattgtctttggtttctgcacacagcaggaaattcacaacaccaaacgtgacacgcctcacagatcaattcagtaagatcgccattgaaaatggcttctccagacgtttcggagctcacaatattcaggtcaatggctccctcgctaagctcactctcgacaaatcctccggagctgggttggtgtcaaagaacaactatcactatggtttcttcagtgcaagactcaagcttcccgctggatttgcctctggtgttgtggttgctttctatttatcaaacgcagagacttatccgaaaagccacgacgagatagacatagaattgttgggtagaagtaggagagatgattggacgatccaaacgaatgtatatgcaaatggaagtactagaacgggaagggaagagaagttttatttttggttcgatccaacgcaagcctttcacgactataccctcatttggaactcccaccatactgtatttttggtagacaacattccggttaggcagtttccaaaccggggagccttcacaagcgcgtacccgtctaaaccgatgtctctatacgtcaccgtttgggacggttcagagtgggccactaaaggtggtaagtaccccgtcaactacaagtacgcccctttcgtggtttccgttgctgacgtggagttaagtggctgttccgttaacaacggatcctctaccgggtccgggccatgtaccaagtcgggcgggtcgatttcgagtctggaccctgttgatggtcaggattttgccacgttgtcgaagaatcagatcaatgccatggattgggctaggagaaagctgatgttctattcttattgcagtgataagccaagatacaaagtcatgcctgctgagtgcaactgattttttttttgttaaaacacacattgttactttctattgttttatgatataattttacgtaggatattagaggtttaaagtatgtttcaaacttcgcc

SEQ ID NO: 20939 - protein, 313 aa, Arabidopsis thaliana
  peptide (1)..(313): Ceres Seq. ID no. 12328104
KHNMKIMWETAVVFCLCSLSLVSAHSRKFTTPNVTRLTDQFSKIAIENGFSRRFGAHNIQVNGSLAKLTLDKSSGAGLVSKNNYHYGFFSARLKLPAGFASGVVVAFYLSNAETYPKSHDEIDIELLGRSRRDDWTIQTNVYANGSTRTGREEKFYFWFDPTQAFHDYTLIWNSHHTVFLVDNIPVRQFPNRGAFTSAYPSKPMSLYVTVWDGSEWATKGGKYPVNYKYAPFVVSVADVELSGCSVNNGSSTGSGPCTKSGGSISSLDPVDGQDFATLSKNQINAMDWARRKLMFYSYCSDKPRYKVMPAECN

SEQ ID NO: 20940 - protein, 310 aa, Arabidopsis thaliana
  peptide (1)..(310): Ceres Seq. ID no. 12328105
MKIMWETAVVFCLCSLSLVSAHSRKFTTPNVTRLTDQFSKIAIENGFSRRFGAHNIQVNGSLAKLTLDKSSGAGLVSKNNYHYGFFSARLKLPAGFASGVVVAFYLSNAETYPKSHDEIDIELLGRSRRDDWTIQTNVYANGSTRTGREEKFYFWFDPTQAFHDYTLIWNSHHTVFLVDNIPVRQFPNRGAFTSAYPSKPMSLYVTVWDGSEWATKGGKYPVNYKYAPFVVSVADVELSGCSVNNGSSTGSGPCTKSGGSISSLDPVDGQDFATLSKNQINAMDWARRKLMFYSYCSDKPRYKVMPAECN

SEQ ID NO: 20941 - protein, 307 aa, Arabidopsis thaliana
  peptide (1)..(307): Ceres Seq. ID no. 12328106
MWETAVVFCLCSLSLVSAHSRKFTTPNVTRLTDQFSKIAIENGFSRRFGAHNIQVNGSLAKLTLDKSSGAGLVSKNNYHYGFFSARLKLPAGFASGVVVAFYLSNAETYPKSHDEIDIELLGRSRRDDWTIQTNVYANGSTRTGREEKFYFWFDPTQAFHDYTLIWNSHHTVFLVDNIPVRQFPNRGAFTSAYPSKPMSLYVTVWDGSEWATKGGKYPVNYKYAPFVVSVADVELSGCSVNNGSSTGSGPCTKSGGSISSLDPVDGQDFATLSKNQINAMDWARRKLMFYSYCSDKPRYKVMPAECN

SEQ ID NO: 20942 - DNA, 642 bp, Arabidopsis thaliana
  misc_feature (1)..(642): Ceres Seq. ID no. 12322267
  misc_feature (1)..(642): Ortholog of  Ceres SEQ ID NO 13595146 as cited in SEQ ID NO 56566
ctcttctctcttctcctctgatcccaccacacttttgaactttcactcaatggcgatgcagcttcctccgacgacactttacgccggaagatcctccgtggtcttacctccgacgactccaaccctccagagatcatctttcttgccttattactcgatgaggctactcggaaacaagaagtctctttccaaatcctctgctcctagattctccatgcgtgtctcctctaagcaagcctatatttgccgtgattgcgggtatatttacaatgatagaactccatttgacaagttacctgataactatttctgtccagtgtgtgctgctcctaaacggcggtttagagcttacatgcctgatgtgagcaagaatgtcaacgacaaagatgtgagaaaggctagaaaagctgagctccaaagagacgaagccgtcgggaaggctctacctataggaattgcagttggggttttagctctcgcagctctttacttctatgtcaatagcacctcatgaatgcagtatcaagagagactacactctgcttttggaatcatttttttgttctgtataaacattcatcttcgacttgttgaccactactgtaatgaagtaaagtattgagctttctatgtaccaaaact

SEQ ID NO: 20943 - protein, 170 aa, Arabidopsis thaliana
  peptide (1)..(170): Ceres Seq. ID no. 12322268
SSLFSSDPTTLLNFHSMAMQLPPTTLYAGRSSVVLPPTTPTLQRSSFLPYYSMRLLGNKKSLSKSSAPRFSMRVSSKQAYICRDCGYIYNDRTPFDKLPDNYFCPVCAAPKRRFRAYMPDVSKNVNDKDVRKARKAELQRDEAVGKALPIGIAVGVLALAALYFYVNSTS

SEQ ID NO: 20944 - protein, 154 aa, Arabidopsis thaliana
  peptide (1)..(154): Ceres Seq. ID no. 12322269
MAMQLPPTTLYAGRSSVVLPPTTPTLQRSSFLPYYSMRLLGNKKSLSKSSAPRFSMRVSSKQAYICRDCGYIYNDRTPFDKLPDNYFCPVCAAPKRRFRAYMPDVSKNVNDKDVRKARKAELQRDEAVGKALPIGIAVGVLALAALYFYVNSTS

SEQ ID NO: 20945 - protein, 152 aa, Arabidopsis thaliana
  peptide (1)..(152): Ceres Seq. ID no. 12322270
MQLPPTTLYAGRSSVVLPPTTPTLQRSSFLPYYSMRLLGNKKSLSKSSAPRFSMRVSSKQAYICRDCGYIYNDRTPFDKLPDNYFCPVCAAPKRRFRAYMPDVSKNVNDKDVRKARKAELQRDEAVGKALPIGIAVGVLALAALYFYVNSTS

SEQ ID NO: 20946 - DNA, 1798 bp, Arabidopsis thaliana
  misc_feature (1)..(1798): Ceres Seq. ID no. 12334515
  misc_feature (1)..(1798): Ortholog of  Ceres SEQ ID NO 14313216 as cited in SEQ ID NO 66103
aaatcagtttctcaacgaatctttctaaacaagacaaaggatcaagaacactacttgttctttgtctgagacttcaaacacaagaaaccaaaaatagaaaaagatatgagagagctttttatgtatctatttcttcttttcttagttctatgtgtcaaatctgtttattctactccgacaagagaacaattccaaaattgcttgtccacaaaacaattcaattctaccctcaaaaaccctataaatctcaccactcatacactagattcccgagttcacaccgacttttccgagtcttcatctccaaattctagtttcctcaacttgaatttcacaagcttgaagccgattctcatcgttaagccaaaatccgaatccgaaataaaacaatcgattttatgcagcaggaaacttggagtgcaagtaagaacaatgagtggtggtcatgactacgaaggtctatcttacctctcactatcacttttcataatcgtcgacctcgttaacctcagatcaatcagcatcaacctcacagacgagaccgcttggatccaatcgggcgcaacactcggcgaagtctactacaagatcgccaaaaccagcaagatccatgcctttgccgcagggatatgtccaagtgttggtgttggtggacatattagcggaggaggattcggtacaataatgaggaaatacggtttagcgtctgataacgttgtggacgcacgtttgatggatgtaaatgggaaaactcttgaccggaaaacgatgggagaggatttgttttgggcgcttagaggcggtggagctgcgagttttggcgttgtcttgtcgtggaaggttaagcttgctagggttcctgaaaaggtaacttgtttcataagtcaacatccgatgggacctagcatgaacaagcttgttcatagatggcaatccataggatcagagctagacgaagatttattcatcagagtcattattgacaacagtctagaagggaatcaaagaaaagtgaaatcaacatttcaaactctatttcttggtggaatcgatagactgattcctctgatgaaccagaagtttccggaactcggcttacgatctcaagactgttcggaaatgagctggatcgaatcgataatgttcttcaactggagatcaggacagccgttagagattttgctcaacagagacctaagattcgaggatcagtatttcaaagcaaagtcagattatgttcaaaaacccgttcctgaaaacgttttcgaagaagtaaccaagagatttctcgagcaagatactccactgatgatctttgagccattgggtgggaaaatcagcaagatttcagaaacagaatctccatatccacacagaagaggtaatctgtataatatacagtacatggtgaaatggaaagtgaatgaagtcgaggagatgaacaaacatgtcaggtggatgagatcgttacacgattacatgactccgtatgtttctaaatcgccgagaggagcttatttgaattacagagatcttgatttgggctcgaccaaagggattaacacgagtttcgaagatgcaaggaaatggggtgagacttatttcaaaggtaatttcaagagattaggtttggttaaagggaagattgatccaacaaatttcttcaggaacgaacagagtattcctcctctgttttgagtcctcaatacaaaaccagatataaaagatgtcatttcattttttcaattataatagataatgtaactttctgctacaattgtaaaagtgagatgtaccc

SEQ ID NO: 20947 - protein, 530 aa, Arabidopsis thaliana
  peptide (1)..(530): Ceres Seq. ID no. 12334516
MRELFMYLFLLFLVLCVKSVYSTPTREQFQNCLSTKQFNSTLKNPINLTTHTLDSRVHTDFSESSSPNSSFLNLNFTSLKPILIVKPKSESEIKQSILCSRKLGVQVRTMSGGHDYEGLSYLSLSLFIIVDLVNLRSISINLTDETAWIQSGATLGEVYYKIAKTSKIHAFAAGICPSVGVGGHISGGGFGTIMRKYGLASDNVVDARLMDVNGKTLDRKTMGEDLFWALRGGGAASFGVVLSWKVKLARVPEKVTCFISQHPMGPSMNKLVHRWQSIGSELDEDLFIRVIIDNSLEGNQRKVKSTFQTLFLGGIDRLIPLMNQKFPELGLRSQDCSEMSWIESIMFFNWRSGQPLEILLNRDLRFEDQYFKAKSDYVQKPVPENVFEEVTKRFLEQDTPLMIFEPLGGKISKISETESPYPHRRGNLYNIQYMVKWKVNEVEEMNKHVRWMRSLHDYMTPYVSKSPRGAYLNYRDLDLGSTKGINTSFEDARKWGETYFKGNFKRLGLVKGKIDPTNFFRNEQSIPPLF

SEQ ID NO: 20948 - protein, 525 aa, Arabidopsis thaliana
  peptide (1)..(525): Ceres Seq. ID no. 12334517
MYLFLLFLVLCVKSVYSTPTREQFQNCLSTKQFNSTLKNPINLTTHTLDSRVHTDFSESSSPNSSFLNLNFTSLKPILIVKPKSESEIKQSILCSRKLGVQVRTMSGGHDYEGLSYLSLSLFIIVDLVNLRSISINLTDETAWIQSGATLGEVYYKIAKTSKIHAFAAGICPSVGVGGHISGGGFGTIMRKYGLASDNVVDARLMDVNGKTLDRKTMGEDLFWALRGGGAASFGVVLSWKVKLARVPEKVTCFISQHPMGPSMNKLVHRWQSIGSELDEDLFIRVIIDNSLEGNQRKVKSTFQTLFLGGIDRLIPLMNQKFPELGLRSQDCSEMSWIESIMFFNWRSGQPLEILLNRDLRFEDQYFKAKSDYVQKPVPENVFEEVTKRFLEQDTPLMIFEPLGGKISKISETESPYPHRRGNLYNIQYMVKWKVNEVEEMNKHVRWMRSLHDYMTPYVSKSPRGAYLNYRDLDLGSTKGINTSFEDARKWGETYFKGNFKRLGLVKGKIDPTNFFRNEQSIPPLF

SEQ ID NO: 20949 - protein, 421 aa, Arabidopsis thaliana
  peptide (1)..(421): Ceres Seq. ID no. 12334518
MSGGHDYEGLSYLSLSLFIIVDLVNLRSISINLTDETAWIQSGATLGEVYYKIAKTSKIHAFAAGICPSVGVGGHISGGGFGTIMRKYGLASDNVVDARLMDVNGKTLDRKTMGEDLFWALRGGGAASFGVVLSWKVKLARVPEKVTCFISQHPMGPSMNKLVHRWQSIGSELDEDLFIRVIIDNSLEGNQRKVKSTFQTLFLGGIDRLIPLMNQKFPELGLRSQDCSEMSWIESIMFFNWRSGQPLEILLNRDLRFEDQYFKAKSDYVQKPVPENVFEEVTKRFLEQDTPLMIFEPLGGKISKISETESPYPHRRGNLYNIQYMVKWKVNEVEEMNKHVRWMRSLHDYMTPYVSKSPRGAYLNYRDLDLGSTKGINTSFEDARKWGETYFKGNFKRLGLVKGKIDPTNFFRNEQSIPPLF

SEQ ID NO: 20950 - DNA, 1243 bp, Arabidopsis thaliana
  misc_feature (1)..(1243): Ceres Seq. ID no. 12394450
  misc_feature (1)..(1243): Ortholog of  Ceres SEQ ID NO 13581579 as cited in SEQ ID NO 58361
  misc_feature (1)..(1243): Ortholog of  Ceres SEQ ID NO 13596474 as cited in SEQ ID NO 62169
  misc_feature (1)..(1243): Ortholog of  Ceres SEQ ID NO 13596969 as cited in SEQ ID NO 63375
  misc_feature (1)..(1243): Ortholog of  Ceres SEQ ID NO 13584480 as cited in SEQ ID NO 64751
  misc_feature (1)..(1243): Ortholog of  Ceres SEQ ID NO 13597519 as cited in SEQ ID NO 64759
  misc_feature (1)..(1243): Ortholog of  Ceres SEQ ID NO 13597870 as cited in SEQ ID NO 64982
  misc_feature (1)..(1243): Ortholog of  Ceres SEQ ID NO 13595926 as cited in SEQ ID NO 67778
  misc_feature (1)..(1243): Ortholog of  Ceres SEQ ID NO 13596362 as cited in SEQ ID NO 67877
attcatcaaatcctcaaacaacttcaagaacaaagagtgcttttcgaggcccaaaacacattaccataaaatggcattctcgaagggactcatttttgcgatgatatttgcggttttagcgatagttaagccctcagaagctgctcttgatgctcattactatgatcaatcgtgccctgctgctgaaaaaatcatacttgaaactgttaggaatgctactttgtatgatcccaaagtgcctgctcgtctcctaagaatgttcttccacgattgcttcatcaggggatgtgatgcgtccattctactagattcgacacggtcaaaccaagctgagaaggatggtcctccaaacatctcagtacggtcattttacgtgatcgaagatgctaagagaaagctcgaaaaggcttgtcctcgtaccgtgtcttgtgccgatgtaatcgccattgccgccagagatgtggtcaccctgtccggtggtccttattggagcgtactgaaagggcgaaaagacgggacaatttcacgagccaacgagactagaaatctcccaccaccaacgttcaatgtttctcaactgatacaaagctttgcagcaagaggcttgtcggtgaaagacatggttacgctctcaggtggccacaccatagggttctctcactgttcttctttcgagtcccgtcttcaaaacttcagcaaattccatgacatagatccttcgatgaactatgcgttcgcgcaaaccttgaaaaagaaatgcccgagaacatctaaccgaggcaagaacgcagggacagtcttggactctacttcctcggttttcgacaatgtttactacaagcaaattttgtccgggaaaggagtgtttgggtctgatcaggcacttctaggcgattcccggactaagtggatcgttgagacgtttgctcaagaccaaaaagctttcttcagagagtttgcagcttccatggtaaaacttggaaactttggagtcaaagagactggacaagttagagttaacactcgcttcgtcaactaaaagcatattcctaacaagcaaccaaatgagagttttcttttcttcaaatttgatttcatttatacttgatattataataatgtagaccggccaatatatggatcggttttaaaacctcctaattctccatgagttgcagagtatgctttaaaagtaaatttgttctgcttcattgaactgatctataaattcatcagcattttc

SEQ ID NO: 20951 - protein, 345 aa, Arabidopsis thaliana
  peptide (1)..(345): Ceres Seq. ID no. 12394451
FIKSSNNFKNKECFSRPKTHYHKMAFSKGLIFAMIFAVLAIVKPSEAALDAHYYDQSCPAAEKIILETVRNATLYDPKVPARLLRMFFHDCFIRGCDASILLDSTRSNQAEKDGPPNISVRSFYVIEDAKRKLEKACPRTVSCADVIAIAARDVVTLSGGPYWSVLKGRKDGTISRANETRNLPPPTFNVSQLIQSFAARGLSVKDMVTLSGGHTIGFSHCSSFESRLQNFSKFHDIDPSMNYAFAQTLKKKCPRTSNRGKNAGTVLDSTSSVFDNVYYKQILSGKGVFGSDQALLGDSRTKWIVETFAQDQKAFFREFAASMVKLGNFGVKETGQVRVNTRFVN

SEQ ID NO: 20952 - protein, 322 aa, Arabidopsis thaliana
  peptide (1)..(322): Ceres Seq. ID no. 12394452
MAFSKGLIFAMIFAVLAIVKPSEAALDAHYYDQSCPAAEKIILETVRNATLYDPKVPARLLRMFFHDCFIRGCDASILLDSTRSNQAEKDGPPNISVRSFYVIEDAKRKLEKACPRTVSCADVIAIAARDVVTLSGGPYWSVLKGRKDGTISRANETRNLPPPTFNVSQLIQSFAARGLSVKDMVTLSGGHTIGFSHCSSFESRLQNFSKFHDIDPSMNYAFAQTLKKKCPRTSNRGKNAGTVLDSTSSVFDNVYYKQILSGKGVFGSDQALLGDSRTKWIVETFAQDQKAFFREFAASMVKLGNFGVKETGQVRVNTRFVN

SEQ ID NO: 20953 - protein, 312 aa, Arabidopsis thaliana
  peptide (1)..(312): Ceres Seq. ID no. 12394453
MIFAVLAIVKPSEAALDAHYYDQSCPAAEKIILETVRNATLYDPKVPARLLRMFFHDCFIRGCDASILLDSTRSNQAEKDGPPNISVRSFYVIEDAKRKLEKACPRTVSCADVIAIAARDVVTLSGGPYWSVLKGRKDGTISRANETRNLPPPTFNVSQLIQSFAARGLSVKDMVTLSGGHTIGFSHCSSFESRLQNFSKFHDIDPSMNYAFAQTLKKKCPRTSNRGKNAGTVLDSTSSVFDNVYYKQILSGKGVFGSDQALLGDSRTKWIVETFAQDQKAFFREFAASMVKLGNFGVKETGQVRVNTRFVN

SEQ ID NO: 20954 - DNA, 1405 bp, Arabidopsis thaliana
  misc_feature (1)..(1405): Ceres Seq. ID no. 13490498
  misc_feature (1)..(1405): Ortholog of  Ceres SEQ ID NO 14302314 as cited in SEQ ID NO 62543
  misc_feature (1)..(1405): Ortholog of  Ceres SEQ ID NO 13598391 as cited in SEQ ID NO 62769
tggcagatattcaaacaactcaatcctcattccctttgtttcgcctctctggatttcgaagagctgagagattagggtttctcgattttcgagattagagtctaatccccaccaccagcatagctgatatcctggaggagagaatgacggattcgggtctaatgatgccggcggagattgctggaattctaaccacggcgattacgagttggtgggatgatgttaatgagtcaactcagtggcaagatgggatctttttcgctctttgtggtgcttatgctcttgtttccgccgttgctcttgttcaactgataaggatccaaatgagagtgcctgagtatggttggactactcagaaggtgtttcatcttatgaactttgtcgtcaatggagttcgtgcggttctgtttggatttcacatgcaagtatttcttgttcatcccaaggctctttgctgggtactattggatcttcctggccttctctttttctcggcatacacgctgcttgtgctgttctgggcagagatatatcaccaggctagaagcttacctacagataagctgcggataacctatatttctgtcaacgtggctgtatatttggctcagattggtatctgggcatacatctgggtacatgataacagcactgtggagttagttggaaagatatttatcgcagttgtgtctttcatcgccgcattaggcttcttgctgtatggaggaagattgtttttcatgctaagaaggttccctatcgagtcaaaaggaagaaggaagaaactccacgaggttggatctgtgacagctatatgcttcacctgcttcctcataagatgcgttgtggtggctgtatcagcttttgacaaggatttaacacttgatgttcttgatcatccggttctgaacttaatctactatatggtggtagaagtacttccatcggcactagtcctcttcattctccgaaagctacctccaaagagagtatcagctcaataccatccgatccagtagaaacctttgtcactgaaccatctcacacggtgagtatgatgctgtttaagagaagagtaaagattaaaaaaaaaattggggcaaaaaatgaaaggtgaagaagaaatcggtgtggaatctgcgtgagtttttggaatgcacgttcatataaatgattttacagcttttagttgttgtagcccgccgtgacttttggtttggtagtttatgtctgttaaaattataaattgctcttctgctactttgaaaaatctggtcagtagtacaagaggtttaacatttgttgcgtcgatggttgattgttatgttatgtttggtaaaaaataaacgaatgctcttctccagtttcctttatgcttttgtcaactgttacatcttcttctcct

SEQ ID NO: 20955 - protein, 291 aa, Arabidopsis thaliana
  peptide (1)..(291): Ceres Seq. ID no. 13490499
MTDSGLMMPAEIAGILTTAITSWWDDVNESTQWQDGIFFALCGAYALVSAVALVQLIRIQMRVPEYGWTTQKVFHLMNFVVNGVRAVLFGFHMQVFLVHPKALCWVLLDLPGLLFFSAYTLLVLFWAEIYHQARSLPTDKLRITYISVNVAVYLAQIGIWAYIWVHDNSTVELVGKIFIAVVSFIAALGFLLYGGRLFFMLRRFPIESKGRRKKLHEVGSVTAICFTCFLIRCVVVAVSAFDKDLTLDVLDHPVLNLIYYMVVEVLPSALVLFILRKLPPKRVSAQYHPIQ

SEQ ID NO: 20956 - protein, 285 aa, Arabidopsis thaliana
  peptide (1)..(285): Ceres Seq. ID no. 13490500
MMPAEIAGILTTAITSWWDDVNESTQWQDGIFFALCGAYALVSAVALVQLIRIQMRVPEYGWTTQKVFHLMNFVVNGVRAVLFGFHMQVFLVHPKALCWVLLDLPGLLFFSAYTLLVLFWAEIYHQARSLPTDKLRITYISVNVAVYLAQIGIWAYIWVHDNSTVELVGKIFIAVVSFIAALGFLLYGGRLFFMLRRFPIESKGRRKKLHEVGSVTAICFTCFLIRCVVVAVSAFDKDLTLDVLDHPVLNLIYYMVVEVLPSALVLFILRKLPPKRVSAQYHPIQ

SEQ ID NO: 20957 - protein, 284 aa, Arabidopsis thaliana
  peptide (1)..(284): Ceres Seq. ID no. 13490501
MPAEIAGILTTAITSWWDDVNESTQWQDGIFFALCGAYALVSAVALVQLIRIQMRVPEYGWTTQKVFHLMNFVVNGVRAVLFGFHMQVFLVHPKALCWVLLDLPGLLFFSAYTLLVLFWAEIYHQARSLPTDKLRITYISVNVAVYLAQIGIWAYIWVHDNSTVELVGKIFIAVVSFIAALGFLLYGGRLFFMLRRFPIESKGRRKKLHEVGSVTAICFTCFLIRCVVVAVSAFDKDLTLDVLDHPVLNLIYYMVVEVLPSALVLFILRKLPPKRVSAQYHPIQ

SEQ ID NO: 20958 - DNA, 950 bp, Arabidopsis thaliana
  misc_feature (1)..(950): Ceres Seq. ID no. 13490494
  misc_feature (1)..(950): Ortholog of  Ceres SEQ ID NO 12610031 as cited in SEQ ID NO 55811
  misc_feature (1)..(950): Ortholog of  Ceres SEQ ID NO 12610896 as cited in SEQ ID NO 55861
  misc_feature (1)..(950): Ortholog of  Ceres SEQ ID NO 12619664 as cited in SEQ ID NO 66048
  misc_feature (1)..(950): Ortholog of  Ceres SEQ ID NO 12635952 as cited in SEQ ID NO 0
catcaccttcaccttcaacatcaaacatcacatttcttcctcttttctctcttttttctcagtcttcaaagagtttcttagtaacccaaatcaatggcaggtatcaaagttttcggacacccagcttccattgccaccaggagagtcctcatcgccctccacgagaaaaacctcgactttgagctcgttcatgtcgaactcaaagacggtgagcacaagaaggagcctttcctctcccgcaacccttttggtcaggttccagcctttgaagatggagacctcaagctcttcgaatcaagagcgattactcagtacatagctcaccgatatgaaaaccaaggaaccaaccttctccaaaccgactccaagaacatatctcagtacgcaatcatggccattggaatgcaagtagaagatcaccagttcgacccagtggcttcaaagcttgcttttgaacaaatattcaagtccatctacggcttgaccacagacgaagccgttgttgcagaagaggaggctaagttagccaaggtccttgatgtctacgaggctaggctcaaggagttcaagtatttggctggtgaaactttcactttgactgatcttcaccacattcccgcgattcaatacctgctcggaactcccaccaagaagctcttcaccgagcgtccacgtgtcaatgagtgggtggctgaaatcaccaagaggccagcttccgagaaggttcagtgagaaatttctaaaaggaaaatatggttttgcttcagtcacagtaataatgctaagattaaataagcggctttctcattgcccaatttctcagtactttctttctgttgtatcctctgttttctttcagttatgtgagtgtgtgtgtatgctcttgagagtatctttggcaaaaactatttatctaatcttcaagctattctaaaataaatcaattagtt

SEQ ID NO: 20959 - protein, 212 aa, Arabidopsis thaliana
  peptide (1)..(212): Ceres Seq. ID no. 13490495
MAGIKVFGHPASIATRRVLIALHEKNLDFELVHVELKDGEHKKEPFLSRNPFGQVPAFEDGDLKLFESRAITQYIAHRYENQGTNLLQTDSKNISQYAIMAIGMQVEDHQFDPVASKLAFEQIFKSIYGLTTDEAVVAEEEAKLAKVLDVYEARLKEFKYLAGETFTLTDLHHIPAIQYLLGTPTKKLFTERPRVNEWVAEITKRPASEKVQ

SEQ ID NO: 20960 - protein, 113 aa, Arabidopsis thaliana
  peptide (1)..(113): Ceres Seq. ID no. 13490496
MAIGMQVEDHQFDPVASKLAFEQIFKSIYGLTTDEAVVAEEEAKLAKVLDVYEARLKEFKYLAGETFTLTDLHHIPAIQYLLGTPTKKLFTERPRVNEWVAEITKRPASEKVQ

SEQ ID NO: 20961 - protein, 109 aa, Arabidopsis thaliana
  peptide (1)..(109): Ceres Seq. ID no. 13490497
MQVEDHQFDPVASKLAFEQIFKSIYGLTTDEAVVAEEEAKLAKVLDVYEARLKEFKYLAGETFTLTDLHHIPAIQYLLGTPTKKLFTERPRVNEWVAEITKRPASEKVQ

SEQ ID NO: 20962 - DNA, 1851 bp, Arabidopsis thaliana
  misc_feature (1)..(1851): Ceres Seq. ID no. 13486872
  misc_feature (1)..(1851): Ortholog of  Ceres SEQ ID NO 13655852 as cited in SEQ ID NO 64636
ctctcaatttgggattcgagacgaaaccctagctctgatttttttcaattccgatggaggcgggagagcggcgcaatggcgattcgatgagtcacaatcaccgcgcaccgaagaagccacgtctcgctgggttattaaccgagtcagatatcgactctgagttcgctcaccaccagaccggtgttgccagaatcaacaacggtagcttcgggtgctgtcctggctccgttctcgaggcgcaacgcgagtggcagcttcgttatctccgtcagcctgatgagttctacttcaacggtctccgtcgtggacttctcgcttctcgaactgtgatcagtgacctaatcaacgccgatgatgttgatgaggtctctctcgttgataacgccaccactgctgctgctattgttcttcagaaagttggaaggtgtttctcggaagggaagtataagaaggaagatactgtagtgatgtttcactgtgcgtttcagagtgtgaagaagtcgattcaggcttatgtctctcgtgtgggaggttctactgttgaggttaggttacctttccctgtaaattcgaacgaagagattatctccaagtttagagaaggactagagaaaggtagagcgaatggtagaacggttaggttagctatcattgatcatataacgtcgatgccgtgtgttttgatgccggtacgagaattggttaagatctgcagagaggaaggtgtggagcaggtttttgttgatgcagctcatgccattggtagtgttaaagttgatgtgaaagaaatcggagctgattactatgtgagtaatctgcataaatggttcttttgtccaccgtctatcgcgtttttctattgtaagaaacgtggttctgagtctgatgttcatcaccctgtggtgtctcatgagtttggaaatggtttgcctatagaaagtgcctggattgggactagggattacagttcacagcttgtggttccatctgtgatggagtttgtaaacaggttcgagggagggatggaagggataatgatgaagaaccatgatgaagctgttagaatgggtttaatgctggctgatgcttggggaacgaatctagggtcacctccagaaatgtgtgttgggatggttatgatcggtttaccttcaaaactctgtgttggaagtgatgaagatgctattaagttgcggtcatatctgcgggttcattactcagttgaggttccagttttttatctcggattgagggatggagaggaaggagtgaaagacaaagacagtggactaattactgcgtatgttcggatctctcatcaggtctataacaaaactgaggattatgagagattgagagacgcaataacagagttagtcaaggatcagatgacttgtcaaaaccttcctgcattgtagtaaccagatatactttgataatccacaagagcctcattgagactctttcatagatcaactgccggtgtaacaataaggcgatggaagagccacgggcaaagattccggaggtaacatgtattgatgagcttgtggaggagcggcttgcaatggaagaagaagctaaccttgagaggccctctctttttattagtcttttataacgtttaacggctttgtatgattattgcaaataaaatcatgtgcgtctaatcttatcttcctcaaacattctgcttgcgaatctcctgtcgcagttcaataatttttccttattgaaaactttttccctcacattgaaagcatattcatagatatgtaatgacacctaatttatcattgttttgtatgattctggttcgttttcacatctatgtctattatgtctatttac

SEQ ID NO: 20963 - protein, 454 aa, Arabidopsis thaliana
  peptide (1)..(454): Ceres Seq. ID no. 13486873
MEAGERRNGDSMSHNHRAPKKPRLAGLLTESDIDSEFAHHQTGVARINNGSFGCCPGSVLEAQREWQLRYLRQPDEFYFNGLRRGLLASRTVISDLINADDVDEVSLVDNATTAAAIVLQKVGRCFSEGKYKKEDTVVMFHCAFQSVKKSIQAYVSRVGGSTVEVRLPFPVNSNEEIISKFREGLEKGRANGRTVRLAIIDHITSMPCVLMPVRELVKICREEGVEQVFVDAAHAIGSVKVDVKEIGADYYVSNLHKWFFCPPSIAFFYCKKRGSESDVHHPVVSHEFGNGLPIESAWIGTRDYSSQLVVPSVMEFVNRFEGGMEGIMMKNHDEAVRMGLMLADAWGTNLGSPPEMCVGMVMIGLPSKLCVGSDEDAIKLRSYLRVHYSVEVPVFYLGLRDGEEGVKDKDSGLITAYVRISHQVYNKTEDYERLRDAITELVKDQMTCQNLPAL

SEQ ID NO: 20964 - protein, 443 aa, Arabidopsis thaliana
  peptide (1)..(443): Ceres Seq. ID no. 13486874
MSHNHRAPKKPRLAGLLTESDIDSEFAHHQTGVARINNGSFGCCPGSVLEAQREWQLRYLRQPDEFYFNGLRRGLLASRTVISDLINADDVDEVSLVDNATTAAAIVLQKVGRCFSEGKYKKEDTVVMFHCAFQSVKKSIQAYVSRVGGSTVEVRLPFPVNSNEEIISKFREGLEKGRANGRTVRLAIIDHITSMPCVLMPVRELVKICREEGVEQVFVDAAHAIGSVKVDVKEIGADYYVSNLHKWFFCPPSIAFFYCKKRGSESDVHHPVVSHEFGNGLPIESAWIGTRDYSSQLVVPSVMEFVNRFEGGMEGIMMKNHDEAVRMGLMLADAWGTNLGSPPEMCVGMVMIGLPSKLCVGSDEDAIKLRSYLRVHYSVEVPVFYLGLRDGEEGVKDKDSGLITAYVRISHQVYNKTEDYERLRDAITELVKDQMTCQNLPAL

SEQ ID NO: 20965 - protein, 316 aa, Arabidopsis thaliana
  peptide (1)..(316): Ceres Seq. ID no. 13486875
MFHCAFQSVKKSIQAYVSRVGGSTVEVRLPFPVNSNEEIISKFREGLEKGRANGRTVRLAIIDHITSMPCVLMPVRELVKICREEGVEQVFVDAAHAIGSVKVDVKEIGADYYVSNLHKWFFCPPSIAFFYCKKRGSESDVHHPVVSHEFGNGLPIESAWIGTRDYSSQLVVPSVMEFVNRFEGGMEGIMMKNHDEAVRMGLMLADAWGTNLGSPPEMCVGMVMIGLPSKLCVGSDEDAIKLRSYLRVHYSVEVPVFYLGLRDGEEGVKDKDSGLITAYVRISHQVYNKTEDYERLRDAITELVKDQMTCQNLPAL

SEQ ID NO: 20966 - DNA, 2476 bp, Arabidopsis thaliana
  misc_feature (1)..(2476): Ceres Seq. ID no. 12482585
  misc_feature (1)..(2476): Ortholog of  Ceres SEQ ID NO 13596198 as cited in SEQ ID NO 68488
gaaacaccgcgtttttgtttacatttcttctctttctctctctctcttctctcatatctctctcttcgccgtcaggttttgcccaaatttctcggtcttcttcactcccgcgagttttttttctcgggaaaattttccaattccaagctccattgaagccaagtaagaggtgcgattctcttcaattttgacttggaacttgtaaatagcgtatggatttgagctggttatggacagaattctagctcgtatgaagaaatcaactggacgaagaggaggagataagaatattactccggtacggcggttagagcgtcgcgatgcggcgaggaatatcaattacgacgcagcttcatgttctagttcgtcagctgaagatctttccgtttcgacttcttcgttgatgactcgctctttggagtttccggagcctactagtttccgaatcggtggtggtgttggagagatggatcggatttatcggtctcttggtgtttctggtcctgatgatttggctatttcttttgatgcttgggaagcttgtaagaaacgttcttcttcagatgttgttaataggtttaagtcttttgatcttgataaggttcgtgatcaggatttgagtgaagaaggtcctagtggtgttgttgttggttctgattcaatgaatcataaggttcagggtcaggatttgagtgaagcaggtcctagtggtggaattgttactgagttgagtgagattgggaatttaatcactcctgtggataggttagtagctgatggtgtggtagagaataggcgtgttatggaaagaacaccaactattgtgaagtcgaaagggtatcttgtaccaaataatgtagtggctgttggtgttggtgttggtggtggtattaaggggctaagaccaccagtacttaagcctcctccggctatgaaacgaccccctattgatcatcggggatcgtcttgggatttcctgacgcatttcgctccaagtgaaacagttaagcggccgagttcctcttcttcttcttccgaggatggatgcgatgaagaggaaggcaaggaagaggaagcggaagcggaagagatgggagctaggtttatccagttgggggatacggctgacgagacgtgctcattcactacaaatgagggtgactcctcaagcacagtatccaatacttcgcctatctatccagatggaggagctatcataacgtcttggcaaaagggtcaacttttgggacgaggatcatttggttctgtgtatgaaggcatttctggagatggggacttctttgctgtcaaggaagtttcacttcttgatcagggaagtcaggcacaagaatgcatacaacaacttgagggggagattaaactacttagtcagcttcagcatcagaatattgtgagatatcgtggcacagccaaggatgggtcaaacttgtacatttttcttgagcttgtaacccaagggtcccttctaaaactctaccaaagataccagcttcgggactctgtagtctccttgtacactagacagattcttgacggtttgaaatatctccacgataaaggttttattcacagggacatcaaatgtgcaaatatattggtggacgctaatggcgccgtcaaacttgcagattttggattggcaaaggtttcaaagtttaacgacattaagtcctgcaagggaactccattttggatggctccagaggttattaaccgaaaggatagtgatggctatggaagtccagctgatatatggagcctcgggtgcactgtgctggaaatgtgtactggtcagatcccctactctgatctcgaacccgttcaagccctgtttaggatcggaaggggtactcttccggaagtacctgatacgttatcactagatgctcggcttttcatacttaagtgtcttaaagtgaacccggaagagcggccaactgcagctgaactgctgaaccatccatttgtgagaagacccttaccatccgtgggttcaggaggctcgggatcagcatctccccttctccgtagatgaggctaattttagtaaatttcctcaataggcataacccgaagatttatgagagattagatcccagagaaactattgggagacacgagacatgattcttcgacacacacacacgtgcggtcgggttgcgcagcaagagccaaacttacttagtttctgtgtcattcgttggttatttgttgcaagttatgtgttgggcttgattttaaaactgaagagccttatttttctaggaattagaaatgtcgaccttggggtttttgggtgtataggttttgtttagttttttttgttaaattatagtgtatgtatgtctgtatctatatcatgtaatgtataattatagttggttcttatagttcctggcttgttgtaactgtgtacacacatcgatgggtttaagttctatttgtctcatatttt

SEQ ID NO: 20967 - protein, 608 aa, Arabidopsis thaliana
  peptide (1)..(608): Ceres Seq. ID no. 12482586
MDRILARMKKSTGRRGGDKNITPVRRLERRDAARNINYDAASCSSSSAEDLSVSTSSLMTRSLEFPEPTSFRIGGGVGEMDRIYRSLGVSGPDDLAISFDAWEACKKRSSSDVVNRFKSFDLDKVRDQDLSEEGPSGVVVGSDSMNHKVQGQDLSEAGPSGGIVTELSEIGNLITPVDRLVADGVVENRRVMERTPTIVKSKGYLVPNNVVAVGVGVGGGIKGLRPPVLKPPPAMKRPPIDHRGSSWDFLTHFAPSETVKRPSSSSSSSEDGCDEEEGKEEEAEAEEMGARFIQLGDTADETCSFTTNEGDSSSTVSNTSPIYPDGGAIITSWQKGQLLGRGSFGSVYEGISGDGDFFAVKEVSLLDQGSQAQECIQQLEGEIKLLSQLQHQNIVRYRGTAKDGSNLYIFLELVTQGSLLKLYQRYQLRDSVVSLYTRQILDGLKYLHDKGFIHRDIKCANILVDANGAVKLADFGLAKVSKFNDIKSCKGTPFWMAPEVINRKDSDGYGSPADIWSLGCTVLEMCTGQIPYSDLEPVQALFRIGRGTLPEVPDTLSLDARLFILKCLKVNPEERPTAAELLNHPFVRRPLPSVGSGGSGSASPLLRR

SEQ ID NO: 20968 - protein, 601 aa, Arabidopsis thaliana
  peptide (1)..(601): Ceres Seq. ID no. 12482587
MKKSTGRRGGDKNITPVRRLERRDAARNINYDAASCSSSSAEDLSVSTSSLMTRSLEFPEPTSFRIGGGVGEMDRIYRSLGVSGPDDLAISFDAWEACKKRSSSDVVNRFKSFDLDKVRDQDLSEEGPSGVVVGSDSMNHKVQGQDLSEAGPSGGIVTELSEIGNLITPVDRLVADGVVENRRVMERTPTIVKSKGYLVPNNVVAVGVGVGGGIKGLRPPVLKPPPAMKRPPIDHRGSSWDFLTHFAPSETVKRPSSSSSSSEDGCDEEEGKEEEAEAEEMGARFIQLGDTADETCSFTTNEGDSSSTVSNTSPIYPDGGAIITSWQKGQLLGRGSFGSVYEGISGDGDFFAVKEVSLLDQGSQAQECIQQLEGEIKLLSQLQHQNIVRYRGTAKDGSNLYIFLELVTQGSLLKLYQRYQLRDSVVSLYTRQILDGLKYLHDKGFIHRDIKCANILVDANGAVKLADFGLAKVSKFNDIKSCKGTPFWMAPEVINRKDSDGYGSPADIWSLGCTVLEMCTGQIPYSDLEPVQALFRIGRGTLPEVPDTLSLDARLFILKCLKVNPEERPTAAELLNHPFVRRPLPSVGSGGSGSASPLLRR

SEQ ID NO: 20969 - protein, 550 aa, Arabidopsis thaliana
  peptide (1)..(550): Ceres Seq. ID no. 12482588
MTRSLEFPEPTSFRIGGGVGEMDRIYRSLGVSGPDDLAISFDAWEACKKRSSSDVVNRFKSFDLDKVRDQDLSEEGPSGVVVGSDSMNHKVQGQDLSEAGPSGGIVTELSEIGNLITPVDRLVADGVVENRRVMERTPTIVKSKGYLVPNNVVAVGVGVGGGIKGLRPPVLKPPPAMKRPPIDHRGSSWDFLTHFAPSETVKRPSSSSSSSEDGCDEEEGKEEEAEAEEMGARFIQLGDTADETCSFTTNEGDSSSTVSNTSPIYPDGGAIITSWQKGQLLGRGSFGSVYEGISGDGDFFAVKEVSLLDQGSQAQECIQQLEGEIKLLSQLQHQNIVRYRGTAKDGSNLYIFLELVTQGSLLKLYQRYQLRDSVVSLYTRQILDGLKYLHDKGFIHRDIKCANILVDANGAVKLADFGLAKVSKFNDIKSCKGTPFWMAPEVINRKDSDGYGSPADIWSLGCTVLEMCTGQIPYSDLEPVQALFRIGRGTLPEVPDTLSLDARLFILKCLKVNPEERPTAAELLNHPFVRRPLPSVGSGGSGSASPLLRR

SEQ ID NO: 20970 - DNA, 822 bp, Arabidopsis thaliana
  misc_feature (1)..(822): Ceres Seq. ID no. 13489916
  misc_feature (1)..(822): Ortholog of  Ceres SEQ ID NO 13599568 as cited in SEQ ID NO 509
  misc_feature (1)..(822): Ortholog of  Ceres SEQ ID NO 13638595 as cited in SEQ ID NO 52050
  misc_feature (1)..(822): Ortholog of  Ceres SEQ ID NO 13594748 as cited in SEQ ID NO 52114
  misc_feature (1)..(822): Ortholog of  Ceres SEQ ID NO 12623490 as cited in SEQ ID NO 61136
  misc_feature (1)..(822): Ortholog of  Ceres SEQ ID NO 12583993 as cited in SEQ ID NO 68098
  misc_feature (1)..(822): Ortholog of  Ceres SEQ ID NO 13654535 as cited in SEQ ID NO 68227
atagttaaataaaattcatcttttcacggatatatttaatttggagccatgatgaattcaagaatttctattatcattgcgttatcttgcattatgatcacttcaattcgtgcatacgataccgacgatcttcaagatctctgcgttgccgataaatctcacggaaccaaactgaatggatttccgtgcaaggaaacattaaacatcacggagtccgacttcttcttcgccggaatctcaaaacccgccgtcataaactctacgatgggttcggccgtaacaggagccaacgtggaaaagatcccaggcctcaacactctctccgtctccttagcacgtatagactacgcgccgggaggtttaaacccaccgcacactcacccacgcgccaccgaagtcgtctacgttctagaaggagagcttgaggttggatttatcacaacagcgaataagcttttcactaaaaccataaagattggtgaagttttcgtttttccaagagggcttgtgcattttcaaaagaacaatgggaaatctcccgcgtcggttttgtcggcatttaatagtcagttgccgggaacggcttctgttgcggcaaccctatttgcggcagagccggctttgccggaagatgtgttaactaagacttttcaagtgggatctaagatggttgataagattaaggaaaggcttgccactaaaaaataattcataaaagtttaaaaaaaaaataaaaacatgaaaatataatgtaaccgttacctagaaagattttatttaacactactgtattgaataaaaaggtgttactgtgattatctt

SEQ ID NO: 20971 - protein, 219 aa, Arabidopsis thaliana
  peptide (1)..(219): Ceres Seq. ID no. 13489917
MMNSRISIIIALSCIMITSIRAYDTDDLQDLCVADKSHGTKLNGFPCKETLNITESDFFFAGISKPAVINSTMGSAVTGANVEKIPGLNTLSVSLARIDYAPGGLNPPHTHPRATEVVYVLEGELEVGFITTANKLFTKTIKIGEVFVFPRGLVHFQKNNGKSPASVLSAFNSQLPGTASVAATLFAAEPALPEDVLTKTFQVGSKMVDKIKERLATKK

SEQ ID NO: 20972 - protein, 218 aa, Arabidopsis thaliana
  peptide (1)..(218): Ceres Seq. ID no. 13489918
MNSRISIIIALSCIMITSIRAYDTDDLQDLCVADKSHGTKLNGFPCKETLNITESDFFFAGISKPAVINSTMGSAVTGANVEKIPGLNTLSVSLARIDYAPGGLNPPHTHPRATEVVYVLEGELEVGFITTANKLFTKTIKIGEVFVFPRGLVHFQKNNGKSPASVLSAFNSQLPGTASVAATLFAAEPALPEDVLTKTFQVGSKMVDKIKERLATKK

SEQ ID NO: 20973 - protein, 204 aa, Arabidopsis thaliana
  peptide (1)..(204): Ceres Seq. ID no. 13489919
MITSIRAYDTDDLQDLCVADKSHGTKLNGFPCKETLNITESDFFFAGISKPAVINSTMGSAVTGANVEKIPGLNTLSVSLARIDYAPGGLNPPHTHPRATEVVYVLEGELEVGFITTANKLFTKTIKIGEVFVFPRGLVHFQKNNGKSPASVLSAFNSQLPGTASVAATLFAAEPALPEDVLTKTFQVGSKMVDKIKERLATKK

SEQ ID NO: 20974 - DNA, 828 bp, Arabidopsis thaliana
  misc_feature (1)..(828): Ceres Seq. ID no. 13489009
  misc_feature (1)..(828): Ortholog of  Ceres SEQ ID NO 15172961 as cited in SEQ ID NO 51757
  misc_feature (1)..(828): Ortholog of  Ceres SEQ ID NO 15173213 as cited in SEQ ID NO 57923
  misc_feature (1)..(828): Ortholog of  Ceres SEQ ID NO 13660855 as cited in SEQ ID NO 67670
atcgtcatctgtggaacggataggacgaaggaaaaagaagaagagtgaaagttgcagagcgagaaaaaatggcaaccatgtctgctcttcagagctcttttacttctctttctctatctcccagctcttccttcctcggccagcgtttaatttccccgatttccctctccgtcacttctccggtcaagcccgctgagaacccatgtcttgttcttgcaaagctcaagcgttgggaacgaaaagaatgcaaaccaaacagtcttccgattctccacaaaatgcatgtcaagtttggagatacagtcaaagtaatatctggacgcgacaagggtaaaatcggagaggttactaagattttcactcacaacagtaccattgtgatcaaagatgtgaacctcaaaacaaaacacatgaagagccgagaagagggagagcctggtcaaattgtcaagatagaagcacctatccacagctcaaatgtgatgttgtattcaaaagaaaaagacgtagtaagccgggtgggtcacaaggtacttgaagatggacagaaggtaagatatctgatcaaaacaggggaactcatcgacaccattgagaagtggaagctacttaaggaggctaaggataaggaaaccacccaagttgcagttacctccgcatcttagcgtctcatttctttcttcttcagtgcacttttgatataatagacctatgcattggatggatgtattgaatcccttttaaggtaaattataatatttctgctcccctcatgaacacctcttagcatgatttaacatattaatcgaactaaagccgggtactctt

SEQ ID NO: 20975 - protein, 198 aa, Arabidopsis thaliana
  peptide (1)..(198): Ceres Seq. ID no. 13489010
MATMSALQSSFTSLSLSPSSSFLGQRLISPISLSVTSPVKPAENPCLVLAKLKRWERKECKPNSLPILHKMHVKFGDTVKVISGRDKGKIGEVTKIFTHNSTIVIKDVNLKTKHMKSREEGEPGQIVKIEAPIHSSNVMLYSKEKDVVSRVGHKVLEDGQKVRYLIKTGELIDTIEKWKLLKEAKDKETTQVAVTSAS

SEQ ID NO: 20976 - protein, 195 aa, Arabidopsis thaliana
  peptide (1)..(195): Ceres Seq. ID no. 13489011
MSALQSSFTSLSLSPSSSFLGQRLISPISLSVTSPVKPAENPCLVLAKLKRWERKECKPNSLPILHKMHVKFGDTVKVISGRDKGKIGEVTKIFTHNSTIVIKDVNLKTKHMKSREEGEPGQIVKIEAPIHSSNVMLYSKEKDVVSRVGHKVLEDGQKVRYLIKTGELIDTIEKWKLLKEAKDKETTQVAVTSAS

SEQ ID NO: 20977 - protein, 128 aa, Arabidopsis thaliana
  peptide (1)..(128): Ceres Seq. ID no. 13489012
MHVKFGDTVKVISGRDKGKIGEVTKIFTHNSTIVIKDVNLKTKHMKSREEGEPGQIVKIEAPIHSSNVMLYSKEKDVVSRVGHKVLEDGQKVRYLIKTGELIDTIEKWKLLKEAKDKETTQVAVTSAS

SEQ ID NO: 20978 - DNA, 828 bp, Arabidopsis thaliana
  misc_feature (1)..(828): Ceres Seq. ID no. 12333111
  misc_feature (1)..(828): Ortholog of  Ceres SEQ ID NO 15177927 as cited in SEQ ID NO 1170
  misc_feature (1)..(828): Ortholog of  Ceres SEQ ID NO 13596295 as cited in SEQ ID NO 68019
aacaaaaaagccctaaacggagagaggcggagaggagaaggaagacggcgtgaagcaatggtgtcgctgaagatccagaagcggctcgccgcatccgtaatgaaatgcgggaaaggaaaagtttggctcgaccccaatgaatcgggcgatatctctatggccaattccaggcagaacattaggaagcttgtgaaggatggtttcattatcaggaagcctactaagatccactcacgttctcgggctagggctttgaacgaggccaagcgaaagggtcgtcactctggatacggtaagagaaagggtacaagagaggcaaggctaccaaccaagattctttggatgaggagaatgagggtgttgaggcgtttcttgagcaagtaccgtgagtcaaagaagattgataggcacatgtaccatgacatgtacatgaaagtgaagggtaatgttttcaagaacaagcgtgtgcttatggagagcatccacaagatgaaggctgagaaggctagagagaagactctcgctgaccagtttgaggccaagcgtattaagaacaaggctagcagggagagaaagtttgccagaagagaggagagattagctcagggacctggaggtggagagacaacgactcctgctggcgcacctcaacaaccagaggtaaccaagaagaagtcgaagaagtgatttggtgttgaacttttttgcaattgaatctttgaatttacctgtagaagaagcgtcttttttttatcttttatatgattttgtcggagattcttttcttcaaaaatatttcttatgttatggatctcattgcttattatg

SEQ ID NO: 20979 - protein, 228 aa, Arabidopsis thaliana
  peptide (1)..(228): Ceres Seq. ID no. 12333112
NKKALNGERRRGEGRRREAMVSLKIQKRLAASVMKCGKGKVWLDPNESGDISMANSRQNIRKLVKDGFIIRKPTKIHSRSRARALNEAKRKGRHSGYGKRKGTREARLPTKILWMRRMRVLRRFLSKYRESKKIDRHMYHDMYMKVKGNVFKNKRVLMESIHKMKAEKAREKTLADQFEAKRIKNKASRERKFARREERLAQGPGGGETTTPAGAPQQPEVTKKKSKK

SEQ ID NO: 20980 - protein, 209 aa, Arabidopsis thaliana
  peptide (1)..(209): Ceres Seq. ID no. 12333113
MVSLKIQKRLAASVMKCGKGKVWLDPNESGDISMANSRQNIRKLVKDGFIIRKPTKIHSRSRARALNEAKRKGRHSGYGKRKGTREARLPTKILWMRRMRVLRRFLSKYRESKKIDRHMYHDMYMKVKGNVFKNKRVLMESIHKMKAEKAREKTLADQFEAKRIKNKASRERKFARREERLAQGPGGGETTTPAGAPQQPEVTKKKSKK

SEQ ID NO: 20981 - protein, 195 aa, Arabidopsis thaliana
  peptide (1)..(195): Ceres Seq. ID no. 12333114
MKCGKGKVWLDPNESGDISMANSRQNIRKLVKDGFIIRKPTKIHSRSRARALNEAKRKGRHSGYGKRKGTREARLPTKILWMRRMRVLRRFLSKYRESKKIDRHMYHDMYMKVKGNVFKNKRVLMESIHKMKAEKAREKTLADQFEAKRIKNKASRERKFARREERLAQGPGGGETTTPAGAPQQPEVTKKKSKK

SEQ ID NO: 20982 - DNA, 906 bp, Arabidopsis thaliana
  misc_feature (1)..(906): Ceres Seq. ID no. 13499487
  misc_feature (1)..(906): Ortholog of  Ceres SEQ ID NO 14304561 as cited in SEQ ID NO 53886
  misc_feature (1)..(906): Ortholog of  Ceres SEQ ID NO 14307186 as cited in SEQ ID NO 54806
  misc_feature (1)..(906): Ortholog of  Ceres SEQ ID NO 15179828 as cited in SEQ ID NO 66338
cttttacaaagacaagccttttcaacacactactgatcttgagaatcctctcttcaaagccatggcgttagaactatggcaaactctcaaagaagcaatccatgcttacacaggtctttctcctgttgtcttcttcactgctctagctctcgccttcgccatttaccaagtcatctcaggctggtttgcctcgccgttcgatgatgttaaccgacatcagagagctagatccttggctcaagaggaggagccaccgattcctcagcctgttcaagtcggtgagatcacggaggaggagcttaaacagtacgatggctctgatcctcaaaagccccttcttatggctatcaaacatcagatctatgatgttacacaaagcaggatgttctacggaccaggaggaccatatgctttgtttgcagggaaagacgctagccgagctcttgcaaagatgtcatttgaggagaaagacttgacttgggatgtctctggtcttggtccctttgagctagatgctcttcaagattgggagtacaagttcatgagcaagtatgctaaggttggtactgtcaaagtggctggttcagaacctgaaaccgcatctgtctctgaacccacagagaatgttgagcaagatgctcatgtaaccacaacgcctgggaagaccgttgttgataagagtgatgatgctcctgctgagactgtgttgaagaaggaggagtagagcccatttccaagatttgctctgatttgtcatagagaccagttttatgaaaaggattgtagaatctctaatgttgaagtgtcaatgataatcttgttttactttcccaaaaaataaagattgctgattaatgataagaaaaaaatgttttataaactgcatatcagaaggcgttgcattgc

SEQ ID NO: 20983 - protein, 240 aa, Arabidopsis thaliana
  peptide (1)..(240): Ceres Seq. ID no. 13499488
FYKDKPFQHTTDLENPLFKAMALELWQTLKEAIHAYTGLSPVVFFTALALAFAIYQVISGWFASPFDDVNRHQRARSLAQEEEPPIPQPVQVGEITEEELKQYDGSDPQKPLLMAIKHQIYDVTQSRMFYGPGGPYALFAGKDASRALAKMSFEEKDLTWDVSGLGPFELDALQDWEYKFMSKYAKVGTVKVAGSEPETASVSEPTENVEQDAHVTTTPGKTVVDKSDDAPAETVLKKEE

SEQ ID NO: 20984 - protein, 220 aa, Arabidopsis thaliana
  peptide (1)..(220): Ceres Seq. ID no. 13499489
MALELWQTLKEAIHAYTGLSPVVFFTALALAFAIYQVISGWFASPFDDVNRHQRARSLAQEEEPPIPQPVQVGEITEEELKQYDGSDPQKPLLMAIKHQIYDVTQSRMFYGPGGPYALFAGKDASRALAKMSFEEKDLTWDVSGLGPFELDALQDWEYKFMSKYAKVGTVKVAGSEPETASVSEPTENVEQDAHVTTTPGKTVVDKSDDAPAETVLKKEE

SEQ ID NO: 20985 - protein, 127 aa, Arabidopsis thaliana
  peptide (1)..(127): Ceres Seq. ID no. 13499490
MAIKHQIYDVTQSRMFYGPGGPYALFAGKDASRALAKMSFEEKDLTWDVSGLGPFELDALQDWEYKFMSKYAKVGTVKVAGSEPETASVSEPTENVEQDAHVTTTPGKTVVDKSDDAPAETVLKKEE

SEQ ID NO: 20986 - DNA, 936 bp, Arabidopsis thaliana
  misc_feature (1)..(936): Ceres Seq. ID no. 13493724
  misc_feature (1)..(936): Ortholog of  Ceres SEQ ID NO 13595569 as cited in SEQ ID NO 56778
  misc_feature (1)..(936): Ortholog of  Ceres SEQ ID NO 12611159 as cited in SEQ ID NO 59821
aacccacaaattgatctcttctctcttctcttacaccatcttcttcattcaccatgggaagatctccttgttgtgaaaaagctcacacaaacaaaggagcttggactaaagaagaagatcaacgtctcgtagattatatccgtaatcacggtgaaggttgttggcgttctcttcctaaatccgctggattgttgcgttgtggtaaaagttgtagattgagatggattaattaccttcgtcctgatcttaaacgtggtaattttactgatgatgaagatcaaatcatcatcaaactccatagcttactcggtaacaaatggtcattgatagctggaagattaccaggaagaacagataacgaaataaagaattattggaacactcatattaagaggaagcttcttagtcacggtattgatccacaaactcatcgtcagattaacgaatccaaaacggtgtcgtctcaagttgttgttcctattcaaaacgatgccgttgagtattctttttccaatttagccgttaaaccgaagacggaaaattcctccgataacggagcttcgactagcggcacgacgacggacgaggatctccggcagaatggggagtgttattatagtgataattcaggacatataaagctgaatttggatttaactcttgggtttggatcctggtcgggtcggatagtcggagtcgggtcatcggctgattctaaaccgtggtgcgacccggtgatggaggcgcgtttgtcactgttgtaataatttgtcaaaaaaatcccaaaaaatgggttttgttacttcattttttttttgcttgagtccttttggataaatatagaaattctttacttcagtttctttggtatttttgttttagtttttgttcatattaccttttgaagaaaaagaaaaaaaacgatacatggtttcc

SEQ ID NO: 20987 - protein, 236 aa, Arabidopsis thaliana
  peptide (1)..(236): Ceres Seq. ID no. 13493725
MGRSPCCEKAHTNKGAWTKEEDQRLVDYIRNHGEGCWRSLPKSAGLLRCGKSCRLRWINYLRPDLKRGNFTDDEDQIIIKLHSLLGNKWSLIAGRLPGRTDNEIKNYWNTHIKRKLLSHGIDPQTHRQINESKTVSSQVVVPIQNDAVEYSFSNLAVKPKTENSSDNGASTSGTTTDEDLRQNGECYYSDNSGHIKLNLDLTLGFGSWSGRIVGVGSSADSKPWCDPVMEARLSLL

SEQ ID NO: 20988 - DNA, 667 bp, Arabidopsis thaliana
  misc_feature (1)..(667): Ceres Seq. ID no. 12332311
  misc_feature (1)..(667): Ortholog of  Ceres SEQ ID NO 13594922 as cited in SEQ ID NO 55751
aaatcgaagctggaactaacccactgcgatcggggaagaaacagctcgagtctcgagagacgccatggaaatttcccaagctcgttctagcttcgtttgtcttcttctgttactctccatttttttcattccctgcgtcttttccaaatctcctcgtcctatctcagatgtggagatcaggcagaagaagagcgaatgctacggtgatatagagagtgggttatggggttggcaatgcaaatcttctgcaatagcgaaagagaattgtgcgctgcgatgcctttctccggtttgctatcagctcatttatgagagtgatccgcttgaagaaggtgaaaaagatttgattaggagccaagagtacaagtattgtatgtacaagtcatcactcggggaaagcttagagggtgttcgaggcatcttttgatggtatcaaataagactttctcagtgaagacatttgccaaaagctgagctaagctcttgaatttctgatcagtagtattctgctctgtcgcgtttgaagccatgtaaggcttcttttattataaacctcaatttttgggttaatggttgtttttatgaaacgtttacgtttatgattggcaaatccactgaatcttgaaaccattgtacaaatcagtcttaatacgcacagattggtccc

SEQ ID NO: 20989 - protein, 120 aa, Arabidopsis thaliana
  peptide (1)..(120): Ceres Seq. ID no. 12332312
MEISQARSSFVCLLLLLSIFFIPCVFSKSPRPISDVEIRQKKSECYGDIESGLWGWQCKSSAIAKENCALRCLSPVCYQLIYESDPLEEGEKDLIRSQEYKYCMYKSSLGESLEGVRGIF

SEQ ID NO: 20990 - protein, 69 aa, Arabidopsis thaliana
  peptide (1)..(69): Ceres Seq. ID no. 12332313
IEAGTNPLRSGKKQLESRETPWKFPKLVLASFVFFCYSPFFSFPASFPNLLVLSQMWRSGRRRANATVI

SEQ ID NO: 20991 - DNA, 710 bp, Arabidopsis thaliana
  misc_feature (1)..(710): Ceres Seq. ID no. 13489897
  misc_feature (1)..(710): Ortholog of  Ceres SEQ ID NO 13595763 as cited in SEQ ID NO 57864
gttctaaaattaagacaactctaaatgttagtatcgtttctgtaatatttattatatcctcttcttcttttttactgattcatcaaatcggggatcggataagcctgactgcttcagggtttaagggttactctcactcacacttccgctggtttgacaagattggataaaagcagccatggcaagtctgataatgactacaccattcccaggttctgtcactacatgtaagaagacaaataacctgtcagttcaaagagcctttagggtgacttgtatgcagacagagaaaccattagaggagctatacaatgttaaagtggaacggaaagtttcacagaaacggttggaggaacttggggtttcgagatggtcagtttggaagacagggaaatgcaaattgccatgggattggcaggtggatcagttggtttacattgaacaaggagaggttcgagttgttcccgaaggaagcaagaggtatatgcagtttttagctggagatcttgttcggtatccgaaatggttggaagctgatcttttctttaacgctccttatattgagcggtattgtttcaaggcctatggtgatgattgatccaactttgacttttgagtttttagtagagccaagaaactttacacttgttgtgtgttgttgtagcctgatggatctttttgtgataatataagaaaacaagttctctctc

SEQ ID NO: 20992 - protein, 139 aa, Arabidopsis thaliana
  peptide (1)..(139): Ceres Seq. ID no. 13489898
MASLIMTTPFPGSVTTCKKTNNLSVQRAFRVTCMQTEKPLEELYNVKVERKVSQKRLEELGVSRWSVWKTGKCKLPWDWQVDQLVYIEQGEVRVVPEGSKRYMQFLAGDLVRYPKWLEADLFFNAPYIERYCFKAYGDD

SEQ ID NO: 20993 - protein, 134 aa, Arabidopsis thaliana
  peptide (1)..(134): Ceres Seq. ID no. 13489899
MTTPFPGSVTTCKKTNNLSVQRAFRVTCMQTEKPLEELYNVKVERKVSQKRLEELGVSRWSVWKTGKCKLPWDWQVDQLVYIEQGEVRVVPEGSKRYMQFLAGDLVRYPKWLEADLFFNAPYIERYCFKAYGDD

SEQ ID NO: 20994 - protein, 106 aa, Arabidopsis thaliana
  peptide (1)..(106): Ceres Seq. ID no. 13489900
MQTEKPLEELYNVKVERKVSQKRLEELGVSRWSVWKTGKCKLPWDWQVDQLVYIEQGEVRVVPEGSKRYMQFLAGDLVRYPKWLEADLFFNAPYIERYCFKAYGDD

SEQ ID NO: 20995 - DNA, 818 bp, Arabidopsis thaliana
  misc_feature (1)..(818): Ceres Seq. ID no. 12330146
  misc_feature (1)..(818): Ortholog of  Ceres SEQ ID NO 13647991 as cited in SEQ ID NO 187
atccataacccaaaaagagtcacttccgtgtcacaagaaaccatgaaaccttctcttcatcaaccacttttcttcttcttcttagccaccgtcctcccattaatcctgaccgtccattctcaatcagacgactcagatttcatccgtactagctgcaacactacattataccctgacctatgcttctcctctctttcctccttctctagctctgtccacaacgatccagccctcttggctcgagccgccatctccatcactctcaccaagactctcgacttagcctcatacctcgccaatatcaccactctccagccggagagccaagacgatggtgcccaccacccaaccgcagccgctgtttttcatgactgcttcgacaatcttaaagacgcggtcgaagaaatgaaaggctctatgaaacagatgagggaactggtctcgactggctcgctcgagtccttcaggttccaaatgagtaacgtgcagacgtggctcagtgcggctttaactgatgaggagacttgtacggacggatttaaagacattcacgatgagccgaggaaggatgacatatgcgcacgggtcgatgacgtcaaaaagatgactagtaacgcgttggctctagttaatcgatgtgttgataaggccatacattgatcattttatcattattcactaaatattcttcttctttttttttcttacttgaaaaagaaattattgtttaaatgtttttggttatcacgcgtgcatgatagagatataataagataagcctgtttgtgattggctgtaatgaaatagtgatattatgt

SEQ ID NO: 20996 - protein, 219 aa, Arabidopsis thaliana
  peptide (1)..(219): Ceres Seq. ID no. 12330147
IHNPKRVTSVSQETMKPSLHQPLFFFFLATVLPLILTVHSQSDDSDFIRTSCNTTLYPDLCFSSLSSFSSSVHNDPALLARAAISITLTKTLDLASYLANITTLQPESQDDGAHHPTAAAVFHDCFDNLKDAVEEMKGSMKQMRELVSTGSLESFRFQMSNVQTWLSAALTDEETCTDGFKDIHDEPRKDDICARVDDVKKMTSNALALVNRCVDKAIH

SEQ ID NO: 20997 - protein, 205 aa, Arabidopsis thaliana
  peptide (1)..(205): Ceres Seq. ID no. 12330148
MKPSLHQPLFFFFLATVLPLILTVHSQSDDSDFIRTSCNTTLYPDLCFSSLSSFSSSVHNDPALLARAAISITLTKTLDLASYLANITTLQPESQDDGAHHPTAAAVFHDCFDNLKDAVEEMKGSMKQMRELVSTGSLESFRFQMSNVQTWLSAALTDEETCTDGFKDIHDEPRKDDICARVDDVKKMTSNALALVNRCVDKAIH

SEQ ID NO: 20998 - DNA, 2384 bp, Arabidopsis thaliana
  misc_feature (1)..(2384): Ceres Seq. ID no. 12372001
  misc_feature (1)..(2384): Ortholog of  Ceres SEQ ID NO 13584744 as cited in SEQ ID NO 69137
acaacactaccaacactctctcttgcttcctctcctctctgttttttctagctttctctctcacaaaatcaaaactttttttctgtgttcattatcatctccttaaattcataacaatacactctcataattcttctctgcgtaggagagacattgcagaaataaaagagtttttaatagacgcaagaaaaagagaaaaaagcattcatttttttcttgctttgttgctttgcttttgcttttctgtttctcttcttttgtgggcacaacaaaacatcaacaaagtaatgattttgtgttcttccttctccttctggtaatctaatctaaagcttttcatggtggtgatgaagttaataacaatgaagatattctctgttctgttactactatgtttcttcgttacttgttctctctcttctgaacccagaaaccctgaagtggaggcgttgataaacataaagaacgagttacatgatccacatggtgttttcaaaaactgggatgagttttctgttgatccttgtagctggactatgatctcttgttcttcagacaacctcgtaattggcttaggagctccaagtcagtctctttcaggaactttatctgggtctattggaaatctcactaatcttcgacaagtgtcattacagaacaataacatctccggtaaaatcccaccggagatttgttctcttcccaaattacagactctggatttatccaataaccggttctccggtgaaatccccggttctgttaaccagctgagtaatctccaatatctgaggttgaacaacaactcattatctgggccctttcctgcttctctgtctcaaatccctcacctctctttcttagacttgtcttataacaatctcagaggtcctgttcctaaatttcctgcaaggacattcaatgttgctgggaaccctttgatttgtaaaaacagcctaccggagatttgttcaggatcaatcagtgcaagccctctttctgtctctttacgttcttcatcaggacgtagaaccaacatattagcagttgcacttggtgtaagccttggctttgctgttagtgtaatcctctctctcgggttcatttggtatcgaaagaaacaaagacggttaacgatgcttcgcattagtgacaagcaagaggaagggttactagggttgggaaatctaagaagcttcacattcagggaacttcatgtagctacggatggttttagttccaagagtattcttggtgctggtgggtttggtaatgtctacagaggaaaattcggggatgggacagtggttgcagtgaaacgattgaaagatgtgaatggaacctccgggaactcacagtttcgtactgagcttgagatgatcagcttagctgttcataggaatttgcttcggttaatcggttattgtgcgagttctagcgaaagacttcttgtttacccttacatgtccaatggcagcgtcgcctctaggctcaaagctaagccagcgttggactggaacacaaggaagaagatagcaattggagctgcaagagggttgttttatctacacgagcaatgcgatcccaagattattcaccgagatgtcaaggcagcaaacattctcctagatgagtattttgaagcagttgttggggattttggactagcaaagctactcaaccacgaggattcacatgtcacaaccgcggttagaggaactgttggtcacattgcacccgagtatctctccactggtcagtcatctgagaaaaccgatgtctttgggttcggtatacttttgctagagctcatcacaggaatgagagctctcgagtttggcaagtctgttagccagaaaggagctatgctagaatgggtgaggaagctacacaaggaaatgaaagtagaggagctagtagaccgagaactggggacaacctacgatagaatagaagttggagagatgctacaagtggcactgctctgcactcagtttcttccagctcacagacccaaaatgtctgaagtagttcagatgcttgaaggagatggattagctgagagatgggctgcttcacatgaccattcacatttctaccatgccaacatgtcttacaggactattacctctactgatggcaacaaccaaaccaaacatctgtttggctcctcaggatttgaagatgaagatgataatcaagcgttagattcattcgccatggaactatctggtccaaggtagtaaatcttggacacagaaagaaacagatataatatccccatgacttcaatttttgtttttgagatgatatagacatgtaaatggttatcaaacctttgaaaaaattgagattctgggtctaatggttaatattttggatgt

SEQ ID NO: 20999 - protein, 634 aa, Arabidopsis thaliana
  peptide (1)..(634): Ceres Seq. ID no. 12372002
MVVMKLITMKIFSVLLLLCFFVTCSLSSEPRNPEVEALINIKNELHDPHGVFKNWDEFSVDPCSWTMISCSSDNLVIGLGAPSQSLSGTLSGSIGNLTNLRQVSLQNNNISGKIPPEICSLPKLQTLDLSNNRFSGEIPGSVNQLSNLQYLRLNNNSLSGPFPASLSQIPHLSFLDLSYNNLRGPVPKFPARTFNVAGNPLICKNSLPEICSGSISASPLSVSLRSSSGRRTNILAVALGVSLGFAVSVILSLGFIWYRKKQRRLTMLRISDKQEEGLLGLGNLRSFTFRELHVATDGFSSKSILGAGGFGNVYRGKFGDGTVVAVKRLKDVNGTSGNSQFRTELEMISLAVHRNLLRLIGYCASSSERLLVYPYMSNGSVASRLKAKPALDWNTRKKIAIGAARGLFYLHEQCDPKIIHRDVKAANILLDEYFEAVVGDFGLAKLLNHEDSHVTTAVRGTVGHIAPEYLSTGQSSEKTDVFGFGILLLELITGMRALEFGKSVSQKGAMLEWVRKLHKEMKVEELVDRELGTTYDRIEVGEMLQVALLCTQFLPAHRPKMSEVVQMLEGDGLAERWAASHDHSHFYHANMSYRTITSTDGNNQTKHLFGSSGFEDEDDNQALDSFAMELSGPR

SEQ ID NO: 21000 - protein, 631 aa, Arabidopsis thaliana
  peptide (1)..(631): Ceres Seq. ID no. 12372003
MKLITMKIFSVLLLLCFFVTCSLSSEPRNPEVEALINIKNELHDPHGVFKNWDEFSVDPCSWTMISCSSDNLVIGLGAPSQSLSGTLSGSIGNLTNLRQVSLQNNNISGKIPPEICSLPKLQTLDLSNNRFSGEIPGSVNQLSNLQYLRLNNNSLSGPFPASLSQIPHLSFLDLSYNNLRGPVPKFPARTFNVAGNPLICKNSLPEICSGSISASPLSVSLRSSSGRRTNILAVALGVSLGFAVSVILSLGFIWYRKKQRRLTMLRISDKQEEGLLGLGNLRSFTFRELHVATDGFSSKSILGAGGFGNVYRGKFGDGTVVAVKRLKDVNGTSGNSQFRTELEMISLAVHRNLLRLIGYCASSSERLLVYPYMSNGSVASRLKAKPALDWNTRKKIAIGAARGLFYLHEQCDPKIIHRDVKAANILLDEYFEAVVGDFGLAKLLNHEDSHVTTAVRGTVGHIAPEYLSTGQSSEKTDVFGFGILLLELITGMRALEFGKSVSQKGAMLEWVRKLHKEMKVEELVDRELGTTYDRIEVGEMLQVALLCTQFLPAHRPKMSEVVQMLEGDGLAERWAASHDHSHFYHANMSYRTITSTDGNNQTKHLFGSSGFEDEDDNQALDSFAMELSGPR

SEQ ID NO: 21001 - protein, 626 aa, Arabidopsis thaliana
  peptide (1)..(626): Ceres Seq. ID no. 12372004
MKIFSVLLLLCFFVTCSLSSEPRNPEVEALINIKNELHDPHGVFKNWDEFSVDPCSWTMISCSSDNLVIGLGAPSQSLSGTLSGSIGNLTNLRQVSLQNNNISGKIPPEICSLPKLQTLDLSNNRFSGEIPGSVNQLSNLQYLRLNNNSLSGPFPASLSQIPHLSFLDLSYNNLRGPVPKFPARTFNVAGNPLICKNSLPEICSGSISASPLSVSLRSSSGRRTNILAVALGVSLGFAVSVILSLGFIWYRKKQRRLTMLRISDKQEEGLLGLGNLRSFTFRELHVATDGFSSKSILGAGGFGNVYRGKFGDGTVVAVKRLKDVNGTSGNSQFRTELEMISLAVHRNLLRLIGYCASSSERLLVYPYMSNGSVASRLKAKPALDWNTRKKIAIGAARGLFYLHEQCDPKIIHRDVKAANILLDEYFEAVVGDFGLAKLLNHEDSHVTTAVRGTVGHIAPEYLSTGQSSEKTDVFGFGILLLELITGMRALEFGKSVSQKGAMLEWVRKLHKEMKVEELVDRELGTTYDRIEVGEMLQVALLCTQFLPAHRPKMSEVVQMLEGDGLAERWAASHDHSHFYHANMSYRTITSTDGNNQTKHLFGSSGFEDEDDNQALDSFAMELSGPR

SEQ ID NO: 21002 - DNA, 1155 bp, Arabidopsis thaliana
  misc_feature (1)..(1155): Ceres Seq. ID no. 13504851
  misc_feature (1)..(1155): Ortholog of  Ceres SEQ ID NO 14315410 as cited in SEQ ID NO 57189
gttatttcattttcaagctctggacatttgattggtgatgaagctgagggagtgaatttatggcttaagatagtcttcaaagctacatacaaaactatattacaatttcgaagctgcccatggccatggcgttacagattatagcttcttcttcttcatcaccaacgattacaaaatctcaccttttctcttatcctcctctgcaatctcgttataaagcttcgaaacctaacctctcctcatggttttctcttctgggttcttctcgtttctctccttacattggtttaaagcatttgggcatctcaatctcgccgaaatcttcaaacccagagaagaagagaagatgtaagagtatgatgattcgtgcgtctctgtttggtgttggagcacctgaggctttggttattggtgttgttgctttgttagtctttggtcctaaaggtcttgctgaggtagctcggaatcttggaaaaactctgcgtacatttcagccaacgattagagagctacaggatgtttcaagagattttaaaagtacccttgagcgtgaaattggccttgatgatatctcaacgccaaacgtgtacaaccaaaacagaacgaatcctgttcaacctcctcctccaccaccaccaccatcagttcctagcactgaagctcctgtgactgcaaatgatcccaatgattcacaatcaccaaaagcttacacatccgaggattacctcaagttcactgaagagcagctaaaagctttgtctcccgctgaaagccaaacagaggatcaaactcagactcaagaaccgccacaacccacaactgtacaaacacctaccggagaaagccagcccaatggtacagcgagagaaacaacagctgcatctcctccaaggcaagattgaaagcaccaaaatatgacttgtagtgttaaaaagcataagcctctctatactgggaagctgctgagggaatttttttgatctgccaaaaaggacgaagctattagctctcaggacattctcgcaaagctgtatgtgcatcttgataatatgtctgtgtatttatgttacattagattctttcttaatggtaattgagtttattaggtcaaagcttggaaaataatgaaatgagtataaattattggctcttgct

SEQ ID NO: 21003 - protein, 260 aa, Arabidopsis thaliana
  peptide (1)..(260): Ceres Seq. ID no. 13504852
MAMALQIIASSSSSPTITKSHLFSYPPLQSRYKASKPNLSSWFSLLGSSRFSPYIGLKHLGISISPKSSNPEKKRRCKSMMIRASLFGVGAPEALVIGVVALLVFGPKGLAEVARNLGKTLRTFQPTIRELQDVSRDFKSTLEREIGLDDISTPNVYNQNRTNPVQPPPPPPPPSVPSTEAPVTANDPNDSQSPKAYTSEDYLKFTEEQLKALSPAESQTEDQTQTQEPPQPTTVQTPTGESQPNGTARETTAASPPRQD

SEQ ID NO: 21004 - protein, 258 aa, Arabidopsis thaliana
  peptide (1)..(258): Ceres Seq. ID no. 13504853
MALQIIASSSSSPTITKSHLFSYPPLQSRYKASKPNLSSWFSLLGSSRFSPYIGLKHLGISISPKSSNPEKKRRCKSMMIRASLFGVGAPEALVIGVVALLVFGPKGLAEVARNLGKTLRTFQPTIRELQDVSRDFKSTLEREIGLDDISTPNVYNQNRTNPVQPPPPPPPPSVPSTEAPVTANDPNDSQSPKAYTSEDYLKFTEEQLKALSPAESQTEDQTQTQEPPQPTTVQTPTGESQPNGTARETTAASPPRQD

SEQ ID NO: 21005 - protein, 181 aa, Arabidopsis thaliana
  peptide (1)..(181): Ceres Seq. ID no. 13504854
MMIRASLFGVGAPEALVIGVVALLVFGPKGLAEVARNLGKTLRTFQPTIRELQDVSRDFKSTLEREIGLDDISTPNVYNQNRTNPVQPPPPPPPPSVPSTEAPVTANDPNDSQSPKAYTSEDYLKFTEEQLKALSPAESQTEDQTQTQEPPQPTTVQTPTGESQPNGTARETTAASPPRQD

SEQ ID NO: 21006 - DNA, 799 bp, Arabidopsis thaliana
  misc_feature (1)..(799): Ceres Seq. ID no. 13580467
  misc_feature (1)..(799): Ortholog of  Ceres SEQ ID NO 12597207 as cited in SEQ ID NO 62146
gatcttttcgaagagcggaagctaaggagaggcgaattcgaatcgagaagatggtgtctggctcagggatatgttcaaagcgtgtcgttgttgacgcacgtcaccatatgtgtggtcgtcttgcttcgatcatagctaaagagttgctcaatggatagagtgttgtccgatgtgaggagatttgtttgtctggtggtttggttcgtcagaagatgaagtacatgaggtttcttaggaaacgcatgaacactaaaccttctcatggtcctattcatttccgtgctccgtctaagatcttctggcgtaccgttcgtgggatgattccacacaagaccaagcgtggtgctgctgctcttgcacgtttgaaggtgtttgagggagtaccacctccttatgacaaggtcaagagaatggtcattcctgatgctctcaaggtgttgaggcttcaggctggtcacaagtactgcttgttgggacgtttgtcttctgaagttgtctggaaccattacgataccatcaaggagcttgaggtgaagagaaaggagaggtcacaagctttgtatgagcgtaagaagcaactcaccaagctcagggcaaaggccgagaaggttgcagaggagaaacttggatcccagctcgatgttcttgcatcgatcaagtactgaagaaaatcagcatctatcttttggtttaactcttgttttggtttttatctattcagattttgttttcttccttgtatcactgttgaagtttatcacctcatttcagttttatttatcagttgatacttcaatcc

SEQ ID NO: 21007 - protein, 150 aa, Arabidopsis thaliana
  peptide (1)..(150): Ceres Seq. ID no. 13580468
MKYMRFLRKRMNTKPSHGPIHFRAPSKIFWRTVRGMIPHKTKRGAAALARLKVFEGVPPPYDKVKRMVIPDALKVLRLQAGHKYCLLGRLSSEVVWNHYDTIKELEVKRKERSQALYERKKQLTKLRAKAEKVAEEKLGSQLDVLASIKY

SEQ ID NO: 21008 - protein, 147 aa, Arabidopsis thaliana
  peptide (1)..(147): Ceres Seq. ID no. 13580469
MRFLRKRMNTKPSHGPIHFRAPSKIFWRTVRGMIPHKTKRGAAALARLKVFEGVPPPYDKVKRMVIPDALKVLRLQAGHKYCLLGRLSSEVVWNHYDTIKELEVKRKERSQALYERKKQLTKLRAKAEKVAEEKLGSQLDVLASIKY

SEQ ID NO: 21009 - protein, 140 aa, Arabidopsis thaliana
  peptide (1)..(140): Ceres Seq. ID no. 13580470
MNTKPSHGPIHFRAPSKIFWRTVRGMIPHKTKRGAAALARLKVFEGVPPPYDKVKRMVIPDALKVLRLQAGHKYCLLGRLSSEVVWNHYDTIKELEVKRKERSQALYERKKQLTKLRAKAEKVAEEKLGSQLDVLASIKY

SEQ ID NO: 21010 - DNA, 974 bp, Arabidopsis thaliana
  misc_feature (1)..(974): Ceres Seq. ID no. 12333995
  misc_feature (1)..(974): Ortholog of  Ceres SEQ ID NO 15173284 as cited in SEQ ID NO 61828
  misc_feature (1)..(974): Ortholog of  Ceres SEQ ID NO 15178906 as cited in SEQ ID NO 0
aattaaataaaagctgttgtttgttgccgaagaaaaagcgagaaaactaggaaaataaaatttgaggaagaagaagccattagaggagtctcaaggtaaagatttctacacgcaactttatgtcttctctgtatgttctttatcctgtagaagagctatcagacgattaaagccctacgatacgagatcaatcgatcaccatcattcaatggaggaatcggtggcttcatcttcctcgcactatatctcaattttcacaaattaccctctgatttccgccgttttagctttcaccatcgcacaattcatcaaattcttcacctcctggtataaagaaaggagatgggatttgaaacggcttgttgggtctggaggtatgccttcatcacattcagcaacggttacagctttagctttagctgttggtttacaagaaggttttggtggttcacatttcgctatcgctttggttctcactaccattgttatgtatgatgcaactggtgtaaggttacatgctggacgccaagctgaggttctaaatcagattgtgtatgaacttcctgcagagcatcctctggctgaaaccagacctttgcgtgaacttctaggtcatactcctccccaggttattgctggtggaatgcttggaatatctacagcagttgttgggtacttagtcatcttgttagccaagtagcttaagctgggaacagcaaaatctcgccttttctgctccattgtgtgtcaaggcgctgctaggtagtttaaaaatagccatgacatgcaaatagaatttggaaattgagcttaatttctctgttttttttgctgctctgttcttgtcattgacaatatattttagttaggtttgctctagtaaaggaaacttgaaacgtcattacacagatctgtaaagtggtaaaatgggagcttgtgcattgaactacaacgaacatgatctgtttagattc

SEQ ID NO: 21011 - protein, 163 aa, Arabidopsis thaliana
  peptide (1)..(163): Ceres Seq. ID no. 12333996
MEESVASSSSHYISIFTNYPLISAVLAFTIAQFIKFFTSWYKERRWDLKRLVGSGGMPSSHSATVTALALAVGLQEGFGGSHFAIALVLTTIVMYDATGVRLHAGRQAEVLNQIVYELPAEHPLAETRPLRELLGHTPPQVIAGGMLGISTAVVGYLVILLAK

SEQ ID NO: 21012 - protein, 107 aa, Arabidopsis thaliana
  peptide (1)..(107): Ceres Seq. ID no. 12333997
MPSSHSATVTALALAVGLQEGFGGSHFAIALVLTTIVMYDATGVRLHAGRQAEVLNQIVYELPAEHPLAETRPLRELLGHTPPQVIAGGMLGISTAVVGYLVILLAK

SEQ ID NO: 21013 - DNA, 968 bp, Arabidopsis thaliana
  misc_feature (1)..(968): Ceres Seq. ID no. 13490353
  misc_feature (1)..(968): Ortholog of  Ceres SEQ ID NO 15178887 as cited in SEQ ID NO 1099
  misc_feature (1)..(968): Ortholog of  Ceres SEQ ID NO 15177541 as cited in SEQ ID NO 0
aaagcccgaccaaaagcttttgattcctcaagagtgaaaatggcgtcgtacacagtctcctttatccctttgacgctctctaatcctcggatctttgtttcgagacagaatggatctccctcgtcttcttctcggattcctctaacgtcttctctgttaggtaagaagcttctggcgacacaaccgtcgcatcgctgcttcgtccccaagctccggtgcttgacctcggccagcacggtcttaaacgtccctattgcgcaaccggagaatggttcttcggataagatcccaaaatggtcggcgagagctataaagtcacttgcaatgggagaattggaggctaggaagctcaagtatccaagtaccgggaccgaagccattctcatgggtattttagtcgaaggcactagcacagttgctaagttcctgagggggaatggagtcacacttttcaaggttcgagatgagacgttaagcctgctggggaaatcagacatgtactttttcagcccagagcatcctcctctaactgagccggctcaaaaggccattgcctgggccattgatgagaagaataaatctgatgtggatggggaactaaccacggcctacttgcttctgggggtttggtctcaaaaggattcagcaggccgccagattttggagaagctcgggtttaacgaagataaagccaaagaagttgagaaatcgatgaatgaagatgtagatttgagcttcaagaaacaaggtcaatagtgatgaggtttatatcgattagaaaagcttctgtaattgttatggagtagcaaaagcaactcttgattaaagactcggccaaagaccccactttcattagtattcactttccatacttgtttgtggttagtgtcatttagcttttccgcattatcacaatatacaactctggcaaatgattcagtgctttggttctccgataggtttttgtt

SEQ ID NO: 21014 - protein, 251 aa, Arabidopsis thaliana
  peptide (1)..(251): Ceres Seq. ID no. 13490354
KARPKAFDSSRVKMASYTVSFIPLTLSNPRIFVSRQNGSPSSSSRIPLTSSLLGKKLLATQPSHRCFVPKLRCLTSASTVLNVPIAQPENGSSDKIPKWSARAIKSLAMGELEARKLKYPSTGTEAILMGILVEGTSTVAKFLRGNGVTLFKVRDETLSLLGKSDMYFFSPEHPPLTEPAQKAIAWAIDEKNKSDVDGELTTAYLLLGVWSQKDSAGRQILEKLGFNEDKAKEVEKSMNEDVDLSFKKQGQ

SEQ ID NO: 21015 - protein, 238 aa, Arabidopsis thaliana
  peptide (1)..(238): Ceres Seq. ID no. 13490355
MASYTVSFIPLTLSNPRIFVSRQNGSPSSSSRIPLTSSLLGKKLLATQPSHRCFVPKLRCLTSASTVLNVPIAQPENGSSDKIPKWSARAIKSLAMGELEARKLKYPSTGTEAILMGILVEGTSTVAKFLRGNGVTLFKVRDETLSLLGKSDMYFFSPEHPPLTEPAQKAIAWAIDEKNKSDVDGELTTAYLLLGVWSQKDSAGRQILEKLGFNEDKAKEVEKSMNEDVDLSFKKQGQ

SEQ ID NO: 21016 - protein, 143 aa, Arabidopsis thaliana
  peptide (1)..(143): Ceres Seq. ID no. 13490356
MGELEARKLKYPSTGTEAILMGILVEGTSTVAKFLRGNGVTLFKVRDETLSLLGKSDMYFFSPEHPPLTEPAQKAIAWAIDEKNKSDVDGELTTAYLLLGVWSQKDSAGRQILEKLGFNEDKAKEVEKSMNEDVDLSFKKQGQ

SEQ ID NO: 21017 - DNA, 878 bp, Arabidopsis thaliana
  misc_feature (1)..(878): Ceres Seq. ID no. 13489013
  misc_feature (1)..(878): Ortholog of  Ceres SEQ ID NO 15178899 as cited in SEQ ID NO 0
atgaagacaacaatggagtgctctctctcatccatcctccttctccttgtactctgcttcactcatcccattccttctctaaccttcgagccactaatctcttctcttgatcttcatgaagaagaaagctgcccttacactgtaattgttaccacaagctgtttctctcctgattggtctagagatcaggtcactatcgctttgggtgacgccgacgataaccaggtggtcgcaccgagactagacaaaccgctaagtggaggaggtggttttgagaaatgttcatcggacacattccaagtcaaaggtaaatgtctcaacactatctgctccgtctacatctaccgttccggtaccgacggctggatcccggagaccgtcgagatatacaaggaaggttccaaatccgtgaaattcgatttcaacaagaacgtccctgaaaacatttggtacggaaacaactattgtaacaacaccgatttgccaccgccttccccggatttccctccgttttctccatccatcccaccgccttcaccaccttattttcctcctgaaccaccttcaatcccgccgccaccaccaccatcaccgccgtctgctgcctctggacgtggaagtggtcagagtttggttgttgcgtttgctgcgtttgtgtttgcgtttgcggctgtggttgtttgagttattttgttaagaattaagagttgtctcaataagtaacgagtatcgtgtaatccctctgttttgtctttgactctttgtagttgaacattgacaatttcatattgtggtaacattaattagttaactaatgtatgagttcgagtttttaacgtactattccttataaattctgcatcaatgttttgtatgtg

SEQ ID NO: 21018 - protein, 227 aa, Arabidopsis thaliana
  peptide (1)..(227): Ceres Seq. ID no. 13489014
MKTTMECSLSSILLLLVLCFTHPIPSLTFEPLISSLDLHEEESCPYTVIVTTSCFSPDWSRDQVTIALGDADDNQVVAPRLDKPLSGGGGFEKCSSDTFQVKGKCLNTICSVYIYRSGTDGWIPETVEIYKEGSKSVKFDFNKNVPENIWYGNNYCNNTDLPPPSPDFPPFSPSIPPPSPPYFPPEPPSIPPPPPPSPPSAASGRGSGQSLVVAFAAFVFAFAAVVV

SEQ ID NO: 21019 - protein, 223 aa, Arabidopsis thaliana
  peptide (1)..(223): Ceres Seq. ID no. 13489015
MECSLSSILLLLVLCFTHPIPSLTFEPLISSLDLHEEESCPYTVIVTTSCFSPDWSRDQVTIALGDADDNQVVAPRLDKPLSGGGGFEKCSSDTFQVKGKCLNTICSVYIYRSGTDGWIPETVEIYKEGSKSVKFDFNKNVPENIWYGNNYCNNTDLPPPSPDFPPFSPSIPPPSPPYFPPEPPSIPPPPPPSPPSAASGRGSGQSLVVAFAAFVFAFAAVVV

SEQ ID NO: 21020 - DNA, 1536 bp, Arabidopsis thaliana
  misc_feature (1)..(1536): Ceres Seq. ID no. 13490062
  misc_feature (1)..(1536): Ortholog of  Ceres SEQ ID NO 15177947 as cited in SEQ ID NO 60308
aaaacagactttttctcttcttcttctttttggggctacgacaatctgaatttgatcccaaatcaaaactttcttcttcttcgtcttcctctaatcaaaactgtctcctaccaaaggtctttcctttctccagccagatatgtgatgtgagaaaaccaagcttctcgtacaacttcatcacctacttccttttgacgttttcaaatcttgagagagatgggtatatatctaagtactccaaaaacagacaagttctcagaagatggcgaaaatcataaactcagatatggtttatcctctatgcaaggttggcgtgcgtccatggaagatgctcatgctgcaatacttgatctcgatgataacacttccttcttgggtgtctatgatggtcatggaggtaaagttgtttctaagttctgtgccaagtatctacaccagcaggttcttagtgatgaggcgtatgcagctggagacgtagggacttctcttcaaaaagcatttttcagaatggatgagatgatgcaaggacaaagagggtggcgagagttagcagtacttggtgacaaaatcaataagttcagtgggatgattgaagggcttatatggtcaccaagaagtggggacagtgctaataaacctgatgcttgggcgtttgaggaaggtcctcattctgattttgctggacctaattctgggagcacggcatgcgtagctgttgttagagacaagcagctatttgttgcaaatgcaggtgactcacgttgtgtgatatccagaaagaatcaggcttataatctttctagagatcacaaaccagatcttgaagctgagaaagaaaggatattgaaagctggtggctttatacatgcagggcgagtcaatggaagcttaaatctatcacgagctatcggtgacatggaattcaagcagaataagtttttgccatctgaaaagcaaatagttaccgctagtccagatgttaacactgttgaactctgtgatgatgatgatttccttgttcttgcctgcgatggaatttgggattgcatgacaagccaacaactcgttgatttcatacatgaacaattgaattcagagaccaaactctcggtggtatgtgaaaaagttctcgatagatgtctggctccaaacacttcaggtggtgaaggctgtgataacatgaccatgatattggttcgattcaagaaccctactccatcagagaccgaactaaaaccagaagcaagccaggcagaaggaaaccacgatgagccgagctcatcaaactaggcccatcctcagagtcacggaagatccctctagatctagtattttggttcagattgtaaatcattttgaaagacagttatatatctcaacctgacgttgatttcagtatatcaccatttcctccgtgtgcagacttttgtctcatgagctcccataatgtagaaaggaataattggtgtaaaaatgttgttggccttaaaagaacatatcatcatgtaaataaacaaaacaataagacatttacac

SEQ ID NO: 21021 - protein, 357 aa, Arabidopsis thaliana
  peptide (1)..(357): Ceres Seq. ID no. 13490063
MGIYLSTPKTDKFSEDGENHKLRYGLSSMQGWRASMEDAHAAILDLDDNTSFLGVYDGHGGKVVSKFCAKYLHQQVLSDEAYAAGDVGTSLQKAFFRMDEMMQGQRGWRELAVLGDKINKFSGMIEGLIWSPRSGDSANKPDAWAFEEGPHSDFAGPNSGSTACVAVVRDKQLFVANAGDSRCVISRKNQAYNLSRDHKPDLEAEKERILKAGGFIHAGRVNGSLNLSRAIGDMEFKQNKFLPSEKQIVTASPDVNTVELCDDDDFLVLACDGIWDCMTSQQLVDFIHEQLNSETKLSVVCEKVLDRCLAPNTSGGEGCDNMTMILVRFKNPTPSETELKPEASQAEGNHDEPSSSN

SEQ ID NO: 21022 - protein, 329 aa, Arabidopsis thaliana
  peptide (1)..(329): Ceres Seq. ID no. 13490064
MQGWRASMEDAHAAILDLDDNTSFLGVYDGHGGKVVSKFCAKYLHQQVLSDEAYAAGDVGTSLQKAFFRMDEMMQGQRGWRELAVLGDKINKFSGMIEGLIWSPRSGDSANKPDAWAFEEGPHSDFAGPNSGSTACVAVVRDKQLFVANAGDSRCVISRKNQAYNLSRDHKPDLEAEKERILKAGGFIHAGRVNGSLNLSRAIGDMEFKQNKFLPSEKQIVTASPDVNTVELCDDDDFLVLACDGIWDCMTSQQLVDFIHEQLNSETKLSVVCEKVLDRCLAPNTSGGEGCDNMTMILVRFKNPTPSETELKPEASQAEGNHDEPSSSN

SEQ ID NO: 21023 - protein, 322 aa, Arabidopsis thaliana
  peptide (1)..(322): Ceres Seq. ID no. 13490065
MEDAHAAILDLDDNTSFLGVYDGHGGKVVSKFCAKYLHQQVLSDEAYAAGDVGTSLQKAFFRMDEMMQGQRGWRELAVLGDKINKFSGMIEGLIWSPRSGDSANKPDAWAFEEGPHSDFAGPNSGSTACVAVVRDKQLFVANAGDSRCVISRKNQAYNLSRDHKPDLEAEKERILKAGGFIHAGRVNGSLNLSRAIGDMEFKQNKFLPSEKQIVTASPDVNTVELCDDDDFLVLACDGIWDCMTSQQLVDFIHEQLNSETKLSVVCEKVLDRCLAPNTSGGEGCDNMTMILVRFKNPTPSETELKPEASQAEGNHDEPSSSN

SEQ ID NO: 21024 - DNA, 801 bp, Arabidopsis thaliana
  misc_feature (1)..(801): Ceres Seq. ID no. 12369931
  misc_feature (1)..(801): Ortholog of  Ceres SEQ ID NO 13596325 as cited in SEQ ID NO 67987
atttttctctcagaatccataaaaagagagagagataaataaagagaaaactaaagaagctagaagatggagaaaagtaatgatcatgacaaggctagccacggcggctccggtggtggtgccacggagaagtgggaggagactagcctcggaatccgaactgccgagacaatgctccggttagctccggtgggcctttgtgttgcagcacttgttgtcatgcttaaggactctgagactaatgagttcggttcaatttcttactccaatctcacagcctttaggtacttggtgcacgcaaatggaatatgtgcaggctactctcttctatcagcagccattgcagcgatgcctcgttcttcttcgacaatgcctcgtgtttggaccttcttttgtctcgaccagcttctgacctacctggttcttgctgctggagctgtatcagctgaggttctatacttggcttacaatggagactcagccattacttggagcgatgcatgtagctcctatggcggtttctgtcatagagccactgcttctgttataatcacattctttgtggtttgtttctacatcgttctctctctaatctcctcttataagctctttactcgctttgatcctccttccattgttgactccgccaagaatctcgaagtcgctgtcttcggaagttagatcctccatttgctcttcaagtacatctagtttgtcatgtttcaaatgttgtgtgtttttaactttggtcaagagaaagaatgcttatgtgtttgctcttgtttcattgcttttcttcct

SEQ ID NO: 21025 - protein, 204 aa, Arabidopsis thaliana
  peptide (1)..(204): Ceres Seq. ID no. 12369932
MEKSNDHDKASHGGSGGGATEKWEETSLGIRTAETMLRLAPVGLCVAALVVMLKDSETNEFGSISYSNLTAFRYLVHANGICAGYSLLSAAIAAMPRSSSTMPRVWTFFCLDQLLTYLVLAAGAVSAEVLYLAYNGDSAITWSDACSSYGGFCHRATASVIITFFVVCFYIVLSLISSYKLFTRFDPPSIVDSAKNLEVAVFGS

SEQ ID NO: 21026 - protein, 169 aa, Arabidopsis thaliana
  peptide (1)..(169): Ceres Seq. ID no. 12369933
MLRLAPVGLCVAALVVMLKDSETNEFGSISYSNLTAFRYLVHANGICAGYSLLSAAIAAMPRSSSTMPRVWTFFCLDQLLTYLVLAAGAVSAEVLYLAYNGDSAITWSDACSSYGGFCHRATASVIITFFVVCFYIVLSLISSYKLFTRFDPPSIVDSAKNLEVAVFGS

SEQ ID NO: 21027 - protein, 153 aa, Arabidopsis thaliana
  peptide (1)..(153): Ceres Seq. ID no. 12369934
MLKDSETNEFGSISYSNLTAFRYLVHANGICAGYSLLSAAIAAMPRSSSTMPRVWTFFCLDQLLTYLVLAAGAVSAEVLYLAYNGDSAITWSDACSSYGGFCHRATASVIITFFVVCFYIVLSLISSYKLFTRFDPPSIVDSAKNLEVAVFGS

SEQ ID NO: 21028 - DNA, 1214 bp, Arabidopsis thaliana
  misc_feature (1)..(1214): Ceres Seq. ID no. 12334524
  misc_feature (1)..(1214): Ortholog of  Ceres SEQ ID NO 13594176 as cited in SEQ ID NO 59144
agtttcctttggatttcagatttcgtgagcttattcttacctttctctcgaaggaagctctcatcttttcactcagatcacgttccctgggcttattcgcttgtatctgttgatatacaagatggcatctgcgactctgagaaggcggcttcatcacggtgatgtagatgggaggaagtatgaacgctatgatgcaacagactctgaaactttaagtgaacccttgttaggaagtagtagtactgataatagtagaaatgagtacattgaggagcgtactctggaggatatttgggaagaagaacggaagagacagcaagttcactggacgttaatcttttctcagttgattgcacagtgggctcagtggatagccaaaatagtctttggatctggctcacttgttgggaggtttctttctctgcctacatttggtcaaataggtactggtgggaggcttctgccaccacctcttagtatgttgcaggaagaaaggctgagaaatattaagcgaagaatagaaatcccatttgatggatctcgaatggagcatcaagatgctcttagacaactatggaggctagcttatccacagagagaactaccacctcttaaatctgaactctggaaggaaatgggttggcaaggaacagacccttcaacagattttcgaggtggagggtatatatcactggagaatctaatcttctttgcgaagacctatccggaatcattccagagattgttacataaacaagatggaactagagcggaatgggaatatcctttcgcggtggctggcatcaatatctcattcatgctggcacaaatgttagatcttcaatcaggtaaaccatcaacaatagccgggataagattcttgggatttctggaagaagacgaaatggcattcgataatctctactgtatagctttccaaatgatggatgcacaatggcttgctagacgagcttcttacatggaattcaatgacgtcctgaaatcgacgagagcacaattggaacgtgagctggcactggatgatgtttcaagcatcacagacttgcctgctttcaatcttttgtacaaataaattgttaaatttcctacaatttctatctgtatttagataataattatctgagaaattcagtgtaacaaataatcagtttttgctgaaattgctcggcaagtataatttcatcagaagattt

SEQ ID NO: 21029 - protein, 323 aa, Arabidopsis thaliana
  peptide (1)..(323): Ceres Seq. ID no. 12334525
MASATLRRRLHHGDVDGRKYERYDATDSETLSEPLLGSSSTDNSRNEYIEERTLEDIWEEERKRQQVHWTLIFSQLIAQWAQWIAKIVFGSGSLVGRFLSLPTFGQIGTGGRLLPPPLSMLQEERLRNIKRRIEIPFDGSRMEHQDALRQLWRLAYPQRELPPLKSELWKEMGWQGTDPSTDFRGGGYISLENLIFFAKTYPESFQRLLHKQDGTRAEWEYPFAVAGINISFMLAQMLDLQSGKPSTIAGIRFLGFLEEDEMAFDNLYCIAFQMMDAQWLARRASYMEFNDVLKSTRAQLERELALDDVSSITDLPAFNLLYK

SEQ ID NO: 21030 - protein, 204 aa, Arabidopsis thaliana
  peptide (1)..(204): Ceres Seq. ID no. 12334526
MLQEERLRNIKRRIEIPFDGSRMEHQDALRQLWRLAYPQRELPPLKSELWKEMGWQGTDPSTDFRGGGYISLENLIFFAKTYPESFQRLLHKQDGTRAEWEYPFAVAGINISFMLAQMLDLQSGKPSTIAGIRFLGFLEEDEMAFDNLYCIAFQMMDAQWLARRASYMEFNDVLKSTRAQLERELALDDVSSITDLPAFNLLYK

SEQ ID NO: 21031 - protein, 182 aa, Arabidopsis thaliana
  peptide (1)..(182): Ceres Seq. ID no. 12334527
MEHQDALRQLWRLAYPQRELPPLKSELWKEMGWQGTDPSTDFRGGGYISLENLIFFAKTYPESFQRLLHKQDGTRAEWEYPFAVAGINISFMLAQMLDLQSGKPSTIAGIRFLGFLEEDEMAFDNLYCIAFQMMDAQWLARRASYMEFNDVLKSTRAQLERELALDDVSSITDLPAFNLLYK

SEQ ID NO: 21032 - DNA, 1104 bp, Arabidopsis thaliana
  misc_feature (1)..(1104): Ceres Seq. ID no. 12483988
  misc_feature (1)..(1104): Ortholog of  Ceres SEQ ID NO 14311671 as cited in SEQ ID NO 51251
  misc_feature (1)..(1104): Ortholog of  Ceres SEQ ID NO 14304791 as cited in SEQ ID NO 53562
  misc_feature (1)..(1104): Ortholog of  Ceres SEQ ID NO 14307355 as cited in SEQ ID NO 54610
  misc_feature (1)..(1104): Ortholog of  Ceres SEQ ID NO 13594298 as cited in SEQ ID NO 57803
  misc_feature (1)..(1104): Ortholog of  Ceres SEQ ID NO 13503476 as cited in SEQ ID NO 61978
  misc_feature (1)..(1104): Ortholog of  Ceres SEQ ID NO 12578438 as cited in SEQ ID NO 62201
  misc_feature (1)..(1104): Ortholog of  Ceres SEQ ID NO 12617675 as cited in SEQ ID NO 64656
caaaaaacattcctcaccaaaccctctccaaaacacacccacacgtacgcacacacacaaagacaatgtctcctttcaaaatattcttcttcacgactcttctcgtggcggcgttttcagtgtcggctgctgatttcaacactgacgtcaacgtagcttggggaaatggccgtgggaagatactcaacaacggccagcttcttactctctccttagacaaatcctctggttccggttttcaatccaaaacagagtatttgtttggaaagattgatatgcagattaagcttgttcctggtaactctgcaggaacagtcacaactttttacctaaaatccgaaggatccacttgggatgagattgattttgagttcttgggtaatatgagtggagatccttatactttacacactaatgtttacactcaaggtaaaggtgacaaagagcaacaattccatctctggttcgacccaaccgccaatttccacacttactcaatcctctggaaccctcaaagaatcatattgaccgtcgatgacacacccattagagagtttaaaaactatgagtctctcggtgtcttgtttccaaagaacaagccgatgaggatgtacgcgagtttatggaacgcagacgattgggcaacaagaggcggtcttgttaaaactgattggtctaaagctccattcatggcttcttacagaaacattaagattgactcgaaaccaaactccaattggtacactcaagaaatggattcaacaagccaagctagactcaaatgggttcagaagaattacatgatctacaattattgtactgaccataggaggtttccacagggagctcctaaggaatgcacaacaagctcatagaatctcaaattatattctatttatttatctacacttcctctctttcttttatgtgaaaattgtgaatgctctgtttctagcttgtctattatgtccgagaatttctttttctgtttttgattcttttcgttgtatatctttgtccaataaaggaaatgatgtgtctttactcttatagatatgtataaaaagatgtccctgttttatttgttaaaaaaaattgtttatg

SEQ ID NO: 21033 - protein, 290 aa, Arabidopsis thaliana
  peptide (1)..(290): Ceres Seq. ID no. 12483989
KNIPHQTLSKTHPHVRTHTKTMSPFKIFFFTTLLVAAFSVSAADFNTDVNVAWGNGRGKILNNGQLLTLSLDKSSGSGFQSKTEYLFGKIDMQIKLVPGNSAGTVTTFYLKSEGSTWDEIDFEFLGNMSGDPYTLHTNVYTQGKGDKEQQFHLWFDPTANFHTYSILWNPQRIILTVDDTPIREFKNYESLGVLFPKNKPMRMYASLWNADDWATRGGLVKTDWSKAPFMASYRNIKIDSKPNSNWYTQEMDSTSQARLKWVQKNYMIYNYCTDHRRFPQGAPKECTTSS

SEQ ID NO: 21034 - protein, 269 aa, Arabidopsis thaliana
  peptide (1)..(269): Ceres Seq. ID no. 12483990
MSPFKIFFFTTLLVAAFSVSAADFNTDVNVAWGNGRGKILNNGQLLTLSLDKSSGSGFQSKTEYLFGKIDMQIKLVPGNSAGTVTTFYLKSEGSTWDEIDFEFLGNMSGDPYTLHTNVYTQGKGDKEQQFHLWFDPTANFHTYSILWNPQRIILTVDDTPIREFKNYESLGVLFPKNKPMRMYASLWNADDWATRGGLVKTDWSKAPFMASYRNIKIDSKPNSNWYTQEMDSTSQARLKWVQKNYMIYNYCTDHRRFPQGAPKECTTSS

SEQ ID NO: 21035 - protein, 199 aa, Arabidopsis thaliana
  peptide (1)..(199): Ceres Seq. ID no. 12483991
MQIKLVPGNSAGTVTTFYLKSEGSTWDEIDFEFLGNMSGDPYTLHTNVYTQGKGDKEQQFHLWFDPTANFHTYSILWNPQRIILTVDDTPIREFKNYESLGVLFPKNKPMRMYASLWNADDWATRGGLVKTDWSKAPFMASYRNIKIDSKPNSNWYTQEMDSTSQARLKWVQKNYMIYNYCTDHRRFPQGAPKECTTSS

SEQ ID NO: 21036 - DNA, 1577 bp, Arabidopsis thaliana
  misc_feature (1)..(1577): Ceres Seq. ID no. 12357758
  misc_feature (1)..(1577): Ortholog of  Ceres SEQ ID NO 14304000 as cited in SEQ ID NO 53798
  misc_feature (1)..(1577): Ortholog of  Ceres SEQ ID NO 14303568 as cited in SEQ ID NO 65364
aatcaatcataatgttttcgaattttttggaaagcttatacgatggaatcggagacgatgacgccgccgacgacgacgaagacaacaacaacgacgagaaaaccccgaaagcctcaacggaaagacacgatttctcgagaaacgccgttcgtttgtcaccggaagaggaggctcaagcgcgtggggttaaagatgatttgacggaacttggtcataccctcacgcgtcaatttcgtggtgtggctaactttctcgctccgttacctgatggatcttcttcttcttcctccgatctatcgaaccatcccaggtttaaccaatctcggtcttcagatcctggattgaatcaatcgcgttcttcagatcgggacgaatcgtgtgttggaagtgatacgccggagactggaattaggtttaggagctgggatttagaagaaaaattggcagaaggcaatgatccggaggatgaggaagaagaagaagaggaaacagatgaagaagaagaagaagaagaagagatcgctgcggttgctcttacagacgaagtgctagcatttgcgaggaacatagcaatgcatccagaaacttggttggattttcctcttgatcctgacgaagatcttgatgatttggaaatgagtgatgctcaaagaggtcatgctttagctattgagcgtcttgctccgaggttagctgcattgagaatagagctttgtccatgtcatatgagtgttggttacttctggaaagtctattttgttcttcttctttcaaggctcaataaacacgatgctcatcttttgtcttctccacaggtgatggaagctagagcattgtggatgaaagagcttcagaatcagacacattcttcaaaagaaagtagagatatgattcttgaggaagaagatattacaccatcaacttctaattactacaaccatgctcctcctgagtttctttctccaagaatatatgcttttgaacctccttcgattatgtatcgcgattttgaacacgggtttgaaaacgctcagttcatcgataaagctgttattgaggaaaaaccaatccagaagaacgacaaaaatagtgcaagccttagccaaacatctaaagatgttgttgatgatgatgatgatgattggccagaagaagaagattctgctaattcttgggctccaatgtttacagtgaatgaggatgatgtttctttcagtgatcttgaaggagacgacgatataagtagcttagcactcaagtctaagattacatcaaagggcacagaccaaaaaggaacatgaaacatcatctggcttgttgctttgccctgcctcacgagatcgaatcaatagaattgaacataagtactgtgtgctgagtcaaatcgtggaagtcttttgggtgagtttgattgttttgtggatttatgatgtttgctctcaaagagaaggaagaaagaaagaaaaaggttttgattgaaacatgtacagaagatttactttgacactgcaatttcattgtaatgttctctctcgccaaatgtaatgaaatattgaaaagcactatttcattcgcgt

SEQ ID NO: 21037 - protein, 432 aa, Arabidopsis thaliana
  peptide (1)..(432): Ceres Seq. ID no. 12357759
SIIMFSNFLESLYDGIGDDDAADDDEDNNNDEKTPKASTERHDFSRNAVRLSPEEEAQARGVKDDLTELGHTLTRQFRGVANFLAPLPDGSSSSSSDLSNHPRFNQSRSSDPGLNQSRSSDRDESCVGSDTPETGIRFRSWDLEEKLAEGNDPEDEEEEEEETDEEEEEEEEIAAVALTDEVLAFARNIAMHPETWLDFPLDPDEDLDDLEMSDAQRGHALAIERLAPRLAALRIELCPCHMSVGYFWKVYFVLLLSRLNKHDAHLLSSPQVMEARALWMKELQNQTHSSKESRDMILEEEDITPSTSNYYNHAPPEFLSPRIYAFEPPSIMYRDFEHGFENAQFIDKAVIEEKPIQKNDKNSASLSQTSKDVVDDDDDDWPEEEDSANSWAPMFTVNEDDVSFSDLEGDDDISSLALKSKITSKGTDQKGT

SEQ ID NO: 21038 - protein, 429 aa, Arabidopsis thaliana
  peptide (1)..(429): Ceres Seq. ID no. 12357760
MFSNFLESLYDGIGDDDAADDDEDNNNDEKTPKASTERHDFSRNAVRLSPEEEAQARGVKDDLTELGHTLTRQFRGVANFLAPLPDGSSSSSSDLSNHPRFNQSRSSDPGLNQSRSSDRDESCVGSDTPETGIRFRSWDLEEKLAEGNDPEDEEEEEEETDEEEEEEEEIAAVALTDEVLAFARNIAMHPETWLDFPLDPDEDLDDLEMSDAQRGHALAIERLAPRLAALRIELCPCHMSVGYFWKVYFVLLLSRLNKHDAHLLSSPQVMEARALWMKELQNQTHSSKESRDMILEEEDITPSTSNYYNHAPPEFLSPRIYAFEPPSIMYRDFEHGFENAQFIDKAVIEEKPIQKNDKNSASLSQTSKDVVDDDDDDWPEEEDSANSWAPMFTVNEDDVSFSDLEGDDDISSLALKSKITSKGTDQKGT

SEQ ID NO: 21039 - protein, 242 aa, Arabidopsis thaliana
  peptide (1)..(242): Ceres Seq. ID no. 12357761
MHPETWLDFPLDPDEDLDDLEMSDAQRGHALAIERLAPRLAALRIELCPCHMSVGYFWKVYFVLLLSRLNKHDAHLLSSPQVMEARALWMKELQNQTHSSKESRDMILEEEDITPSTSNYYNHAPPEFLSPRIYAFEPPSIMYRDFEHGFENAQFIDKAVIEEKPIQKNDKNSASLSQTSKDVVDDDDDDWPEEEDSANSWAPMFTVNEDDVSFSDLEGDDDISSLALKSKITSKGTDQKGT

SEQ ID NO: 21040 - DNA, 1431 bp, Arabidopsis thaliana
  misc_feature (1)..(1431): Ceres Seq. ID no. 13591669
  misc_feature (1)..(1431): Ortholog of  Ceres SEQ ID NO 15176919 as cited in SEQ ID NO 54698
  misc_feature (1)..(1431): Ortholog of  Ceres SEQ ID NO 15179344 as cited in SEQ ID NO 0
aggtacaagagccttacaaaattcttctggttctctgaggatcaaaccaccacaagtcagaacagagtgaggtaatcattaccaacaaaaaatggcggctttatcatcctcctctctgtttttctcttccaagacaacttctccgatcagcaatctcctgatcccgccatctctccaccgcttctctctaccctcttcatcttcctccttttcctctctctcttcttcttcttcttcttcttcttctctcttgacattctctctgaggacttctcgaaggttatctcctcaaaaatttaccgttaaggccagctccgtcggtgagaagaagaatgtacttatagtcaacaccaacagtggcggtcacgccgtgatcgggttttacttcgccaaagagcttctctccgccggccacgccgtcaccatcttgaccgtcggcgatgaatcttccgaaaagatgaagaaacctcctttcaaccgattctccgaaattgttagcggcggaggaaagacggtgtgggggaacccggccaatgttgccaatgtggtcggaggtgaaacatttgacgttgtccttgacaacaatggcaaggatttggatactgttaggccagtggtggattgggctaaaagctccggcgtcaagcaattcttgttcataagtagcgccgggatctacaagtccaccgaacaacctcctcacgttgaaggggacgcagttaaagccgacgctggtcacgtggtggtggagaagtacttagccgaaacattcgggaactgggcctcctttcgaccgcagtacatgatcggctctggcaacaacaaagactgcgaagaatggttcttcgaccggattgtgagggacagagcagtgccaatcccaggatcaggattgcagctaaccaacatatcccacgtgagggacttgtcttccatgcttacttctgccgttgccaacccagaggctgcttccggcaacatcttcaactgcgttagcgacagagccgttactcttgacggtatggccaagctctgtgctgccgctgctggcaaaactgttgagatcgttcattatgaccctaaagccattggggttgacgccaagaaggcttttctattcagaaacatgcatttctacgcagagccaagagccgctaaggacttattagggtgggagagtaaaacgaatctgcctgaagatctcaaggagagattcgaagagtatgtgaagattggcagagacaagaaagagattaagtttgagttagacgataagatactcgaagccctcaaaactccagtggccgcttgatcaaatacgccataaagtttgttcttcatttgtaacttcttatgctacactgtgctctttcatttcccacggctcatatgagatgaacatgatttcagctaaaagatcatttaaatatc

SEQ ID NO: 21041 - protein, 406 aa, Arabidopsis thaliana
  peptide (1)..(406): Ceres Seq. ID no. 15221056
MAALSSSSLFFSSKTTSPISNLLIPPSLHRFSLPSSSSSFSSLSSSSSSSSSLLTFSLRTSRRLSPQKFTVKASSVGEKKNVLIVNTNSGGHAVIGFYFAKELLSAGHAVTILTVGDESSEKMKKPPFNRFSEIVSGGGKTVWGNPANVANVVGGETFDVVLDNNGKDLDTVRPVVDWAKSSGVKQFLFISSAGIYKSTEQPPHVEGDAVKADAGHVVVEKYLAETFGNWASFRPQYMIGSGNNKDCEEWFFDRIVRDRAVPIPGSGLQLTNISHVRDLSSMLTSAVANPEAASGNIFNCVSDRAVTLDGMAKLCAAAAGKTVEIVHYDPKAIGVDAKKAFLFRNMHFYAEPRAAKDLLGWESKTNLPEDLKERFEEYVKIGRDKKEIKFELDDKILEALKTPVAA

SEQ ID NO: 21042 - protein, 284 aa, Arabidopsis thaliana
  peptide (1)..(284): Ceres Seq. ID no. 15221057
MKKPPFNRFSEIVSGGGKTVWGNPANVANVVGGETFDVVLDNNGKDLDTVRPVVDWAKSSGVKQFLFISSAGIYKSTEQPPHVEGDAVKADAGHVVVEKYLAETFGNWASFRPQYMIGSGNNKDCEEWFFDRIVRDRAVPIPGSGLQLTNISHVRDLSSMLTSAVANPEAASGNIFNCVSDRAVTLDGMAKLCAAAAGKTVEIVHYDPKAIGVDAKKAFLFRNMHFYAEPRAAKDLLGWESKTNLPEDLKERFEEYVKIGRDKKEIKFELDDKILEALKTPVAA

SEQ ID NO: 21043 - DNA, 1185 bp, Arabidopsis thaliana
  misc_feature (1)..(1185): Ceres Seq. ID no. 13487853
  misc_feature (1)..(1185): Ortholog of  Ceres SEQ ID NO 15169545 as cited in SEQ ID NO 67456
aattttccccaatcttcataagtcataagaaaaatctcagcaattgtcaaaattttccagcaatcgagagagcagcacaagagagcatagaaggaccgattggggattagttagcgtgaaaggagatcctagtagcagctatggatagagaatggggttccaagcctggtagtggaggcgccgcctccggccaaaacgaggccatagatcgccgtgagcgtctccgtcgtcttgctcttgaaaccatagaccttgctaaagatccctatttcatgcgaaatcatcttggaagctatgagtgtaaactatgtctaacgctgcataacaatgaaggaaactacttggcacatactcaaggtaagaggcatcagacaaacttggcaaagagagctgctcgagaggctaaggacgctcctactaagccgcagccacttaagcgcaatgtctcagttcgcagaacagttaaaattggtagaccagggtaccgggttacaaaacagtatgatcccgagctgcaacaaagatctcttctgttccagattgaatatcctgagatagaggacaacataaagccaagacatcgtttcatgtcatcttatgagcagaaagttcaaccgtatgacaagagctatcaataccttctatttgcagctgaaccatatgaaatcatagctttcaaggttcctagcacagaggttgataaatcaaccccaaagtttttctctcactgggatccagactccaagatgtttacactgcaggtgtatttcaagcctaccaagccagaaccaaacaagcctcagtcagctgttggagcaaatggtcttccaccgccaccaccacccccgcctcatcaagctcaaccgccaccaccacctccatctggtttattcccaccgccaccacctccaatggctaacaatggttttaggcccatgccaccagctggaggtttcggacatcctaacatgtgaaagagaatccagcgaagcagtttaaaaacacagtactctgatcatggtttactaagagagacttgctctttgactgaaaaacaaatctgttctgacatctctacggatgtattatctctctagataccttctttgagtttcttctatctgcttctcgtatgtaccattttgacaagattgttttccgttaatagtacaattagcgttggcg

SEQ ID NO: 21044 - protein, 277 aa, Arabidopsis thaliana
  peptide (1)..(277): Ceres Seq. ID no. 13487854
MDREWGSKPGSGGAASGQNEAIDRRERLRRLALETIDLAKDPYFMRNHLGSYECKLCLTLHNNEGNYLAHTQGKRHQTNLAKRAAREAKDAPTKPQPLKRNVSVRRTVKIGRPGYRVTKQYDPELQQRSLLFQIEYPEIEDNIKPRHRFMSSYEQKVQPYDKSYQYLLFAAEPYEIIAFKVPSTEVDKSTPKFFSHWDPDSKMFTLQVYFKPTKPEPNKPQSAVGANGLPPPPPPPPHQAQPPPPPPSGLFPPPPPPMANNGFRPMPPAGGFGHPNM

SEQ ID NO: 21045 - protein, 233 aa, Arabidopsis thaliana
  peptide (1)..(233): Ceres Seq. ID no. 13487855
MRNHLGSYECKLCLTLHNNEGNYLAHTQGKRHQTNLAKRAAREAKDAPTKPQPLKRNVSVRRTVKIGRPGYRVTKQYDPELQQRSLLFQIEYPEIEDNIKPRHRFMSSYEQKVQPYDKSYQYLLFAAEPYEIIAFKVPSTEVDKSTPKFFSHWDPDSKMFTLQVYFKPTKPEPNKPQSAVGANGLPPPPPPPPHQAQPPPPPPSGLFPPPPPPMANNGFRPMPPAGGFGHPNM

SEQ ID NO: 21046 - DNA, 525 bp, Arabidopsis thaliana
  misc_feature (1)..(525): Ceres Seq. ID no. 12393413
  misc_feature (1)..(525): Ortholog of  Ceres SEQ ID NO 13581897 as cited in SEQ ID NO 52130
atcaattttcgttaagagagaaaaaggaagagaagaagaatgttacagtttccgacgttgatgacccaatttccgtcgtcgacgaagacgattccggcatcgtatttgcttccgttacaatggcctcagccgcagaacgaggagattcttctcgccatggaagaagctgagttcgaagaaaagtgcaacgagatcagaaagatgagtcctgctttaccggtaattggaaaaccagtcgtcaacaacgaacaagaagaggatgataatgaagcagaggatgatgatgcagataatgcagaggaatcagatggtgaagagtttgagcaagaaaccggataaataatcttgaggccgaaaatacacaagggttattgatggcattggcttgaaacttgaggacccttatctaaatcttcttgtgataaaacgactgtgattctgactttgtaaaccaggtttttttcttttcttaggaacgactgaaatgttcacttttggccctaaggttagtcagtggattattcg

SEQ ID NO: 21047 - protein, 99 aa, Arabidopsis thaliana
  peptide (1)..(99): Ceres Seq. ID no. 12393414
MLQFPTLMTQFPSSTKTIPASYLLPLQWPQPQNEEILLAMEEAEFEEKCNEIRKMSPALPVIGKPVVNNEQEEDDNEAEDDDADNAEESDGEEFEQETG

SEQ ID NO: 21048 - protein, 92 aa, Arabidopsis thaliana
  peptide (1)..(92): Ceres Seq. ID no. 12393415
MTQFPSSTKTIPASYLLPLQWPQPQNEEILLAMEEAEFEEKCNEIRKMSPALPVIGKPVVNNEQEEDDNEAEDDDADNAEESDGEEFEQETG

SEQ ID NO: 21049 - protein, 60 aa, Arabidopsis thaliana
  peptide (1)..(60): Ceres Seq. ID no. 12393416
MEEAEFEEKCNEIRKMSPALPVIGKPVVNNEQEEDDNEAEDDDADNAEESDGEEFEQETG

SEQ ID NO: 21050 - DNA, 884 bp, Arabidopsis thaliana
  misc_feature (1)..(884): Ceres Seq. ID no. 13489903
  misc_feature (1)..(884): Ortholog of  Ceres SEQ ID NO 14306246 as cited in SEQ ID NO 0
aaacccgattgtttcgagcacaaacgtcacttgtggtttacatcgtcttcatcatctccataacttcatatctcctctccttccgctgccaccgttagcgatgtctttggacactgtggacaaactggtggtgttcttggccaagagagacggaatagacaagcttgtgaagacattccaatacgtggccaagctcgcgtgctggcatgttgaagccacacgacccgaagccgccgataggttcaagaagtgggaggtcgcctccggtctcagccgcaaagccttcaggaccgggagatctctcacggggttcaatgcgctgagacgaaaccccggggcaaccccgatgatccgtttcttggcggtcctagccaattcaggggaaatggtttacttcttctttgatcattttctttggttatcaagaattggttcaatagacgccaagctcgccaagaaaatgagtttcatatccgcttttggcgaatctttcggctacactttcttcatcatcattgattgcatcttcataaagcaaagactcaaatccttaaaaaagctccagcattcgaccgatgaaccgaaagaagaaatcggcgccaaaattagcgagattcggggagatatagtaatgaggttgatgggaatttcagccaacgttgcggatttacttatagcattggcagaaattcacccaaaccccttttgtaaccacaccattacactcggtataagcggtttagtttcagcttgggccggttggtataggaactggccatcgtgagatgtaataaaatcaaatgtttgttgttttgaatgaacgtatcaaacgtgtaatgtaactcacttgaatatatgaaacatttctattttacattatctat

SEQ ID NO: 21051 - protein, 260 aa, Arabidopsis thaliana
  peptide (1)..(260): Ceres Seq. ID no. 13489904
NPIVSSTNVTCGLHRLHHLHNFISPLLPLPPLAMSLDTVDKLVVFLAKRDGIDKLVKTFQYVAKLACWHVEATRPEAADRFKKWEVASGLSRKAFRTGRSLTGFNALRRNPGATPMIRFLAVLANSGEMVYFFFDHFLWLSRIGSIDAKLAKKMSFISAFGESFGYTFFIIIDCIFIKQRLKSLKKLQHSTDEPKEEIGAKISEIRGDIVMRLMGISANVADLLIALAEIHPNPFCNHTITLGISGLVSAWAGWYRNWPS

SEQ ID NO: 21052 - protein, 227 aa, Arabidopsis thaliana
  peptide (1)..(227): Ceres Seq. ID no. 13489905
MSLDTVDKLVVFLAKRDGIDKLVKTFQYVAKLACWHVEATRPEAADRFKKWEVASGLSRKAFRTGRSLTGFNALRRNPGATPMIRFLAVLANSGEMVYFFFDHFLWLSRIGSIDAKLAKKMSFISAFGESFGYTFFIIIDCIFIKQRLKSLKKLQHSTDEPKEEIGAKISEIRGDIVMRLMGISANVADLLIALAEIHPNPFCNHTITLGISGLVSAWAGWYRNWPS

SEQ ID NO: 21053 - protein, 145 aa, Arabidopsis thaliana
  peptide (1)..(145): Ceres Seq. ID no. 13489906
MIRFLAVLANSGEMVYFFFDHFLWLSRIGSIDAKLAKKMSFISAFGESFGYTFFIIIDCIFIKQRLKSLKKLQHSTDEPKEEIGAKISEIRGDIVMRLMGISANVADLLIALAEIHPNPFCNHTITLGISGLVSAWAGWYRNWPS

SEQ ID NO: 21054 - DNA, 1200 bp, Arabidopsis thaliana
  misc_feature (1)..(1200): Ceres Seq. ID no. 12423019
  misc_feature (1)..(1200): Ortholog of  Ceres SEQ ID NO 14305750 as cited in SEQ ID NO 52458
  misc_feature (1)..(1200): Ortholog of  Ceres SEQ ID NO 14314252 as cited in SEQ ID NO 57492
  misc_feature (1)..(1200): Ortholog of  Ceres SEQ ID NO 12608276 as cited in SEQ ID NO 57871
  misc_feature (1)..(1200): Ortholog of  Ceres SEQ ID NO 13598492 as cited in SEQ ID NO 63882
  misc_feature (1)..(1200): Ortholog of  Ceres SEQ ID NO 13657914 as cited in SEQ ID NO 66230
  misc_feature (1)..(1200): Ortholog of  Ceres SEQ ID NO 13595877 as cited in SEQ ID NO 67702
aaaggctcactccaactccaactccaactccaactccaactccaactaacaacactcttcttcattcttcttcaatcaatggaatctgaaatcgcctccgagtttcttcctttctgccggatttacaaagacggtcgtgtagaacgactcatcggcaccgataccatcccggcctctctagatccaacacacgacgtcgtttcaaaagacgttatatactcaccggagaataacctctccgttcgtctcttcctccctcacaaatcaacaaaactcaccgccggtaacaagctccctctacttatctacatccacggcggagcttggatcatcgagtcacctttctccccactctaccacaattacctcactgaagtagtcaaatccgctaactgcctcgctgtctctgttcagtatcgccgtgcaccggaagatcctgttccggcggcttatgaagatgtatggtccgcgattcagtggatttttgctcattctaatggatctggtcctgtagattggattaacaaacacgccgatttcggtaaagttttcctcggcggagatagcgcaggcggtaacatatcgcatcacatggcgatgaaagctggtaaagagaagaagctagatctcaaaatcaaaggtattgctgttgttcatccagctttctggggaacagatccggttgatgaatacgatgtgcaagataaagaaacgagaagcggaatcgcggaaatttgggagaagattgcgagtccgaatagtgttaatgggacggatgatccgttgtttaatgtaaacggatccgggtcggatttttctgggttgggatgtgataaggttttggttgcggtagctgggaaagatgtgtttgttaggcaaggattggcttatgcggcgaagctggagaagtgtgagtgggaaggtactgttgaggtggttgaggaagaaggtgaggaccatgtgtttcatttgcagaatcctaaatctgataaggctttgaaattcttgaagaagtttgtcgagtttattattggttgaaacttgaaagaatgttttttgtgtaaatgttcttcatgatcatgtaatcttgtttttaagaaataaaatacatgaatttcagactgtgtgagagttatatgaacctgttaaatgtgtgttattattttcttcaacatgagaaaaaaatatgtgtaaaatatc

SEQ ID NO: 21055 - protein, 345 aa, Arabidopsis thaliana
  peptide (1)..(345): Ceres Seq. ID no. 12423020
KGSLQLQLQLQLQLQLTTLFFILLQSMESEIASEFLPFCRIYKDGRVERLIGTDTIPASLDPTHDVVSKDVIYSPENNLSVRLFLPHKSTKLTAGNKLPLLIYIHGGAWIIESPFSPLYHNYLTEVVKSANCLAVSVQYRRAPEDPVPAAYEDVWSAIQWIFAHSNGSGPVDWINKHADFGKVFLGGDSAGGNISHHMAMKAGKEKKLDLKIKGIAVVHPAFWGTDPVDEYDVQDKETRSGIAEIWEKIASPNSVNGTDDPLFNVNGSGSDFSGLGCDKVLVAVAGKDVFVRQGLAYAAKLEKCEWEGTVEVVEEEGEDHVFHLQNPKSDKALKFLKKFVEFIIG

SEQ ID NO: 21056 - protein, 319 aa, Arabidopsis thaliana
  peptide (1)..(319): Ceres Seq. ID no. 12423021
MESEIASEFLPFCRIYKDGRVERLIGTDTIPASLDPTHDVVSKDVIYSPENNLSVRLFLPHKSTKLTAGNKLPLLIYIHGGAWIIESPFSPLYHNYLTEVVKSANCLAVSVQYRRAPEDPVPAAYEDVWSAIQWIFAHSNGSGPVDWINKHADFGKVFLGGDSAGGNISHHMAMKAGKEKKLDLKIKGIAVVHPAFWGTDPVDEYDVQDKETRSGIAEIWEKIASPNSVNGTDDPLFNVNGSGSDFSGLGCDKVLVAVAGKDVFVRQGLAYAAKLEKCEWEGTVEVVEEEGEDHVFHLQNPKSDKALKFLKKFVEFIIG

SEQ ID NO: 21057 - DNA, 1085 bp, Arabidopsis thaliana
  misc_feature (1)..(1085): Ceres Seq. ID no. 13488961
  misc_feature (1)..(1085): Ortholog of  Ceres SEQ ID NO 13598416 as cited in SEQ ID NO 63371
  misc_feature (1)..(1085): Ortholog of  Ceres SEQ ID NO 13584271 as cited in SEQ ID NO 63893
acagattcgatttgggtgtctttggttttggatttggtaaagcttctcggtcacttgcttggtgattgaaattgaatcgattgtgattgtgattgtgagggaattatggctcaagccgtagaagagtggtacaagcagatgccgattataacccggtcgtatctcacggcggctgtagtcaccaccgtcgggtgttcgctcgagattatatctccttataatctctacctaaatcctacccttgtggtgaagcaataccagttctggcgtcttgtcacaaatttcctttatttccgaaagatggatttggactttttgttccatatgttttttctagctcgatactgcaaactgctcgaagaaaactccttcaggggaaagaccgcggatttcctttacatgctcttattcggggcaactgttctaactggtattgttctcattggcggaatgataccttatttgtctgtttcattctccaaaatcatcttcctcagcaattcattgactttcatgatggtctatgtatggagtaaacaaaatccttacatccacatgagtttccttggcctcttcactttcacagcagcttatttaccatgggtacttcttggattctctatccttgttggtgcaagtgcatggggggattttctgggaatgatagcgggccacgcatactacttcttggcatttgtgtatccccgaatgacggatcgacgtcccttgaaaactccatctttcctcaaggccctatttgctgatgagccagtcgtgattgcaaggccagaagatgtgagatttgctcatgcgccttttgatgaaatccaccaagactgaatcttgatcctccacaaaacaccagccacaacgcacagttcaagtgtactcagataatgttattgactcttgacctttatagttgtggataatgtggaagtgagatagtgttggctctgatttttttccctagttttctgtctgcttttcttgtccgatacaaatgtgtttcctccttgtgcatatgaactcaaattgtgtacaaagtcttcaaaagtactagtttatagtttcgtcattagatc

SEQ ID NO: 21058 - protein, 244 aa, Arabidopsis thaliana
  peptide (1)..(244): Ceres Seq. ID no. 13488962
MAQAVEEWYKQMPIITRSYLTAAVVTTVGCSLEIISPYNLYLNPTLVVKQYQFWRLVTNFLYFRKMDLDFLFHMFFLARYCKLLEENSFRGKTADFLYMLLFGATVLTGIVLIGGMIPYLSVSFSKIIFLSNSLTFMMVYVWSKQNPYIHMSFLGLFTFTAAYLPWVLLGFSILVGASAWGDFLGMIAGHAYYFLAFVYPRMTDRRPLKTPSFLKALFADEPVVIARPEDVRFAHAPFDEIHQD

SEQ ID NO: 21059 - protein, 233 aa, Arabidopsis thaliana
  peptide (1)..(233): Ceres Seq. ID no. 13488963
MPIITRSYLTAAVVTTVGCSLEIISPYNLYLNPTLVVKQYQFWRLVTNFLYFRKMDLDFLFHMFFLARYCKLLEENSFRGKTADFLYMLLFGATVLTGIVLIGGMIPYLSVSFSKIIFLSNSLTFMMVYVWSKQNPYIHMSFLGLFTFTAAYLPWVLLGFSILVGASAWGDFLGMIAGHAYYFLAFVYPRMTDRRPLKTPSFLKALFADEPVVIARPEDVRFAHAPFDEIHQD

SEQ ID NO: 21060 - protein, 179 aa, Arabidopsis thaliana
  peptide (1)..(179): Ceres Seq. ID no. 13488964
MDLDFLFHMFFLARYCKLLEENSFRGKTADFLYMLLFGATVLTGIVLIGGMIPYLSVSFSKIIFLSNSLTFMMVYVWSKQNPYIHMSFLGLFTFTAAYLPWVLLGFSILVGASAWGDFLGMIAGHAYYFLAFVYPRMTDRRPLKTPSFLKALFADEPVVIARPEDVRFAHAPFDEIHQD

SEQ ID NO: 21061 - DNA, 964 bp, Arabidopsis thaliana
  misc_feature (1)..(964): Ceres Seq. ID no. 12718649
  misc_feature (1)..(964): Ortholog of  Ceres SEQ ID NO 12609656 as cited in SEQ ID NO 51891
  misc_feature (1)..(964): Ortholog of  Ceres SEQ ID NO 13664337 as cited in SEQ ID NO 61267
  misc_feature (1)..(964): Ortholog of  Ceres SEQ ID NO 15224278 as cited in SEQ ID NO 63590
  misc_feature (1)..(964): Ortholog of  Ceres SEQ ID NO 12635152 as cited in SEQ ID NO 0
ctgatcagatgtgccagctatacaaaagtctctcacgtctctcccagaaaactcttattttatcgccgagaaagtgacggaaaacgaaatccaaacgggataataaacctaaaacctaaattagtgatttagctacgactcctaaagattcaaatttgggttacatcggacgaatcatgactctgcttccgatttcaatcttcttcttctttttattttgcattccttcgccattaatcgccgccgctaacgatgacgatataccgacggcgtacactctcctccaaagctacaactttcccgtcgggattcttcctaaaggagtggtgtcatatgatttagataaatctactggtcaattccacgcgtatttcaacaaatcgtgcagtttcgctcttcaaggctcttaccaattggattacaaatcgacaatctctggatacatatcggagaacaagatcacgaagcttaccggcgtgaaggtgaaagttctcttcttgtggctcaacatcgttgaggttattaggaacggagacgaactcgagttctccgttgggatcacatcggcgaacttcgagatcgatgagttttacgagtcgccacagtgtggttgcggatttgattgcaaaacgaagacgaagactttgggaagaaacccttttgtttcttcggtttaaaggttaagacttcttattgcagaatctgaactctttggatgatttatgttctttctccaatcatttaatttttcaatcaatgctttgtttgtatctcttcttaggatcgaaccgataagttgtatttatgaaccgatcaggaataaaacagtggtggaaaaagttaattcttatgtctaaggagaagattggcatgaatttgagtttcgtattggctgatcaatggtttgtgtgttgcattcgacgaatgcttatgaatgtctgtatgaaacgttagatcttttgtc

SEQ ID NO: 21062 - protein, 166 aa, Arabidopsis thaliana
  peptide (1)..(166): Ceres Seq. ID no. 12718650
MTLLPISIFFFFLFCIPSPLIAAANDDDIPTAYTLLQSYNFPVGILPKGVVSYDLDKSTGQFHAYFNKSCSFALQGSYQLDYKSTISGYISENKITKLTGVKVKVLFLWLNIVEVIRNGDELEFSVGITSANFEIDEFYESPQCGCGFDCKTKTKTLGRNPFVSSV

SEQ ID NO: 21063 - DNA, 731 bp, Arabidopsis thaliana
  misc_feature (1)..(731): Ceres Seq. ID no. 13496761
  misc_feature (1)..(731): Ortholog of  Ceres SEQ ID NO 15170822 as cited in SEQ ID NO 52758
  misc_feature (1)..(731): Ortholog of  Ceres SEQ ID NO 12611129 as cited in SEQ ID NO 55967
  misc_feature (1)..(731): Ortholog of  Ceres SEQ ID NO 12584296 as cited in SEQ ID NO 67866
  misc_feature (1)..(731): Ortholog of  Ceres SEQ ID NO 15178857 as cited in SEQ ID NO 0
acagaagtagaagaaaccaaagcgaaatcaaaaagctcagcaattttccagatttctctaattgacgatggcgctttgtgctactactcaaaggactatccgtatagcggcgacgctccggcgtgttgctcgacctttcgctactgacgcggtggttgagtcggattacaagcgtggtgagatcggtaaggtctccggaatcccagaggagcatctttctcgcaaggtgataatatactcacctgctagaacagctacccagtcaggatctggaaaactcggaaaatggaagattaacttcgtctccaccttaaagtgggagaatccgttgatgggatggacttctacaggtgacccctatgctaatgttggtgactctgctcttgcctttgattctgaagaagctgctaagtcttttgctgagcgtcatggttgggattataaggtcaagaagcccaacacaccattattgaaggtcaagtcttactcggacaacttcaagtggaaaggcaatcctcaaccagaaaactgatgttacaccttcttccaattcttctcgagcaaaagaagaaacctcatttgatattaattctcatgtttctttgttattttagcatctgtgagctttttggttgaaaagaaccattatccatggctatgtttacttattacaataatatgatgatgatgatgaaacacactcctttgatatttcatcaagatttctgatc

SEQ ID NO: 21064 - protein, 154 aa, Arabidopsis thaliana
  peptide (1)..(154): Ceres Seq. ID no. 13496762
MALCATTQRTIRIAATLRRVARPFATDAVVESDYKRGEIGKVSGIPEEHLSRKVIIYSPARTATQSGSGKLGKWKINFVSTLKWENPLMGWTSTGDPYANVGDSALAFDSEEAAKSFAERHGWDYKVKKPNTPLLKVKSYSDNFKWKGNPQPEN

SEQ ID NO: 21065 - DNA, 771 bp, Arabidopsis thaliana
  misc_feature (1)..(771): Ceres Seq. ID no. 12338449
  misc_feature (1)..(771): Ortholog of  Ceres SEQ ID NO 12610334 as cited in SEQ ID NO 56235
  misc_feature (1)..(771): Ortholog of  Ceres SEQ ID NO 13654825 as cited in SEQ ID NO 62409
acaatccaatcaaaacacacagagagaagaaaaactcagaagaaaagccaaagagtgaaacaaaaatggcgtcgacgactctctcaatcgcaacaacaatccgttcctcatcttatcctactctcgcttccatcaatcacttcccttcccgaaccaccaccatcgaattcccctctcgcttcggtggtggttcatcatccacattgacccaccgtgcaacccatctccgtccaatcgccgccgtcgaagctccggagaaaatcgagaagatcggatccgaaatctcatccctaaccctcgaagaagctcgtatcctcgtcgactatctccaagacaaattcggtgtctccccactctctttagcccccgcagcagcggcggttgctgctccagccgacggtggcgcggcggctgtagtggaagagcaaacagagttcgatgtggttatcaatgaagttcccagcagttcccgtattgcagtgattaaagctgttagggctttaactagcttggcgttgaaggaagctaaggagctaatcgaaggattaccaaagaagtttaaagaaggtatcactaaagatgaagctgaagaagctaagaagactcttgaagaagctggtgctaaagtctccattgcttaaggtttttattaaaaaaaaaaaagaagttgttatcttttctggaatttgattggtcttttgtgttgtttagtatagtttgcgtctggaattgttgagaaattgttgtaatttgaatcacatttggtttccc

SEQ ID NO: 21066 - protein, 212 aa, Arabidopsis thaliana
  peptide (1)..(212): Ceres Seq. ID no. 12338450
NPIKTHREKKNSEEKPKSETKMASTTLSIATTIRSSSYPTLASINHFPSRTTTIEFPSRFGGGSSSTLTHRATHLRPIAAVEAPEKIEKIGSEISSLTLEEARILVDYLQDKFGVSPLSLAPAAAAVAAPADGGAAAVVEEQTEFDVVINEVPSSSRIAVIKAVRALTSLALKEAKELIEGLPKKFKEGITKDEAEEAKKTLEEAGAKVSIA

SEQ ID NO: 21067 - protein, 191 aa, Arabidopsis thaliana
  peptide (1)..(191): Ceres Seq. ID no. 12338451
MASTTLSIATTIRSSSYPTLASINHFPSRTTTIEFPSRFGGGSSSTLTHRATHLRPIAAVEAPEKIEKIGSEISSLTLEEARILVDYLQDKFGVSPLSLAPAAAAVAAPADGGAAAVVEEQTEFDVVINEVPSSSRIAVIKAVRALTSLALKEAKELIEGLPKKFKEGITKDEAEEAKKTLEEAGAKVSIA

SEQ ID NO: 21068 - DNA, 1027 bp, Arabidopsis thaliana
  misc_feature (1)..(1027): Ceres Seq. ID no. 12327698
  misc_feature (1)..(1027): Ortholog of  Ceres SEQ ID NO 14305357 as cited in SEQ ID NO 60046
  misc_feature (1)..(1027): Ortholog of  Ceres SEQ ID NO 14313511 as cited in SEQ ID NO 64459
  misc_feature (1)..(1027): Ortholog of  Ceres SEQ ID NO 14303006 as cited in SEQ ID NO 67498
  misc_feature (1)..(1027): Ortholog of  Ceres SEQ ID NO 13599627 as cited in SEQ ID NO 0
  misc_feature (1)..(1027): Ortholog of  Ceres SEQ ID NO 14305069 as cited in SEQ ID NO 0
aatatgtccttaattgctcttatcggagaaggcttactctgtttttcaggcgaactctgtttatcttctccgagctcgtacgagaatattcgtaaaggtttcttgtgagcttaaacgatgagtacccttgagaccacaagagctgagcttggtctggtagttgtgtatttgaataaagcggaggcgagagacaagatttgtcgagctattcaatatggttccaagttcttgagtgatggccaacctggcactgctcaaaatgtcgacaagaacaccagcttggctaggaaagttttccgtctcttcaagtttgtaaatgatcttcatgctctcattagccctgttcccaaagggactccactcccgcttgttctgctcggaaagtctaaaaacgcgttgctgtcaacgttcttgttcctagatcaaattgtgtggcttggcaggactgggatttacaaggacaaagaacgtgctgagattcttggacgtatatcacttttctgttggatgggttcttcggtttgcacatccttggttgaggttggggagcttggtaggctgtcagcatcaattaagaagttagaaaaagagatagggaacaaggataaacaccagaatgagcaataccgtgcaaaagtagagaaatcaaacgagaggtcattggctctgatcaaagcagggatggatgtagttgttgctttcggattgcttcaattggctccaaagaaagtcactccccgagtcacaggtgctttcggattcgcctcatcacttatctcttgttatcagctattgccgtcacatcccaagtccaagatggtctgataaaagggaaacaaggaaaggcgaactagtttcattgtccacatgttccatatatagtttgtgtctgttttactattacttggtgttaaatttgtcttgcttgactactttaatgtttgtgttagattctatggtatataagataatgataaacattgcagtctctgtagaataataagaacagataagcattacgaggtgt

SEQ ID NO: 21069 - protein, 235 aa, Arabidopsis thaliana
  peptide (1)..(235): Ceres Seq. ID no. 12327699
MSTLETTRAELGLVVVYLNKAEARDKICRAIQYGSKFLSDGQPGTAQNVDKNTSLARKVFRLFKFVNDLHALISPVPKGTPLPLVLLGKSKNALLSTFLFLDQIVWLGRTGIYKDKERAEILGRISLFCWMGSSVCTSLVEVGELGRLSASIKKLEKEIGNKDKHQNEQYRAKVEKSNERSLALIKAGMDVVVAFGLLQLAPKKVTPRVTGAFGFASSLISCYQLLPSHPKSKMV

SEQ ID NO: 21070 - DNA, 881 bp, Arabidopsis thaliana
  misc_feature (1)..(881): Ceres Seq. ID no. 13499459
  misc_feature (1)..(881): Ortholog of  Ceres SEQ ID NO 14315253 as cited in SEQ ID NO 52508
  misc_feature (1)..(881): Ortholog of  Ceres SEQ ID NO 12627566 as cited in SEQ ID NO 62753
aaaatgatcgctgcgacagcgagtgtgtgacgttaaaccctaaatctggtgtctttgtgcaatcgcaagattcattcactctctgcgacactaaagatcgaaacttttgaattgcagaaatggcgacagctttagcttccaagctctccaaaggacgttcattgcttggaggtctttgcaatgctttctctggtttgatgaattcctcctccaatggaatgatgaatggaagcatcctctctcagcaacaacataggacattcattcaaatggggacgattctcaaatgcgtggataactcgtgtgctaaagaggtgatgtgcattcaatccctgagaggtaagaaaggagcaagacttggcgatatcattgttggttcagtgaaagaagctaacccaattgttcaaaaaaaagtaaagaaagacgctatcccaaaaggtaaagtgaagaaagggatggtcgtgtacggtgtggttgtgcgtgctgcgatgcctaaaggacgtgctgatggaagccaagtcaagtttgatgacaatgccattgtagttgttggcattaaggaaaagaaagggcagaataattcacatggttccaagaggaaaatggagtacaaccaaccgactggtacccgagtgtttggtcctgtcccgcacgagatgcgcctcaggaaacagctcaagatcctttctttggctcagcacattgtttgagacaatacaccacactaaaacatcagttatgatctcctttatgtgactctctttgatccattcatcacttgggtttctgttgattcttcaactatccaactcattatttttgttaattctaatgaattatgaaaccttaacgtaccaattatgatctcttatttaggtttc

SEQ ID NO: 21071 - protein, 196 aa, Arabidopsis thaliana
  peptide (1)..(196): Ceres Seq. ID no. 13499460
MATALASKLSKGRSLLGGLCNAFSGLMNSSSNGMMNGSILSQQQHRTFIQMGTILKCVDNSCAKEVMCIQSLRGKKGARLGDIIVGSVKEANPIVQKKVKKDAIPKGKVKKGMVVYGVVVRAAMPKGRADGSQVKFDDNAIVVVGIKEKKGQNNSHGSKRKMEYNQPTGTRVFGPVPHEMRLRKQLKILSLAQHIV

SEQ ID NO: 21072 - protein, 170 aa, Arabidopsis thaliana
  peptide (1)..(170): Ceres Seq. ID no. 13499461
MNSSSNGMMNGSILSQQQHRTFIQMGTILKCVDNSCAKEVMCIQSLRGKKGARLGDIIVGSVKEANPIVQKKVKKDAIPKGKVKKGMVVYGVVVRAAMPKGRADGSQVKFDDNAIVVVGIKEKKGQNNSHGSKRKMEYNQPTGTRVFGPVPHEMRLRKQLKILSLAQHIV

SEQ ID NO: 21073 - protein, 163 aa, Arabidopsis thaliana
  peptide (1)..(163): Ceres Seq. ID no. 13499462
MMNGSILSQQQHRTFIQMGTILKCVDNSCAKEVMCIQSLRGKKGARLGDIIVGSVKEANPIVQKKVKKDAIPKGKVKKGMVVYGVVVRAAMPKGRADGSQVKFDDNAIVVVGIKEKKGQNNSHGSKRKMEYNQPTGTRVFGPVPHEMRLRKQLKILSLAQHIV

SEQ ID NO: 21074 - DNA, 1074 bp, Arabidopsis thaliana
  misc_feature (1)..(1074): Ceres Seq. ID no. 12338339
  misc_feature (1)..(1074): Ortholog of  Ceres SEQ ID NO 15177119 as cited in SEQ ID NO 51196
acaacggccactgaacactatcgatctaatcttttcagctctctccatcgtcgtcgtatctgtgactctcgtgatcatcgcctgaaaaaaatttgagataatggccagaaagttcttcgtcggaggcaactggaaatgtaacggaactgctgaggaggtgaagaagattgtgaacactcttaatgaagctcaggttccttcacaggatgttgtagaggttgtggttagccctccatatgtttttcttcccctggttaagagcacattgaggtctgacttttttgttgcggcacaaaactgttgggttaagaaaggaggtgctttcactggtgaagtgagtgcggagatgcttgtgaacttggatattccatgggttatccttggtcactctgaaaggagggcaatccttaatgaatcaagcgagttcgtcggagacaaggttgcctatgcacttgctcaaggtttgaaagtgattgcttgtgttggtgagactcttgaggagcgggaagctggatcgaccatggatgttgtggctgcccagaccaaggctattgccgatcgggtgacaaactggtcaaatgttgtcatagcctatgaaccagtgtgggccattggaaccggaaaggtcgctagcccagcccaagctcaagaagtacacgatgagctgaggaaatggctggccaagaacgtgagtgctgatgtcgctgctacaacccgcatcatttatggaggatccgtcaatggtggtaactgcaaggagctaggtggacaggccgatgttgatggtttcttggtcggtggtgcttctctaaagcctgagtttatcgacatcattaaggccgcagaggtgaagaaaagtgcctaatgagctcattaagcaatttaaaagtcctttgcttttccagtcgcaactctgaaaaaatgaataagttggtattatgatatgatacattttgcttcagttgtatttggcaaaagtttctctcttactatattgttttgagaacgcaacaatcattttcttcgccatttatttagctgtggacttgcaatttgcaaatcccttccttttgc

SEQ ID NO: 21075 - protein, 254 aa, Arabidopsis thaliana
  peptide (1)..(254): Ceres Seq. ID no. 12338340
MARKFFVGGNWKCNGTAEEVKKIVNTLNEAQVPSQDVVEVVVSPPYVFLPLVKSTLRSDFFVAAQNCWVKKGGAFTGEVSAEMLVNLDIPWVILGHSERRAILNESSEFVGDKVAYALAQGLKVIACVGETLEEREAGSTMDVVAAQTKAIADRVTNWSNVVIAYEPVWAIGTGKVASPAQAQEVHDELRKWLAKNVSADVAATTRIIYGGSVNGGNCKELGGQADVDGFLVGGASLKPEFIDIIKAAEVKKSA

SEQ ID NO: 21076 - protein, 172 aa, Arabidopsis thaliana
  peptide (1)..(172): Ceres Seq. ID no. 12338341
MLVNLDIPWVILGHSERRAILNESSEFVGDKVAYALAQGLKVIACVGETLEEREAGSTMDVVAAQTKAIADRVTNWSNVVIAYEPVWAIGTGKVASPAQAQEVHDELRKWLAKNVSADVAATTRIIYGGSVNGGNCKELGGQADVDGFLVGGASLKPEFIDIIKAAEVKKSA

SEQ ID NO: 21077 - DNA, 788 bp, Arabidopsis thaliana
  misc_feature (1)..(788): Ceres Seq. ID no. 12421098
  misc_feature (1)..(788): Ortholog of  Ceres SEQ ID NO 12587328 as cited in SEQ ID NO 62249
  misc_feature (1)..(788): Ortholog of  Ceres SEQ ID NO 13598823 as cited in SEQ ID NO 0
  misc_feature (1)..(788): Ortholog of  Ceres SEQ ID NO 13600477 as cited in SEQ ID NO 0
  misc_feature (1)..(788): Ortholog of  Ceres SEQ ID NO 14309300 as cited in SEQ ID NO 0
gtcttcttcttctacataaaattgattcgcctcgaaatttacacagacttgtcgctctctctttctctcttatttcacagagcccctaaacatttccaaaaatcttgcaaaggaagaaaaacaatggacaaattttggactttcctcactgctcttcattcaggcgctgggcctatcgtgatgttactttatccattgtacgcatcggtgatagcaatggagagcacaacaaaagtggacgatgaacagtggcttgcgtattggataatatattcgttcctctcactcacggaactgattctgcaatcgcttattgagtggattccgatttggtatacggtgaaacttgtgttcgtggcttggctagttcttcctcagtttcaaggcgcagcttttatctacaaccgtgttgttagagaacagttcaagaaacacggcgtcctccgctccacccactccaagcccaccaagcccaacatcctccactccattttcccccaccgggagggacacgaggctcacagtcactgaatcagaagggtggagcagacagaagaagcctgactagtattattgtaatggtcttggtggtggtcccatcatgtccctgtctaatctactttttactttatttttatttatcacaaaaaatgggtttaggaatgttgatgatgatgactgatgaggtgtgtaatcgtttttaaattagaaaatggcttcttctgcttgtatgattgtatcgctaatcttccacgcgtatttctttaatgtcaacgctaataatttcc

SEQ ID NO: 21078 - protein, 176 aa, Arabidopsis thaliana
  peptide (1)..(176): Ceres Seq. ID no. 12421099
VFFFYIKLIRLEIYTDLSLSLSLLFHRAPKHFQKSCKGRKTMDKFWTFLTALHSGAGPIVMLLYPLYASVIAMESTTKVDDEQWLAYWIIYSFLSLTELILQSLIEWIPIWYTVKLVFVAWLVLPQFQGAAFIYNRVVREQFKKHGVLRSTHSKPTKPNILHSIFPHREGHEAHSH

SEQ ID NO: 21079 - protein, 135 aa, Arabidopsis thaliana
  peptide (1)..(135): Ceres Seq. ID no. 12421100
MDKFWTFLTALHSGAGPIVMLLYPLYASVIAMESTTKVDDEQWLAYWIIYSFLSLTELILQSLIEWIPIWYTVKLVFVAWLVLPQFQGAAFIYNRVVREQFKKHGVLRSTHSKPTKPNILHSIFPHREGHEAHSH

SEQ ID NO: 21080 - protein, 116 aa, Arabidopsis thaliana
  peptide (1)..(116): Ceres Seq. ID no. 12421101
MLLYPLYASVIAMESTTKVDDEQWLAYWIIYSFLSLTELILQSLIEWIPIWYTVKLVFVAWLVLPQFQGAAFIYNRVVREQFKKHGVLRSTHSKPTKPNILHSIFPHREGHEAHSH

SEQ ID NO: 21081 - DNA, 627 bp, Arabidopsis thaliana
  misc_feature (1)..(627): Ceres Seq. ID no. 12738393
  misc_feature (1)..(627): Ortholog of  Ceres SEQ ID NO 13575779 as cited in SEQ ID NO 20515
gcttctctagggtttcagccaccagactcaaacagagagtgaaaatgccggcgggacacggagtgagggcgagaacaagagatctgttcgcgagaccattcaggaagaagggttatattccactctccacttacctcagaaccttcaaggtcggcgattacgtcgatgtcaaggttaatggagctatccacaagggtatgcctcataagttctaccatggtcgtactggtcgcatctggaatgtcactaagcgtgccgttggtgttgaagtcaacaaacagattgggaacagaatcataaggaagaggatacatgtgcgtgtggagcatgtgcaacagtcaaggtgtgctgaggagtttaaactcagaaagaagcagaacgatgtgcttaaggctgatgctaaagccagaggagagactatcagcaccaagagacagcctaaaggtcctaaaccgggtttcatggtcgaaggtatgacattggagactgtcactcccattccttacgatgttgtcaacgatctcaagggtggttattgagttttttccattttattatcattctttactcagaatttttgcacttgcttttttaatgatgtttttgtatcaattaagactaatttct

SEQ ID NO: 21082 - protein, 178 aa, Arabidopsis thaliana
  peptide (1)..(178): Ceres Seq. ID no. 12738394
FSRVSATRLKQRVKMPAGHGVRARTRDLFARPFRKKGYIPLSTYLRTFKVGDYVDVKVNGAIHKGMPHKFYHGRTGRIWNVTKRAVGVEVNKQIGNRIIRKRIHVRVEHVQQSRCAEEFKLRKKQNDVLKADAKARGETISTKRQPKGPKPGFMVEGMTLETVTPIPYDVVNDLKGGY

SEQ ID NO: 21083 - protein, 164 aa, Arabidopsis thaliana; identical to SEQ ID NO: 20517
  peptide (1)..(164): Ceres Seq. ID no. 12738395

SEQ ID NO: 21084 - protein, 113 aa, Arabidopsis thaliana; identical to SEQ ID NO: 20518
  peptide (1)..(113): Ceres Seq. ID no. 12738396

SEQ ID NO: 21085 - DNA, 1023 bp, Arabidopsis thaliana
  misc_feature (1)..(1023): Ceres Seq. ID no. 12420913
  misc_feature (1)..(1023): Ortholog of  Ceres SEQ ID NO 14307312 as cited in SEQ ID NO 54745
  misc_feature (1)..(1023): Ortholog of  Ceres SEQ ID NO 14314194 as cited in SEQ ID NO 57366
  misc_feature (1)..(1023): Ortholog of  Ceres SEQ ID NO 13655305 as cited in SEQ ID NO 63328
actttccaaaatagccgcaaacgattctcattgtgaactctgataatatctaagacgacgaaatgttggagctacgtcttgttcagggctcgttgttgaagaaggttctagaatcaatcaaagatctggtgaacgatgcgaatttcgactgctccagcactgggttctcactccaagctatggattcgagtcacgttgctctggtgtctctcttgctaagatccgaaggcttcgaacactacagatgcgacaggaatctctccatggggatgaatctcggcaacatgtcgaagatgctcaaatgcgccggaaatgatgacatcatcaccatcaaggctgatgacggcggcgacaccgttaccttcatgtttgagagccccacgcaagacaagattgctgattttgagatgaagttgatggatatagacagtgaacatctgggaatacctgatgctgagtaccactcaatcgtgaggatgccttccaatgagttttccaggatttgcaaagatctcagtagcattggtgacacagttgtgatctctgtgactaaagaaggcgtgaagttttctactgccggtgacattggaaccgctaacattgtgctcaggcagaacacaactgtagacaagccggaagatgcaattgtgatagagatgaaggagccagtgtctctctcatttgccctgaggtacatgaattccttcacaaaggcaactccattgtcagacacagtgacaatcagcttatcgtcggagttgccagtggttgtggagtataaggttgctgagatgggttacattcgttactacttggctcctaagattgaagaagaagaagacactaatccctaagaccccttttatatccacaatttctcttcattctaaaatgttgaagatttattgacaatgttggtgtttttttttggtgagattcctttgtatcccccctctagaatcagttgttttcttgacttattatgttttatgataacaaagttcagcaaaattagttgtcttg

SEQ ID NO: 21086 - protein, 263 aa, Arabidopsis thaliana
  peptide (1)..(263): Ceres Seq. ID no. 12420914
MLELRLVQGSLLKKVLESIKDLVNDANFDCSSTGFSLQAMDSSHVALVSLLLRSEGFEHYRCDRNLSMGMNLGNMSKMLKCAGNDDIITIKADDGGDTVTFMFESPTQDKIADFEMKLMDIDSEHLGIPDAEYHSIVRMPSNEFSRICKDLSSIGDTVVISVTKEGVKFSTAGDIGTANIVLRQNTTVDKPEDAIVIEMKEPVSLSFALRYMNSFTKATPLSDTVTISLSSELPVVVEYKVAEMGYIRYYLAPKIEEEEDTNP

SEQ ID NO: 21087 - protein, 224 aa, Arabidopsis thaliana
  peptide (1)..(224): Ceres Seq. ID no. 12420915
MDSSHVALVSLLLRSEGFEHYRCDRNLSMGMNLGNMSKMLKCAGNDDIITIKADDGGDTVTFMFESPTQDKIADFEMKLMDIDSEHLGIPDAEYHSIVRMPSNEFSRICKDLSSIGDTVVISVTKEGVKFSTAGDIGTANIVLRQNTTVDKPEDAIVIEMKEPVSLSFALRYMNSFTKATPLSDTVTISLSSELPVVVEYKVAEMGYIRYYLAPKIEEEEDTNP

SEQ ID NO: 21088 - protein, 196 aa, Arabidopsis thaliana
  peptide (1)..(196): Ceres Seq. ID no. 12420916
MGMNLGNMSKMLKCAGNDDIITIKADDGGDTVTFMFESPTQDKIADFEMKLMDIDSEHLGIPDAEYHSIVRMPSNEFSRICKDLSSIGDTVVISVTKEGVKFSTAGDIGTANIVLRQNTTVDKPEDAIVIEMKEPVSLSFALRYMNSFTKATPLSDTVTISLSSELPVVVEYKVAEMGYIRYYLAPKIEEEEDTNP

SEQ ID NO: 21089 - DNA, 2347 bp, Arabidopsis thaliana
  misc_feature (1)..(2347): Ceres Seq. ID no. 12674675
  misc_feature (1)..(2347): Ortholog of  Ceres SEQ ID NO 13596857 as cited in SEQ ID NO 62924
gacgaacgagaagactcttttttgaattttgattcttcttcttctccgtttctttcgctacttcctcagcttcgtcaccgtcgaaaattcttcacgttttcctcggaattttccaattgtcttctccaattctcttgcgatcgttgaagatctgaaaaattcgaagcgtttgatcatggcttcgtacactcccaagaacattctcatcaccggagctgctggtttcattgcgtctcatgtcgccaacagactcatacgaagctatcctgattacaaaatcgttgtgcttgacaagcttgattactgttcaaatctcaagaatctcaatccttctaagcactctccgaacttcaagtttgtcaaaggtgatatcgctagtgctgacttggtgaatcatcttctcatcactgaaggtattgacaccatcatgcatttcgctgctcagactcacgtcgacaattccttcggtaacagtttcgagtttactaagaataatatctatggaactcatgtccttcttgaggcttgtaaagttactggtcagattaggaggtttattcatgttagtactgatgaagtttatggtgaaactgatgaggatgctcttgttggtaaccatgaggcttctcagctgcttccgacgaatccttactctgccacgaaagctggtgctgagatgcttgttatggcttatggtagatcttatggtttgcctgttattaccactcgtgggaataacgtctatggaccgaatcagtttcctgagaagttgattcctaagttcattttgctggcaatgagagggcaggttcttcccattcatggagatggatcaaatgtcaggagctacctctactgtgaagacgttgctgaggcttttgaagttgttcttcacaagggagaagttggccatgtttacaatattgggacgaagaaggagaggagagtgaatgatgttgccaaagacatctgcaaactcttcaacatggaccctgaggcgaacatcaagtttgtcgacaacagaccttttaacgatcagaggtacttccttgacgatcagaagctcaaaaagttgggatggtcagagagaaccacgtgggaagaagggttgaagaaaactatggattggtacacacagaacccggagtggtggggtgatgtttctggagcattgcttcctcatccaaggatgctgatgatgcctggtgggcgacactttgatggctccgaggacaattcgctggcagctactttatctgaaaaaccaagtcaaacccatatggttgttccaagccaaaggagcaacggcacacctcaaaagccttcgctgaagttcctgatatatggaaagaccggatggatcggtggtctgcttggaaagatatgtgataagcaaggaattgcttacgagtatgggaaaggtcggttggaggatcgatcttctcttctgcaggatattcagagtgttaagccaacccatgttttcaattccgctggtgtgactgggagacccaatgttgactggtgtgagtctcacaagaccgagactatccgtgccaatgtagctggcacattgactctagctgatgtctgcagagagcacggactcctaatgatgaatttcgctactggttgtatattcgaatatgacgacaagcatccggaaggttcaggaattggcttcaaggaggaagacacacccaacttcactggctctttctactcgaaaaccaaagccatggtcgaggagctgctaaaggagtatgacaacgtatgcacattgagggtaaggatgccgatctcctcggatctaaacaacccgcgcaacttcatcaccaagatctccaggtacaacaaagtagtgaacatcccaaacagcatgactgtgttggacgagttattaccaatctccatcgagatggcgaaaagaaacttgaaaggaatctggaacttcacaaacccaggtgtggtgagccacaacgagatcctagagatgtacagagactacatcaaccctgaattcaaatgggcaaacttcacattagaggagcaagctaaagtcattgtggctccaagaagcaacaacgagatggatgcttccaagctcaagaaagagttccctgagctactctctatcaaggagtctctgattaagtatgcatacgggccaaacaagaaaacctgaagagaatgattgtgattcgtcattagataatcacctttaatatcagtttcgtgtattttgttttgttattgtttaattaccccttctttcattagatttgcttaaggggtgtatttgtagttcgaatattatatgtaataagagcttgttctcatttgtgtc

SEQ ID NO: 21090 - protein, 669 aa, Arabidopsis thaliana
  peptide (1)..(669): Ceres Seq. ID no. 12674676
MASYTPKNILITGAAGFIASHVANRLIRSYPDYKIVVLDKLDYCSNLKNLNPSKHSPNFKFVKGDIASADLVNHLLITEGIDTIMHFAAQTHVDNSFGNSFEFTKNNIYGTHVLLEACKVTGQIRRFIHVSTDEVYGETDEDALVGNHEASQLLPTNPYSATKAGAEMLVMAYGRSYGLPVITTRGNNVYGPNQFPEKLIPKFILLAMRGQVLPIHGDGSNVRSYLYCEDVAEAFEVVLHKGEVGHVYNIGTKKERRVNDVAKDICKLFNMDPEANIKFVDNRPFNDQRYFLDDQKLKKLGWSERTTWEEGLKKTMDWYTQNPEWWGDVSGALLPHPRMLMMPGGRHFDGSEDNSLAATLSEKPSQTHMVVPSQRSNGTPQKPSLKFLIYGKTGWIGGLLGKICDKQGIAYEYGKGRLEDRSSLLQDIQSVKPTHVFNSAGVTGRPNVDWCESHKTETIRANVAGTLTLADVCREHGLLMMNFATGCIFEYDDKHPEGSGIGFKEEDTPNFTGSFYSKTKAMVEELLKEYDNVCTLRVRMPISSDLNNPRNFITKISRYNKVVNIPNSMTVLDELLPISIEMAKRNLKGIWNFTNPGVVSHNEILEMYRDYINPEFKWANFTLEEQAKVIVAPRSNNEMDASKLKKEFPELLSIKESLIKYAYGPNKKT

SEQ ID NO: 21091 - protein, 585 aa, Arabidopsis thaliana
  peptide (1)..(585): Ceres Seq. ID no. 12674677
MHFAAQTHVDNSFGNSFEFTKNNIYGTHVLLEACKVTGQIRRFIHVSTDEVYGETDEDALVGNHEASQLLPTNPYSATKAGAEMLVMAYGRSYGLPVITTRGNNVYGPNQFPEKLIPKFILLAMRGQVLPIHGDGSNVRSYLYCEDVAEAFEVVLHKGEVGHVYNIGTKKERRVNDVAKDICKLFNMDPEANIKFVDNRPFNDQRYFLDDQKLKKLGWSERTTWEEGLKKTMDWYTQNPEWWGDVSGALLPHPRMLMMPGGRHFDGSEDNSLAATLSEKPSQTHMVVPSQRSNGTPQKPSLKFLIYGKTGWIGGLLGKICDKQGIAYEYGKGRLEDRSSLLQDIQSVKPTHVFNSAGVTGRPNVDWCESHKTETIRANVAGTLTLADVCREHGLLMMNFATGCIFEYDDKHPEGSGIGFKEEDTPNFTGSFYSKTKAMVEELLKEYDNVCTLRVRMPISSDLNNPRNFITKISRYNKVVNIPNSMTVLDELLPISIEMAKRNLKGIWNFTNPGVVSHNEILEMYRDYINPEFKWANFTLEEQAKVIVAPRSNNEMDASKLKKEFPELLSIKESLIKYAYGPNKKT

SEQ ID NO: 21092 - protein, 502 aa, Arabidopsis thaliana
  peptide (1)..(502): Ceres Seq. ID no. 12674678
MLVMAYGRSYGLPVITTRGNNVYGPNQFPEKLIPKFILLAMRGQVLPIHGDGSNVRSYLYCEDVAEAFEVVLHKGEVGHVYNIGTKKERRVNDVAKDICKLFNMDPEANIKFVDNRPFNDQRYFLDDQKLKKLGWSERTTWEEGLKKTMDWYTQNPEWWGDVSGALLPHPRMLMMPGGRHFDGSEDNSLAATLSEKPSQTHMVVPSQRSNGTPQKPSLKFLIYGKTGWIGGLLGKICDKQGIAYEYGKGRLEDRSSLLQDIQSVKPTHVFNSAGVTGRPNVDWCESHKTETIRANVAGTLTLADVCREHGLLMMNFATGCIFEYDDKHPEGSGIGFKEEDTPNFTGSFYSKTKAMVEELLKEYDNVCTLRVRMPISSDLNNPRNFITKISRYNKVVNIPNSMTVLDELLPISIEMAKRNLKGIWNFTNPGVVSHNEILEMYRDYINPEFKWANFTLEEQAKVIVAPRSNNEMDASKLKKEFPELLSIKESLIKYAYGPNKKT

SEQ ID NO: 21093 - DNA, 816 bp, Arabidopsis thaliana
  misc_feature (1)..(816): Ceres Seq. ID no. 13499732
  misc_feature (1)..(816): Ortholog of  Ceres SEQ ID NO 12612272 as cited in SEQ ID NO 55946
aatcttttcatcgttttcgtgtgaagtttaaagaagtttgggacccgtaaattctagaagctctggagatttcttgttcaccactataaatacatcatccgagtcaccagctttgctcagaagtagaaatcgaactcgccggaaaatcgtaattagctatctcagcattccaaacatctctttcgctttcgaaatcaaatcgagaatgtcgcttattccaagcttcttcggcaacaacaggcgaagcaacagcatcttcgacccgttctcactcgacgtttgggatccattcaaggaactgcaattcccgtcgtcgctctccggagaaacatcggcgataacgaacgcacgtgtggactggaaagagacggcggaggcgcacgtgttcaaggccgatctgccggggatgaagaaagaggaggttaaagtggagatagaggacgacagtgtgctcaagatcagtggagagagacacgtggagaaagaggagaagcaggacacgtggcatcgtgtggagaggtcgagcgggcaattctcgaggaagtttaagctgccggagaatgtgaagatggatcaagtcaaggcttccatggagaacggagttctgactgtgacggtgcctaaagtggaagaggctaagaagaaggctcaagttaagtctattgatatctctggctaaagccaattagcttatgggtttcatgtttatgcgtaaagactcttctgattatggctcttgatttgaatatggctctgtgttttggtaatgatgtattataactgttaatcctaataattaagcaaggcctttatatt

SEQ ID NO: 21094 - protein, 157 aa, Arabidopsis thaliana
  peptide (1)..(157): Ceres Seq. ID no. 13499733
MSLIPSFFGNNRRSNSIFDPFSLDVWDPFKELQFPSSLSGETSAITNARVDWKETAEAHVFKADLPGMKKEEVKVEIEDDSVLKISGERHVEKEEKQDTWHRVERSSGQFSRKFKLPENVKMDQVKASMENGVLTVTVPKVEEAKKKAQVKSIDISG

SEQ ID NO: 21095 - protein, 90 aa, Arabidopsis thaliana
  peptide (1)..(90): Ceres Seq. ID no. 13499734
MKKEEVKVEIEDDSVLKISGERHVEKEEKQDTWHRVERSSGQFSRKFKLPENVKMDQVKASMENGVLTVTVPKVEEAKKKAQVKSIDISG

SEQ ID NO: 21096 - DNA, 1267 bp, Arabidopsis thaliana
  misc_feature (1)..(1267): Ceres Seq. ID no. 13490634
  misc_feature (1)..(1267): Ortholog of  Ceres SEQ ID NO 13596891 as cited in SEQ ID NO 62868
  misc_feature (1)..(1267): Ortholog of  Ceres SEQ ID NO 12617235 as cited in SEQ ID NO 63990
  misc_feature (1)..(1267): Ortholog of  Ceres SEQ ID NO 13655371 as cited in SEQ ID NO 68945
agatctgaccaaagcaagaagggcttttactaagagtaaaacagaggaatatggagaccaccgtgaaaaacaagcaagtgatactgagaaattatgtgaagggtatccctaaagaatctgacctaatgattatcacagcttcagaccccgtggaactcaaggttaagcccggatcagcggcggttatggtgaggaatctttacttgtcttgtgacccttacatggggattctcatgagagaaccaactccttccactctagcacttttggatgccttcatccccggaaagcctatagctggaattggagtgtctcaagtaatagattctgatgatccatcttttacgaaaggcgatatgatttggggaattgtgaactgggaggagtttagtactatcaacccggctgctatattcaaaatcgacgtcaatatcaatgttcctctcagctactatactggaatcctcggtatgataggtttaactgcttacgccgggtttttcgagatatgttcacctaagaaaggagacacagtgttcgtgtctgctgcttctggcgcggttggacagctcgtgggtcagtttgcaaagttgatgggctgctatgttgttggaagtgccggaagtaaacaaaaggtcgatctcctgctgaacaaattcggttacgatgatgcattcaattataaggaagagcctgaccttgactccgccttgaagaggtgtgtaccaaaaggtattgacatatactttgagaacgtgggaggcaaaatgcttgacgcggttctacttaacatgaaaacgtatggacgaatcgctgtatgtgggatgatatctcagtaccatcttgaaaccagagacaggttacaaaatctacctgacatcatattcaagaagataaggatgcaagggtttgcttcttatgactttatagatagattcccaaagttcttggagtttgttcttccctacataaaagaagagaaattagcgtacgtggaagacattgttgaaggactcgagaatggtcctgctgctcttgtaggacttcttcatggaaaaaacgttggtaagcaagttctcaaggttgcttgagagtaaagaaatctatccatgtatggatatatgtaaaattacaaaaaaactaccttgtatgtcgtattttaagggtatgggttctaattggaatttatatgaaataaaagggcatatagttaaattccatattttcgtgtttaaatgggcccaagtgaagcgcagcttaataatcc

SEQ ID NO: 21097 - protein, 346 aa, Arabidopsis thaliana
  peptide (1)..(346): Ceres Seq. ID no. 13490635
METTVKNKQVILRNYVKGIPKESDLMIITASDPVELKVKPGSAAVMVRNLYLSCDPYMGILMREPTPSTLALLDAFIPGKPIAGIGVSQVIDSDDPSFTKGDMIWGIVNWEEFSTINPAAIFKIDVNINVPLSYYTGILGMIGLTAYAGFFEICSPKKGDTVFVSAASGAVGQLVGQFAKLMGCYVVGSAGSKQKVDLLLNKFGYDDAFNYKEEPDLDSALKRCVPKGIDIYFENVGGKMLDAVLLNMKTYGRIAVCGMISQYHLETRDRLQNLPDIIFKKIRMQGFASYDFIDRFPKFLEFVLPYIKEEKLAYVEDIVEGLENGPAALVGLLHGKNVGKQVLKVA

SEQ ID NO: 21098 - protein, 321 aa, Arabidopsis thaliana
  peptide (1)..(321): Ceres Seq. ID no. 13490636
MIITASDPVELKVKPGSAAVMVRNLYLSCDPYMGILMREPTPSTLALLDAFIPGKPIAGIGVSQVIDSDDPSFTKGDMIWGIVNWEEFSTINPAAIFKIDVNINVPLSYYTGILGMIGLTAYAGFFEICSPKKGDTVFVSAASGAVGQLVGQFAKLMGCYVVGSAGSKQKVDLLLNKFGYDDAFNYKEEPDLDSALKRCVPKGIDIYFENVGGKMLDAVLLNMKTYGRIAVCGMISQYHLETRDRLQNLPDIIFKKIRMQGFASYDFIDRFPKFLEFVLPYIKEEKLAYVEDIVEGLENGPAALVGLLHGKNVGKQVLKVA

SEQ ID NO: 21099 - protein, 301 aa, Arabidopsis thaliana
  peptide (1)..(301): Ceres Seq. ID no. 13490637
MVRNLYLSCDPYMGILMREPTPSTLALLDAFIPGKPIAGIGVSQVIDSDDPSFTKGDMIWGIVNWEEFSTINPAAIFKIDVNINVPLSYYTGILGMIGLTAYAGFFEICSPKKGDTVFVSAASGAVGQLVGQFAKLMGCYVVGSAGSKQKVDLLLNKFGYDDAFNYKEEPDLDSALKRCVPKGIDIYFENVGGKMLDAVLLNMKTYGRIAVCGMISQYHLETRDRLQNLPDIIFKKIRMQGFASYDFIDRFPKFLEFVLPYIKEEKLAYVEDIVEGLENGPAALVGLLHGKNVGKQVLKVA

SEQ ID NO: 21100 - DNA, 731 bp, Arabidopsis thaliana
  misc_feature (1)..(731): Ceres Seq. ID no. 12396498
  misc_feature (1)..(731): Ortholog of  Ceres SEQ ID NO 12610904 as cited in SEQ ID NO 55865
aactttaacaaaagattgttcctgagaaattctagggtttctgaaatcgaggagagatccaatcggcaatggcgaatcaagtgatcaccggaatcaaagaaacagctcagtcaattactggagcggctcgtccatggggcgatttcctcgatctttccgccttcagcttcccttcctccatcgccgatgcaacaactcgcgtaactcagaacctgactcacttccgcatcaactacagtatcattctctctatcctcctaggtctaaccctaatcacacgtccaatcgccatcctcgcgtttatagccgttggcttagcttggttcttcctctacttcgctcgcgaggagccactcacgatcttcggattcactattgatgacggcatcgtcgctgtgcttctcattggtctttcgattgggtcgctagttaccaccggagtttggctcagagctctcaccaccgttggatttggtgttctggttttgatcttacacgctgcgttaagaggaacggatgatcttgtgagtgacgatctggaatcaccttatggaccgatgctctctacctctggcggtggtaacgacggtgctcgtggtgattacagtggaatctgatcaacacgatttgataatgagtttggggatttagggttttgttgttttgtaaattgtcattgtttgttttgtgtcccattaaacattgttaatgacaaaatatgttttaagacc

SEQ ID NO: 21101 - protein, 182 aa, Arabidopsis thaliana
  peptide (1)..(182): Ceres Seq. ID no. 12396499
MANQVITGIKETAQSITGAARPWGDFLDLSAFSFPSSIADATTRVTQNLTHFRINYSIILSILLGLTLITRPIAILAFIAVGLAWFFLYFAREEPLTIFGFTIDDGIVAVLLIGLSIGSLVTTGVWLRALTTVGFGVLVLILHAALRGTDDLVSDDLESPYGPMLSTSGGGNDGARGDYSGI

SEQ ID NO: 21102 - DNA, 675 bp, Arabidopsis thaliana
  misc_feature (1)..(675): Ceres Seq. ID no. 12322771
  misc_feature (1)..(675): Ortholog of  Ceres SEQ ID NO 13599214 as cited in SEQ ID NO 347
aatcttcgtaccaaagtcgccggagatcggaagctaacacgggaagatttagccggaagaaatggcttcgttaggtttcaacctcggcttcaccttctccaatgcacaaattcagcagcatcgaaaagtttccggaggtggaagagctcgcgtaatctcctgtaacagctcttcttcttcttcttctcaagcatcatctcctcaggggatttctgcagtgacgcctcttgagatagagctcgagttcttcggtccgaagccgggtagcgacgggtcatatccggtagataaagcaaaggctgtgagtggagataagcttctcagaagcattatgcaggataacaaaattgaactctacgctgcttacgggaaagtgatgaactgtggtggtggaggaagctgtggaacttgcattgtggagatactcgatggcagagatcttctgaatgagagaacagatacagaaaaccggtacctgaaaaagaagccggaatcttggagactcgcatgtcaaacaatagtagggaacaaagaaaactcaggaaaggttgtcgtgcagcggattccacagtggaagaagtgaattaatgtaaaggttatttgtctcagatttatgtgtatataacacatctctgtatgaatgttgtctcgtattaatggaagattcgtttgtct

SEQ ID NO: 21103 - protein, 173 aa, Arabidopsis thaliana
  peptide (1)..(173): Ceres Seq. ID no. 12322772
MASLGFNLGFTFSNAQIQQHRKVSGGGRARVISCNSSSSSSSQASSPQGISAVTPLEIELEFFGPKPGSDGSYPVDKAKAVSGDKLLRSIMQDNKIELYAAYGKVMNCGGGGSCGTCIVEILDGRDLLNERTDTENRYLKKKPESWRLACQTIVGNKENSGKVVVQRIPQWKK

SEQ ID NO: 21104 - DNA, 1700 bp, Arabidopsis thaliana
  misc_feature (1)..(1700): Ceres Seq. ID no. 13488833
  misc_feature (1)..(1700): Ortholog of  Ceres SEQ ID NO 12617887 as cited in SEQ ID NO 65526
aaaaaaaaaaaaagaaagaaaaaaaattcagaagcctttgttttcatcgatgaataaattaacaaacaaaactaaaaaataggatattcgctggccgaatcgcgtcgatccacatcgcaggtgagggttcctgcaatttatccctcgtggtctctgaatctcagatcgtcgtcaacgaatcctccattttctgaatcaaaattttctggaaacaatggggagcttggggacgatgctgagatatccggatgacatatatccgctcctgaagatgaaacgagcgattgagaaagcggagaagcagatccctcctgagccacactggggtttctgctattcgatgctccacaaggtttctcgaagcttttctctcgttattcagcaactcaacaccgagctccgtaacgccgtgtgtgtgttctacttggttctccgagctcttgatactgttgaggatgatactagcataccaactgatgaaaaggttcccatcctgatagcttttcaccggcacatatacgatactgattggcattattcatgtggtacgaaggagtacaagattctaatggaccaatttcaccatgtttctgcagcttttttggaacttgaaaaagggtatcaagaggctatcgaggaaattactagaagaatgggtgcagggatggccaagtttatctgccaagaggtagaaactgttgatgactacgatgaatactgccactatgttgctgggcttgttggtttaggtttgtcgaaactcttcctcgctgcaggatcagaggttttgacaccagattgggaggcgatttccaattcaatgggtttatttctgcagaaaacaaacattatcagagattatcttgaggacattaatgagataccaaaatcccgcatgttttggcctcgcgagatttggggcaaatatgctgacaagcttgaggatttaaaatacgaggagaacacaaacaaatccgtacagtgcttaaatgaaatggttaccaatgcgttgatgcatattgaagattgcctgaaatacatggtttccttgcgtgatccttccatatttcggttctgtgccatccctcagatcatggcgattggaacacttgcattatgctataacaatgaacaagtattcagaggcgttgtgaaactgaggcgaggtcttactgctaaagtcattgatcgtacaaagacaatggctgatgtctatggtgctttctatgatttttcctgcatgctgaagacaaaggttgacaagaacgatccaaatgccagtaagacactaaaccgacttgaagccgttcagaaactctgcagagacgctggagttcttcaaaacagaaaatcttatgttaatgacaaaggacaaccaaacagtgtctttattataatggttgtgattctactggccatagtctttgcatatctcagagcaaactgagtgatccatgtaagcgagtctgattgtatcaccatcattcaagatgttcagagcaaatttgagtgatgaagtaatctaggttgattcttattcacgccactgaatcctaagcaagattgtttccagaacaaacagagtttaagcatggtttagtctaaaaccatggattctattttagttactaccttcgttatctaaacgtgcatttgttcatctatttttattccttgtgtttaaagttctttctttgttt

SEQ ID NO: 21105 - protein, 410 aa, Arabidopsis thaliana
  peptide (1)..(410): Ceres Seq. ID no. 13488834
MGSLGTMLRYPDDIYPLLKMKRAIEKAEKQIPPEPHWGFCYSMLHKVSRSFSLVIQQLNTELRNAVCVFYLVLRALDTVEDDTSIPTDEKVPILIAFHRHIYDTDWHYSCGTKEYKILMDQFHHVSAAFLELEKGYQEAIEEITRRMGAGMAKFICQEVETVDDYDEYCHYVAGLVGLGLSKLFLAAGSEVLTPDWEAISNSMGLFLQKTNIIRDYLEDINEIPKSRMFWPREIWGKYADKLEDLKYEENTNKSVQCLNEMVTNALMHIEDCLKYMVSLRDPSIFRFCAIPQIMAIGTLALCYNNEQVFRGVVKLRRGLTAKVIDRTKTMADVYGAFYDFSCMLKTKVDKNDPNASKTLNRLEAVQKLCRDAGVLQNRKSYVNDKGQPNSVFIIMVVILLAIVFAYLRAN

SEQ ID NO: 21106 - protein, 404 aa, Arabidopsis thaliana
  peptide (1)..(404): Ceres Seq. ID no. 13488835
MLRYPDDIYPLLKMKRAIEKAEKQIPPEPHWGFCYSMLHKVSRSFSLVIQQLNTELRNAVCVFYLVLRALDTVEDDTSIPTDEKVPILIAFHRHIYDTDWHYSCGTKEYKILMDQFHHVSAAFLELEKGYQEAIEEITRRMGAGMAKFICQEVETVDDYDEYCHYVAGLVGLGLSKLFLAAGSEVLTPDWEAISNSMGLFLQKTNIIRDYLEDINEIPKSRMFWPREIWGKYADKLEDLKYEENTNKSVQCLNEMVTNALMHIEDCLKYMVSLRDPSIFRFCAIPQIMAIGTLALCYNNEQVFRGVVKLRRGLTAKVIDRTKTMADVYGAFYDFSCMLKTKVDKNDPNASKTLNRLEAVQKLCRDAGVLQNRKSYVNDKGQPNSVFIIMVVILLAIVFAYLRAN

SEQ ID NO: 21107 - protein, 391 aa, Arabidopsis thaliana
  peptide (1)..(391): Ceres Seq. ID no. 13488836
MKRAIEKAEKQIPPEPHWGFCYSMLHKVSRSFSLVIQQLNTELRNAVCVFYLVLRALDTVEDDTSIPTDEKVPILIAFHRHIYDTDWHYSCGTKEYKILMDQFHHVSAAFLELEKGYQEAIEEITRRMGAGMAKFICQEVETVDDYDEYCHYVAGLVGLGLSKLFLAAGSEVLTPDWEAISNSMGLFLQKTNIIRDYLEDINEIPKSRMFWPREIWGKYADKLEDLKYEENTNKSVQCLNEMVTNALMHIEDCLKYMVSLRDPSIFRFCAIPQIMAIGTLALCYNNEQVFRGVVKLRRGLTAKVIDRTKTMADVYGAFYDFSCMLKTKVDKNDPNASKTLNRLEAVQKLCRDAGVLQNRKSYVNDKGQPNSVFIIMVVILLAIVFAYLRAN

SEQ ID NO: 21108 - DNA, 1879 bp, Arabidopsis thaliana
  misc_feature (1)..(1879): Ceres Seq. ID no. 13509253
  misc_feature (1)..(1879): Ortholog of  Ceres SEQ ID NO 15224709 as cited in SEQ ID NO 68627
atagattatagatataacccactgaattaatattacggtcttcaatataggtgcatttaaaacataacgttccctctcttgtcttcttatttttgctctctgttctttagaactgccattaacgagagtgagagagagacacacacacacagcgagtgaaaatgtctccggagaagaagagtcaaaacttccctccaataacggaatgcagagacggagagtacgattcgatagccgccgatcttgacgggactctgcttctctcaagaagctccttcccttacttcatgctcgtcgctgttgaagctggaagccttttacgtggactaatcctccttctctcgttaccattcgtcattatctcttacctattcgtatccgaatctcttggtatccagatcctcatcttcatctcattcgctggtctcaaaatccgcgatatcgaacttgtctctcgcgcagttcttccacggtacgagatctaacatagagtgttttcttgttagtagatcactttagtttttttccgatgaactatgtttaggttttacgcggcggatgtgaggaaagacagttttgaggtgtttgataagtgtaagaagaaagtggtagtgacggcgaatccgattgtgatggtggaggcgtttgtgaaggattatcttggaggtgataaagttttgggaacagagattgaagttaaccctaaaaccaatagagccactggatttgtgaagaagcctggtgttcttgttggtgatcttaagaggttagccattttaaaagagtttggtaacgaatcacctgatctcggcctcggtgatcgaacctctgatcatgatttcatgtctctctgcaagaaaggttacatggttcatgcgaccaagtcagccacaacgattccaaaagaacgcttaaagaaccgcatagtcttccatgatgggcgtttagcgcaacgtccaactccgttaaacgccattatcacatacctatggcttccttttggtttcatcctctccatcattcgcgtctacttcaacctccctttacctgaaagatttgtccgttacacttacgagatgctcgggatccacttaaccattcgtggtcatcgtcctccacctccttcccctggaactcttggcaacctctatgtccttaaccaccgtaccgcgcttgatcccatcatcgttgctattgctcttggacgtaagatctgttgcgtcacttacagtgtctctcgtctctcccttatgctttctcctattcctgctgttgccctcacccgtgaccgtgccaccgatgctgccaacatgagaaaacttctcgagaaaggcgacttggtgatatgtcccgaaggcacgacgtgcagagaagagtatctactgagatttagcgctctattcgcagagctaagcgaccggattgtgccagtagcgatgaactgtaaacaaggaatgttcaacgggaccacagttaggggtgtgaagttttgggacccttacttcttcttcatgaacccaagaccaagctatgaagccactttcttggatcgtttgcctgaagaaatgactgtcaacggtggtggcaagactcctatagaggtggctaattacgtccagaaagttatcggcgcggttttgggcttcgaatgcaccgaacttactcgcaaggataaatatcttttgcttggaggtaatgacggcaaggtagagtctatcaacaacaccaagaagtgaaaatccaaacaagggttttttcttgttatgtcgtatacgaattttcatgtgtgtaattgctggagctcttgtcatcattatggtacgtttttgttatgtgtaatacgacgtatatatgtttgaataaaactatgtttcggtgg

SEQ ID NO: 21109 - protein, 399 aa, Arabidopsis thaliana
  peptide (1)..(399): Ceres Seq. ID no. 13509254
MFRFYAADVRKDSFEVFDKCKKKVVVTANPIVMVEAFVKDYLGGDKVLGTEIEVNPKTNRATGFVKKPGVLVGDLKRLAILKEFGNESPDLGLGDRTSDHDFMSLCKKGYMVHATKSATTIPKERLKNRIVFHDGRLAQRPTPLNAIITYLWLPFGFILSIIRVYFNLPLPERFVRYTYEMLGIHLTIRGHRPPPPSPGTLGNLYVLNHRTALDPIIVAIALGRKICCVTYSVSRLSLMLSPIPAVALTRDRATDAANMRKLLEKGDLVICPEGTTCREEYLLRFSALFAELSDRIVPVAMNCKQGMFNGTTVRGVKFWDPYFFFMNPRPSYEATFLDRLPEEMTVNGGGKTPIEVANYVQKVIGAVLGFECTELTRKDKYLLLGGNDGKVESINNTKK

SEQ ID NO: 21110 - protein, 367 aa, Arabidopsis thaliana
  peptide (1)..(367): Ceres Seq. ID no. 13509255
MVEAFVKDYLGGDKVLGTEIEVNPKTNRATGFVKKPGVLVGDLKRLAILKEFGNESPDLGLGDRTSDHDFMSLCKKGYMVHATKSATTIPKERLKNRIVFHDGRLAQRPTPLNAIITYLWLPFGFILSIIRVYFNLPLPERFVRYTYEMLGIHLTIRGHRPPPPSPGTLGNLYVLNHRTALDPIIVAIALGRKICCVTYSVSRLSLMLSPIPAVALTRDRATDAANMRKLLEKGDLVICPEGTTCREEYLLRFSALFAELSDRIVPVAMNCKQGMFNGTTVRGVKFWDPYFFFMNPRPSYEATFLDRLPEEMTVNGGGKTPIEVANYVQKVIGAVLGFECTELTRKDKYLLLGGNDGKVESINNTKK

SEQ ID NO: 21111 - protein, 297 aa, Arabidopsis thaliana
  peptide (1)..(297): Ceres Seq. ID no. 13509256
MSLCKKGYMVHATKSATTIPKERLKNRIVFHDGRLAQRPTPLNAIITYLWLPFGFILSIIRVYFNLPLPERFVRYTYEMLGIHLTIRGHRPPPPSPGTLGNLYVLNHRTALDPIIVAIALGRKICCVTYSVSRLSLMLSPIPAVALTRDRATDAANMRKLLEKGDLVICPEGTTCREEYLLRFSALFAELSDRIVPVAMNCKQGMFNGTTVRGVKFWDPYFFFMNPRPSYEATFLDRLPEEMTVNGGGKTPIEVANYVQKVIGAVLGFECTELTRKDKYLLLGGNDGKVESINNTKK

SEQ ID NO: 21112 - DNA, 1488 bp, Arabidopsis thaliana
  misc_feature (1)..(1488): Ceres Seq. ID no. 13487558
  misc_feature (1)..(1488): Ortholog of  Ceres SEQ ID NO 13659033 as cited in SEQ ID NO 66372
  misc_feature (1)..(1488): Ortholog of  Ceres SEQ ID NO 13655724 as cited in SEQ ID NO 68973
  misc_feature (1)..(1488): Ortholog of  Ceres SEQ ID NO 12625899 as cited in SEQ ID NO 69079
actgtgctctcttcttcaatggaacaacaattaaccttagtattgcttgatagcccaaaaggcgccaaatatgtagaaacctttgaagaagccgcttcttcttcttcttcttcttcttcttcttctgttccctcctgcactgatcaccgccatcgaaccttcgtcaaattcttcctttacttctctctcgtcgctcttgcttactatttaatcatctccagtctcgccgtctctccaattcccccaacattgccgcaatcttctcccggaaacgtttcatcagcaaagtgtgatcttttcaccggagattggataccagatccaacaggtcctctgtacacaaatgtcacttgtcgtcacattcaagattttcagaactgcctattgaatggacgaccagatgtgaattatctcttctggagatggaagcctcgtgattgtgatcttcctaggtttagtccatcgcagtttcttgcttcagtgaagaacaaatggtgggcttttatcggtgattccattgctcgtaatcatgtccagtctctcatctgcattctctctcaggtggaagaagtggaggaaatctatcacgataaggagttcagatccaagatatggagattcccttctcacaacttcacactatcagtcatttggtctcctttccttctcaaatccgaaacatctagcaactcggatattcagctttacctcgaccagcttgaccacaaatggactgtccaatacccgaaattcgactacgttgttatctctggaggcaaatggtttcttaaaacaacaattttccatgaaaacaacgtagtcacgggctgtcattactgccaaggaagaaacaacctaactgatctcggctatgattactcctaccgcaaaaccctaaaccttctccgtgacttcgtcctaaactcaacccacaaaccgctggttctgtttcgaacaacaacgcctgaccatttcgaaaacggagagtggaacactggtgggtattgcaacagaacgatgccgtttaaagaaggccaagcaaatatgaaaactgtagatgatgtgatgcgtgatgttgagcttgaggtgtttcagaaatttgggaaaggttttggcttaggttccaacatcaggctattagacacgactggaatgtctcttctccgtccagacgggcatccgggaccataccggcatccaaatccttttgctggagttaagaataagagcaatgttcagaatgattgtctgcattggtgcttacctggtccaattgattcatggaatgatgtgatggtggaaaccacgcttaaccgggaacgggaactatacgatttaaccggttaatgtaccacgatatcgcttgtagctagttacagtcaatagccattccacttgtcaatgtctcgtatatgatagttctatattttaattttgtaatggttctaaacaagaataaacgatgcaaaattttgcagtgtgaatttt

SEQ ID NO: 21113 - protein, 448 aa, Arabidopsis thaliana
  peptide (1)..(448): Ceres Seq. ID no. 13487559
TVLSSSMEQQLTLVLLDSPKGAKYVETFEEAASSSSSSSSSSVPSCTDHRHRTFVKFFLYFSLVALAYYLIISSLAVSPIPPTLPQSSPGNVSSAKCDLFTGDWIPDPTGPLYTNVTCRHIQDFQNCLLNGRPDVNYLFWRWKPRDCDLPRFSPSQFLASVKNKWWAFIGDSIARNHVQSLICILSQVEEVEEIYHDKEFRSKIWRFPSHNFTLSVIWSPFLLKSETSSNSDIQLYLDQLDHKWTVQYPKFDYVVISGGKWFLKTTIFHENNVVTGCHYCQGRNNLTDLGYDYSYRKTLNLLRDFVLNSTHKPLVLFRTTTPDHFENGEWNTGGYCNRTMPFKEGQANMKTVDDVMRDVELEVFQKFGKGFGLGSNIRLLDTTGMSLLRPDGHPGPYRHPNPFAGVKNKSNVQNDCLHWCLPGPIDSWNDVMVETTLNRERELYDLTG

SEQ ID NO: 21114 - protein, 442 aa, Arabidopsis thaliana
  peptide (1)..(442): Ceres Seq. ID no. 13487560
MEQQLTLVLLDSPKGAKYVETFEEAASSSSSSSSSSVPSCTDHRHRTFVKFFLYFSLVALAYYLIISSLAVSPIPPTLPQSSPGNVSSAKCDLFTGDWIPDPTGPLYTNVTCRHIQDFQNCLLNGRPDVNYLFWRWKPRDCDLPRFSPSQFLASVKNKWWAFIGDSIARNHVQSLICILSQVEEVEEIYHDKEFRSKIWRFPSHNFTLSVIWSPFLLKSETSSNSDIQLYLDQLDHKWTVQYPKFDYVVISGGKWFLKTTIFHENNVVTGCHYCQGRNNLTDLGYDYSYRKTLNLLRDFVLNSTHKPLVLFRTTTPDHFENGEWNTGGYCNRTMPFKEGQANMKTVDDVMRDVELEVFQKFGKGFGLGSNIRLLDTTGMSLLRPDGHPGPYRHPNPFAGVKNKSNVQNDCLHWCLPGPIDSWNDVMVETTLNRERELYDLTG

SEQ ID NO: 21115 - DNA, 2501 bp, Arabidopsis thaliana
  misc_feature (1)..(2501): Ceres Seq. ID no. 13488102
  misc_feature (1)..(2501): Ortholog of  Ceres SEQ ID NO 13654989 as cited in SEQ ID NO 63117
  misc_feature (1)..(2501): Ortholog of  Ceres SEQ ID NO 14313228 as cited in SEQ ID NO 67057
gggacacccattaaaatatttcatcaacttgtcggtaaaattaattcttggcttattctatctttctttctctgtcttcttctttcaatttttcaataacaataatacagatgtgtatacattagatacacgtatactagtactaaacttcactgtgtgatctgatctagagtttttatactatcagaataaataatagtcgacaatttgggatttgtttatggtttacttcacatgaatcacatacgttcatgtcgattcctttgagatactgtctcgatttcgtttttttctcttgtttaatttaaaattattgtaaagcacgtggatttgcttgtcttggttttgttttctccttcgacctctttgatgaaatcgaggaacctacaatttcttcgtcgatccaaatggtagcttagtggtggtgataataggtttctcctcttgattggctccagctttaggtttttttttttatctttgtttctgcttcgattcccaaaatttaccctttcgattttgagtctaactagtcgagttgactcagtagagtcgaaagcttctgggtttacgaagagacatctcctaattgaaacaaaacctttcctttccattgggctgagaaaaaagcaagagtctttgaatattttttggagcgtggttttatttagatgggaggtcaatgctctagcctgagttgttgcaggaacacttcacacaagacagctgttcttgaagctcctgatgttgataatggagagagtagtgagatcactgatgttcctaatttccgggagtatactttagaacagcttaaggcagctacttctggttttgccgtggagtatattgtatctgaacatggagaaaaggctccaaatgttgtctataaagggaaattggagaaccaaaagaagattgctgtcaagcgttttactagaatggcctggcctgattcacgacagttcttggaggaagcgaggtcggttggtcagctacggagtgagagaatggccaatttactcggatgttgctgcgaaggtgacgagaggttacttgtagcagagtttatgcctaatgaaacactagccaaacacctttttcactgggaaactcaacctatgaaatggactatgaggctacgagttgttttatatctagcacaagctcttgaatactgcaccagcaaaggccgtactctttaccacgacctcaatgcttaccgggttttgtttgatgaggaatgcaatccaagactatctacttttggcttgatgaagaatagtcgggatggaaaaagttacagcactaatcttgctttcacccctcctgaatatctacgaactgggagaattactccagagagtgtaatatacagctttggcactcttctgcttgatcttctcagcggaaaacatatacctcctagccatgcccttgatctgattagagacagaaatctccagacgctaactgattcttgcctagatgggcagttttctgatagtgatggtacagagctagtacgcctagcttctcgttgtcttcagtatgaagctcgtgagcggccaaacaccaaatctttagtgactgccttgacacctcttcagaaggagacagaggtcctgtctcatgttctaatgggtctacctcacagtggttcagtctctcctctgtcccctcttggtgaggcttgttcaagaagggacctgaccgctatgcttgagatcctggagaaacttggatacaaagacgacgagggtgtcaccaatgagctctcgtttcatatgtggacagaccagatgcaagagtctttgaactcgaagaagaagggtgatgtggctttcaggcaaaaagactttagagaggccatcgagtgttacacacagtttattgatggaggaatgatctctccaacagtgtgtgctcggcgtagtctgtgttacctaatgagtgacatgccgaaagaagctttagatgatgcaattcaggctcaagtgatctctcccgtgtggcatgtcgcatcatatctgcagtctgcttcccttggtatcctgggaatggagaaggaatctcaaatcgcactgaaagagggctcgaaccttgaagcaaagatgaatggagttccccgagtgaagtaagatatatagcatttaagatttttcttgttgggaaagatgaaagaacatcttaccaagtaaaaggggtatgaatcttttgagcacaatgatgggaaaacactcaagagcaatgcaaaactatagaccctcttcttctggttgtatgaggtgttttgcccttcttgtgcctctttttatgggcattgaattgaaggagtcatttcctttattagctttgaaatccatttcctgaaactttattgtactaaaaaacccattattgcagaaaccaaaagagggttttgtttcttttgatctataggtcacacagactaaacatgtatgaactcttgtcttttgactaaagagatattcgacagc

SEQ ID NO: 21116 - protein, 489 aa, Arabidopsis thaliana
  peptide (1)..(489): Ceres Seq. ID no. 13488103
MGGQCSSLSCCRNTSHKTAVLEAPDVDNGESSEITDVPNFREYTLEQLKAATSGFAVEYIVSEHGEKAPNVVYKGKLENQKKIAVKRFTRMAWPDSRQFLEEARSVGQLRSERMANLLGCCCEGDERLLVAEFMPNETLAKHLFHWETQPMKWTMRLRVVLYLAQALEYCTSKGRTLYHDLNAYRVLFDEECNPRLSTFGLMKNSRDGKSYSTNLAFTPPEYLRTGRITPESVIYSFGTLLLDLLSGKHIPPSHALDLIRDRNLQTLTDSCLDGQFSDSDGTELVRLASRCLQYEARERPNTKSLVTALTPLQKETEVLSHVLMGLPHSGSVSPLSPLGEACSRRDLTAMLEILEKLGYKDDEGVTNELSFHMWTDQMQESLNSKKKGDVAFRQKDFREAIECYTQFIDGGMISPTVCARRSLCYLMSDMPKEALDDAIQAQVISPVWHVASYLQSASLGILGMEKESQIALKEGSNLEAKMNGVPRVK

SEQ ID NO: 21117 - protein, 399 aa, Arabidopsis thaliana
  peptide (1)..(399): Ceres Seq. ID no. 13488104
MAWPDSRQFLEEARSVGQLRSERMANLLGCCCEGDERLLVAEFMPNETLAKHLFHWETQPMKWTMRLRVVLYLAQALEYCTSKGRTLYHDLNAYRVLFDEECNPRLSTFGLMKNSRDGKSYSTNLAFTPPEYLRTGRITPESVIYSFGTLLLDLLSGKHIPPSHALDLIRDRNLQTLTDSCLDGQFSDSDGTELVRLASRCLQYEARERPNTKSLVTALTPLQKETEVLSHVLMGLPHSGSVSPLSPLGEACSRRDLTAMLEILEKLGYKDDEGVTNELSFHMWTDQMQESLNSKKKGDVAFRQKDFREAIECYTQFIDGGMISPTVCARRSLCYLMSDMPKEALDDAIQAQVISPVWHVASYLQSASLGILGMEKESQIALKEGSNLEAKMNGVPRVK

SEQ ID NO: 21118 - protein, 376 aa, Arabidopsis thaliana
  peptide (1)..(376): Ceres Seq. ID no. 13488105
MANLLGCCCEGDERLLVAEFMPNETLAKHLFHWETQPMKWTMRLRVVLYLAQALEYCTSKGRTLYHDLNAYRVLFDEECNPRLSTFGLMKNSRDGKSYSTNLAFTPPEYLRTGRITPESVIYSFGTLLLDLLSGKHIPPSHALDLIRDRNLQTLTDSCLDGQFSDSDGTELVRLASRCLQYEARERPNTKSLVTALTPLQKETEVLSHVLMGLPHSGSVSPLSPLGEACSRRDLTAMLEILEKLGYKDDEGVTNELSFHMWTDQMQESLNSKKKGDVAFRQKDFREAIECYTQFIDGGMISPTVCARRSLCYLMSDMPKEALDDAIQAQVISPVWHVASYLQSASLGILGMEKESQIALKEGSNLEAKMNGVPRVK

SEQ ID NO: 21119 - DNA, 969 bp, Arabidopsis thaliana
  misc_feature (1)..(969): Ceres Seq. ID no. 13497609
  misc_feature (1)..(969): Ortholog of  Ceres SEQ ID NO 14303437 as cited in SEQ ID NO 54411
  misc_feature (1)..(969): Ortholog of  Ceres SEQ ID NO 12611816 as cited in SEQ ID NO 56754
  misc_feature (1)..(969): Ortholog of  Ceres SEQ ID NO 15170943 as cited in SEQ ID NO 59454
aacgagaaacagaacatcactaccaaacatctccagctcagtttcttcaaataaaaacagttaatctctctaaaacaattttttgtttctctctctcttaaataaccagagagttcagaatcattttgattctctttgtaatctttagttgttgtacctaacatcatggctgaagaggaaccgaagaaggtgacagagaccgtgtcggaaccaactccaacaccggaagttccggtggagaaacctgctgctgctgcagatgttgctcctcaggagaagcctgtggctccacctcccgttcttccatctccggcaccggcagaggagaagcaagaagactctaaggctattgttcccgtcgtccctaaagaagtagaggaagagaagaaagaaggatcagttaatcgagatgctgttctggctagagttgagacagagaagaggatgtcacttatcaaagcttgggaagaggctgagaaatgcaaagtggagaacaaagctgagaagaagctttcttcaattggatcatgggagaacaacaagaaagcagctgtggaagctgagctcaagaaaatggaggagcaattggagaagaagaaggcagagtatgtggagcagatgaagaacaaaatagctcaaattcacaaggaagcagaagagaagagagcgatgattgaagctaagcgtggagaagaaattctcaaagcagaggaattagcagccaagtaccgtgccactggaaccgctcccaaaaagcttttcggatgcatgtgatctctaatcatctcgatggggaaacaaatgaaatatggtatttgatgtaatgacgttctttagtttgcttaatgtgggtttaatatggcaacatagaaagttataaggtcaacatcttatattgattgggctgcgtttgttaatttgatttgtatttgtacatcttttcattgaaaggctttctcttagctttat

SEQ ID NO: 21120 - protein, 202 aa, Arabidopsis thaliana
  peptide (1)..(202): Ceres Seq. ID no. 13497610
MAEEEPKKVTETVSEPTPTPEVPVEKPAAAADVAPQEKPVAPPPVLPSPAPAEEKQEDSKAIVPVVPKEVEEEKKEGSVNRDAVLARVETEKRMSLIKAWEEAEKCKVENKAEKKLSSIGSWENNKKAAVEAELKKMEEQLEKKKAEYVEQMKNKIAQIHKEAEEKRAMIEAKRGEEILKAEELAAKYRATGTAPKKLFGCM

SEQ ID NO: 21121 - protein, 109 aa, Arabidopsis thaliana
  peptide (1)..(109): Ceres Seq. ID no. 13497611
MSLIKAWEEAEKCKVENKAEKKLSSIGSWENNKKAAVEAELKKMEEQLEKKKAEYVEQMKNKIAQIHKEAEEKRAMIEAKRGEEILKAEELAAKYRATGTAPKKLFGCM

SEQ ID NO: 21122 - DNA, 1027 bp, Arabidopsis thaliana
  misc_feature (1)..(1027): Ceres Seq. ID no. 13490351
  misc_feature (1)..(1027): Ortholog of  Ceres SEQ ID NO 14304110 as cited in SEQ ID NO 56394
  misc_feature (1)..(1027): Ortholog of  Ceres SEQ ID NO 14315448 as cited in SEQ ID NO 57231
ggtagtgagaagaaaaagcgtcattcttacgtttttcttttaagtttcactcagagacagaagctagaacaaagaaaagagaagccttttgaaagcaatcaactttaatctttttcaaccaacactagtactctagctgttgctctttctcttcgttttcttccttccttcttctcttagatctctttcttttaacttgagtcttatcctttggatttttattcgatttgattcctccgtttggtttggtcagttttctttagactcttagtctttcctctgatctgggttttagctgtagaaactcgtgagttagatcgattgagaacccaactataaattagtaaaaagagaaaccctttataggttttttggggtttttgtctcagtctgaccaatgggttcacaggtttcttgtctagttgcttgaggtttttggtttttggtttgaatagagttatgagaagaggtagaggaaaaggcaagaggcagaatgctactgctagagaagatcgagggagcggcgaggaagaaaagattccagcttttaggaaaagagggaggccacagaagccggtgaaagatgaagaagaagaagaagaagagctagtgaagaagacagatgaggaagaagacaaggatgatgatacaaatggttcagtaacaagtaaagaaaatgtgacagagaatgggaggaagaggaagaaaccagtggagtctaaagagagcaacataactgaagaagagaatggggtagggtcaaaatcaagcacagaagattctatgaaatcatcgtcgtctattgggtttaggcagaatgggagcagaaggaagaacaaaccaagacgagctgctgaagctgttgttgaatgtaatggggtttgaaaagaggttcttaacgcttttgaaaccgcctttttggtattttttttgttgtttttgttagatacttttgctgttataaacccgagtttgatgcgggtgcgttctggtttcattacatggaatcaaaacttcgatttttcgg

SEQ ID NO: 21123 - protein, 141 aa, Arabidopsis thaliana
  peptide (1)..(141): Ceres Seq. ID no. 13490352
MRRGRGKGKRQNATAREDRGSGEEEKIPAFRKRGRPQKPVKDEEEEEEELVKKTDEEEDKDDDTNGSVTSKENVTENGRKRKKPVESKESNITEEENGVGSKSSTEDSMKSSSSIGFRQNGSRRKNKPRRAAEAVVECNGV

SEQ ID NO: 21124 - DNA, 1630 bp, Arabidopsis thaliana
  misc_feature (1)..(1630): Ceres Seq. ID no. 13495859
  misc_feature (1)..(1630): Ortholog of  Ceres SEQ ID NO 12784451 as cited in SEQ ID NO 66483
tgggaccaaaatcgtccattgaagtgaacagtcagcatcgttttgcttgcttgtgcgtttctctcgaactctctccatggctgttgcgctccaattcagccgattatgcgttcgaccggatactttcgtgcgggagaatcatctctctggatccggatctctccgccgccggaaagctttatcagtccggtgctcgtctggcgatgagaacgctccttcgccatcggtggtgatggactccgatttcgacgccaaggtgttccgtaagaacttgacgagaagcgataattacaatcgtaaagggttcggtcataaggaggagacactcaagctcatgaatcgagagtacaccagtgatatattggagacactgaaaacaaatgggtatacttattcttggggagatgttactgtgaaactcgctaaagcatatggtttttgctggggtgttgagcgtgctgttcagattgcatatgaagcacgaaagcagtttccagaggagaggctttggattactaacgaaatcattcataacccgaccgtcaataagaggttggaagatatggatgttaaaattattccggttgaggattcaaagaaacagtttgatgtagtagagaaagatgatgtggttatccttcctgcgtttggagctggtgttgacgagatgtatgttcttaatgataaaaaggtgcaaattgttgacacgacttgtccttgggtgacaaaggtctggaacacggttgagaagcacaagaagggggaatacacatcagtaatccatggtaaatataatcatgaagagacgattgcaactgcgtcttttgcaggaaagtacatcattgtaaagaacatgaaagaggcaaattacgtttgtgattacattctcggtggccaatacgatggatctagctccacaaaagaggagttcatggagaaattcaaatacgcaatttcgaagggtttcgatcccgacaatgaccttgtcaaagttggtattgcaaaccaaacaacgatgctaaagggagaaacagaggagataggaagattactcgagacaacaatgatgcgcaagtatggagtggaaaatgtaagcggacatttcatcagcttcaacacaatatgcgacgctactcaagagcgacaagacgcaatctatgagctagtggaagagaagattgacctcatgctagtggttggcggatggaattcaagtaacacctctcaccttcaggaaatctcagaggcacggggaatcccatcttactggatcgatagtgagaaacggataggacctgggaataaaatagcctataagctccactatggagaactggtcgagaaggaaaactttctcccaaagggaccaataacaatcggtgtgacatcaggtgcatcaaccccggataaggtcgtggaagatgctttggtgaaggtgttcgacattaaacgtgaagagttattgcagctggcttgattcggcattgtgatcgtattcaaatactatttgtcatgtcaagagtgtactaaaatatatgtagttgtatgatttgtctttataacttttgtaagaggttttgtaattcaaagtcaacatcctcgttatcttactccacttaatgttcttacc

SEQ ID NO: 21125 - protein, 466 aa, Arabidopsis thaliana
  peptide (1)..(466): Ceres Seq. ID no. 13495860
MAVALQFSRLCVRPDTFVRENHLSGSGSLRRRKALSVRCSSGDENAPSPSVVMDSDFDAKVFRKNLTRSDNYNRKGFGHKEETLKLMNREYTSDILETLKTNGYTYSWGDVTVKLAKAYGFCWGVERAVQIAYEARKQFPEERLWITNEIIHNPTVNKRLEDMDVKIIPVEDSKKQFDVVEKDDVVILPAFGAGVDEMYVLNDKKVQIVDTTCPWVTKVWNTVEKHKKGEYTSVIHGKYNHEETIATASFAGKYIIVKNMKEANYVCDYILGGQYDGSSSTKEEFMEKFKYAISKGFDPDNDLVKVGIANQTTMLKGETEEIGRLLETTMMRKYGVENVSGHFISFNTICDATQERQDAIYELVEEKIDLMLVVGGWNSSNTSHLQEISEARGIPSYWIDSEKRIGPGNKIAYKLHYGELVEKENFLPKGPITIGVTSGASTPDKVVEDALVKVFDIKREELLQLA

SEQ ID NO: 21126 - protein, 414 aa, Arabidopsis thaliana
  peptide (1)..(414): Ceres Seq. ID no. 13495861
MDSDFDAKVFRKNLTRSDNYNRKGFGHKEETLKLMNREYTSDILETLKTNGYTYSWGDVTVKLAKAYGFCWGVERAVQIAYEARKQFPEERLWITNEIIHNPTVNKRLEDMDVKIIPVEDSKKQFDVVEKDDVVILPAFGAGVDEMYVLNDKKVQIVDTTCPWVTKVWNTVEKHKKGEYTSVIHGKYNHEETIATASFAGKYIIVKNMKEANYVCDYILGGQYDGSSSTKEEFMEKFKYAISKGFDPDNDLVKVGIANQTTMLKGETEEIGRLLETTMMRKYGVENVSGHFISFNTICDATQERQDAIYELVEEKIDLMLVVGGWNSSNTSHLQEISEARGIPSYWIDSEKRIGPGNKIAYKLHYGELVEKENFLPKGPITIGVTSGASTPDKVVEDALVKVFDIKREELLQLA

SEQ ID NO: 21127 - protein, 380 aa, Arabidopsis thaliana
  peptide (1)..(380): Ceres Seq. ID no. 13495862
MNREYTSDILETLKTNGYTYSWGDVTVKLAKAYGFCWGVERAVQIAYEARKQFPEERLWITNEIIHNPTVNKRLEDMDVKIIPVEDSKKQFDVVEKDDVVILPAFGAGVDEMYVLNDKKVQIVDTTCPWVTKVWNTVEKHKKGEYTSVIHGKYNHEETIATASFAGKYIIVKNMKEANYVCDYILGGQYDGSSSTKEEFMEKFKYAISKGFDPDNDLVKVGIANQTTMLKGETEEIGRLLETTMMRKYGVENVSGHFISFNTICDATQERQDAIYELVEEKIDLMLVVGGWNSSNTSHLQEISEARGIPSYWIDSEKRIGPGNKIAYKLHYGELVEKENFLPKGPITIGVTSGASTPDKVVEDALVKVFDIKREELLQLA

SEQ ID NO: 21128 - DNA, 837 bp, Arabidopsis thaliana
  misc_feature (1)..(837): Ceres Seq. ID no. 12343564
  misc_feature (1)..(837): Ortholog of  Ceres SEQ ID NO 12557850 as cited in SEQ ID NO 65
  misc_feature (1)..(837): Ortholog of  Ceres SEQ ID NO 14312702 as cited in SEQ ID NO 0
agggtttttttcagcggagattagcttcagtatccattggcggattagcctcagagtgctctgatcaaggttttggaggttgcatttgagtgaggagatgttttcggctcagcataagattcataaggagaagggtgtggaactttctgaattggatgagcaagttgctcaggctttctttgatttggagaacaccaatcaagaattgaaaagtgagctgaaggatttatacgtcaactcggctgttcaagttgatatctctggaggacgcaaggcaattgttgtcaatgttccttacagactgagaaaagcttaccggaaaatccatgttaggcttgttcgtgaacttgagaagaagttcagtggaaaggatgtgatcctcattgctacaaggaggattgtgaggccgccaaagaagggttcagcggcaaagagaccacgcaaccgtactctgacctcagtccatgaagctattcttgatgatgtggtcttacctgcagagattgttgggaagcgcacaaggtacagactcgacggtaccaaaatcatgaaggtcttcttggacccaaaggaaaggaacaacacagagtacaaggttgaggctttctctgcggtttacaagaagctcactggcaaagatgtcgtctttgagtttcccatcactgaagcctaagagatgaaatgagacgtagagaatctgttatgatctcagatattttaatcttctttttcgtctactttctttaatgtggcaagacattggttttacttctgaaaatctgtacaatggtcgagttttctcaaaagttttgagaaactttttgatgttggtgtttc

SEQ ID NO: 21129 - protein, 191 aa, Arabidopsis thaliana
  peptide (1)..(191): Ceres Seq. ID no. 12343565
MFSAQHKIHKEKGVELSELDEQVAQAFFDLENTNQELKSELKDLYVNSAVQVDISGGRKAIVVNVPYRLRKAYRKIHVRLVRELEKKFSGKDVILIATRRIVRPPKKGSAAKRPRNRTLTSVHEAILDDVVLPAEIVGKRTRYRLDGTKIMKVFLDPKERNNTEYKVEAFSAVYKKLTGKDVVFEFPITEA

SEQ ID NO: 21130 - DNA, 2726 bp, Arabidopsis thaliana
  misc_feature (1)..(2726): Ceres Seq. ID no. 13580618
  misc_feature (1)..(2726): Ortholog of  Ceres SEQ ID NO 13595870 as cited in SEQ ID NO 62101
  misc_feature (1)..(2726): Ortholog of  Ceres SEQ ID NO 13590241 as cited in SEQ ID NO 63878
  misc_feature (1)..(2726): Ortholog of  Ceres SEQ ID NO 12617475 as cited in SEQ ID NO 64550
  misc_feature (1)..(2726): Ortholog of  Ceres SEQ ID NO 13657939 as cited in SEQ ID NO 66349
aaaggattcaaaaaaccctaaacactccaatgtcttcttctactcttcaagcttctctttttcttcgtcctcctctccatacttcttcgtttaagctttacccttgtctattctcttcttcttcattgagtttttgtccacaatctctctcaagtttctaccgtctttcttcagttcttcacaactctcgatttcgtccccttccttgctcattgcgtcaagacaatgtcgcttccgattctgatttcattcccaaagactccgcttttgaggttacggattcagctgagagtaatagattggtttccgatacggaggtttcggaattagagacgaatgatagatttgtgggtggtgaggagacgaaaagtggaggagaagaagcggaggttagtaatggagtaacggaaggtaaggaggaagatcagaagaagagcaagtttaggattgtggtgttgatgatggcactatgggcggctataaagagagctatagagaaggtaatggagtgggaatggttaagctggtggcctttctctcgccaggagaagcggctcgagaaacttattgctgaggctgatgctaatccaaaggacgcagctttgcagggtgctttattggctgagctcaataagcatattcctgaggctgtagttcaacggtttgaacaaagggaacacacagtggatagtagaggagttgctgaatatattcgggctcttgtcattacaaatgctatctcggagtatcttcctgatgaacaaacggggaagccatctagtcttcccgcactgctgcaagagctgaagcatcgtgcatcaggcaatatggacgaatcatttgtgaaccctggtatatctgagaagcaaccactgcatgttaccatggttaatcctaaagtttcaaacaaatcaagatttgcgcaagagcttgtctctacgatcttgttcactgttgcggtgggattagtgtggattatgggtgcagctgctctgcaaaagtatattggaagtcttggaggaattggaacttcgggtgttggttcaagctcttcatattccccaaaagagctgaacaaagaaataacgccagaaaagaatgtcaaaacatttaaggacgtaaagggttgtgatgatgcaaaacaagagctcgaagaggtagttgaatatctcaaaaatccatcaaagtttacccgccttggaggaaagttgccaaagggaattcttctaaccggggcacctggtactggaaagacattgctggccaaagcaattgctggagaagctggagtacccttcttctatagagctggatctgaatttgaagagatgtttgttggggtaggagctcgccgtgtgagatccttgtttcaggcagccaagaagaaggcaccttgtattattttcattgacgaaattgatgctgttggatccacaagaaaacaatgggaagggcatacaaagaagacattgcatcaactacttgttgaaatggatggttttgagcagaatgagggaataatagttatggctgcaacaaacttgcctgatatacttgatccagctctgacaagaccgggtagatttgatagacatattgtcgtacccagtccggatgtccgtggacgcgaagagattttggaactctacctccaaggcaaacctatgtcagaagatgttgatgttaaagcaattgctcgtggaactcctggattcaatggtgctgatcttgcaaacctggtaaatattgctgccataaaagcagctgttgaaggtgctgagaagttatcttctgaacagttggaattcgcaaaggaccgaattgtcatgggcacagagaggaagacaatgttcgtatcagaggactcaaaaaagctcactgcataccatgagagtggtcatgctattgtcgctttaaatacgaaaggtgcgcacccgatccacaaagcgactataatgccacgtggatctgcattgggaatggttacacagttaccttcaaacgatgaaacatcagtgagcaagaggcagttattagctcgtctcgatgtatgtatgggaggaagagttgcagaggagctcatctttggcttggaccatattaccactggagcgagtagcgatctgtcacaggccactgaacttgcacaatacatggtatcgagttgtgggatgagtgaggcaataggaccagttcatataaaagaaagaccaagctctgatatgcaatcacgcattgatgccgaggttgtgaagcttcttagagaagcatatgagagagtgaaatctctcttgaaacggcatgagaagcagctacacacgttagcaaacgcacttctagagtatgaaacgctaaccgcagaggacataaagcgtattctccttccaaagcaggaaggcgagaaatttgaagagcaacaacaagaagaaggagacttggtattggcctaatcacatcattcattaccataaacacacttctttgggtgaaaaagggagattcaaagctttgtacagagtaaatctcccatagcttctacaacaacaaccaaaagaaaaacatatgaaattattgatctcatgttacaaaattattgtagtttttatttcattagctcattagttttcgcttcgaccttgaaccttttgccctttttgacattctgttcaattctatgaagaaaaatgtaaaacaacattgaaaagaaagtaataattgttgtcttt

SEQ ID NO: 21131 - protein, 815 aa, Arabidopsis thaliana
  peptide (1)..(815): Ceres Seq. ID no. 13580619
RIQKTLNTPMSSSTLQASLFLRPPLHTSSFKLYPCLFSSSSLSFCPQSLSSFYRLSSVLHNSRFRPLPCSLRQDNVASDSDFIPKDSAFEVTDSAESNRLVSDTEVSELETNDRFVGGEETKSGGEEAEVSNGVTEGKEEDQKKSKFRIVVLMMALWAAIKRAIEKVMEWEWLSWWPFSRQEKRLEKLIAEADANPKDAALQGALLAELNKHIPEAVVQRFEQREHTVDSRGVAEYIRALVITNAISEYLPDEQTGKPSSLPALLQELKHRASGNMDESFVNPGISEKQPLHVTMVNPKVSNKSRFAQELVSTILFTVAVGLVWIMGAAALQKYIGSLGGIGTSGVGSSSSYSPKELNKEITPEKNVKTFKDVKGCDDAKQELEEVVEYLKNPSKFTRLGGKLPKGILLTGAPGTGKTLLAKAIAGEAGVPFFYRAGSEFEEMFVGVGARRVRSLFQAAKKKAPCIIFIDEIDAVGSTRKQWEGHTKKTLHQLLVEMDGFEQNEGIIVMAATNLPDILDPALTRPGRFDRHIVVPSPDVRGREEILELYLQGKPMSEDVDVKAIARGTPGFNGADLANLVNIAAIKAAVEGAEKLSSEQLEFAKDRIVMGTERKTMFVSEDSKKLTAYHESGHAIVALNTKGAHPIHKATIMPRGSALGMVTQLPSNDETSVSKRQLLARLDVCMGGRVAEELIFGLDHITTGASSDLSQATELAQYMVSSCGMSEAIGPVHIKERPSSDMQSRIDAEVVKLLREAYERVKSLLKRHEKQLHTLANALLEYETLTAEDIKRILLPKQEGEKFEEQQQEEGDLVLA

SEQ ID NO: 21132 - protein, 806 aa, Arabidopsis thaliana
  peptide (1)..(806): Ceres Seq. ID no. 13580620
MSSSTLQASLFLRPPLHTSSFKLYPCLFSSSSLSFCPQSLSSFYRLSSVLHNSRFRPLPCSLRQDNVASDSDFIPKDSAFEVTDSAESNRLVSDTEVSELETNDRFVGGEETKSGGEEAEVSNGVTEGKEEDQKKSKFRIVVLMMALWAAIKRAIEKVMEWEWLSWWPFSRQEKRLEKLIAEADANPKDAALQGALLAELNKHIPEAVVQRFEQREHTVDSRGVAEYIRALVITNAISEYLPDEQTGKPSSLPALLQELKHRASGNMDESFVNPGISEKQPLHVTMVNPKVSNKSRFAQELVSTILFTVAVGLVWIMGAAALQKYIGSLGGIGTSGVGSSSSYSPKELNKEITPEKNVKTFKDVKGCDDAKQELEEVVEYLKNPSKFTRLGGKLPKGILLTGAPGTGKTLLAKAIAGEAGVPFFYRAGSEFEEMFVGVGARRVRSLFQAAKKKAPCIIFIDEIDAVGSTRKQWEGHTKKTLHQLLVEMDGFEQNEGIIVMAATNLPDILDPALTRPGRFDRHIVVPSPDVRGREEILELYLQGKPMSEDVDVKAIARGTPGFNGADLANLVNIAAIKAAVEGAEKLSSEQLEFAKDRIVMGTERKTMFVSEDSKKLTAYHESGHAIVALNTKGAHPIHKATIMPRGSALGMVTQLPSNDETSVSKRQLLARLDVCMGGRVAEELIFGLDHITTGASSDLSQATELAQYMVSSCGMSEAIGPVHIKERPSSDMQSRIDAEVVKLLREAYERVKSLLKRHEKQLHTLANALLEYETLTAEDIKRILLPKQEGEKFEEQQQEEGDLVLA

SEQ ID NO: 21133 - protein, 663 aa, Arabidopsis thaliana
  peptide (1)..(663): Ceres Seq. ID no. 13580621
MMALWAAIKRAIEKVMEWEWLSWWPFSRQEKRLEKLIAEADANPKDAALQGALLAELNKHIPEAVVQRFEQREHTVDSRGVAEYIRALVITNAISEYLPDEQTGKPSSLPALLQELKHRASGNMDESFVNPGISEKQPLHVTMVNPKVSNKSRFAQELVSTILFTVAVGLVWIMGAAALQKYIGSLGGIGTSGVGSSSSYSPKELNKEITPEKNVKTFKDVKGCDDAKQELEEVVEYLKNPSKFTRLGGKLPKGILLTGAPGTGKTLLAKAIAGEAGVPFFYRAGSEFEEMFVGVGARRVRSLFQAAKKKAPCIIFIDEIDAVGSTRKQWEGHTKKTLHQLLVEMDGFEQNEGIIVMAATNLPDILDPALTRPGRFDRHIVVPSPDVRGREEILELYLQGKPMSEDVDVKAIARGTPGFNGADLANLVNIAAIKAAVEGAEKLSSEQLEFAKDRIVMGTERKTMFVSEDSKKLTAYHESGHAIVALNTKGAHPIHKATIMPRGSALGMVTQLPSNDETSVSKRQLLARLDVCMGGRVAEELIFGLDHITTGASSDLSQATELAQYMVSSCGMSEAIGPVHIKERPSSDMQSRIDAEVVKLLREAYERVKSLLKRHEKQLHTLANALLEYETLTAEDIKRILLPKQEGEKFEEQQQEEGDLVLA

SEQ ID NO: 21134 - DNA, 825 bp, Arabidopsis thaliana
  misc_feature (1)..(825): Ceres Seq. ID no. 13499457
  misc_feature (1)..(825): Ortholog of  Ceres SEQ ID NO 13595187 as cited in SEQ ID NO 56052
  misc_feature (1)..(825): Ortholog of  Ceres SEQ ID NO 14313718 as cited in SEQ ID NO 59559
  misc_feature (1)..(825): Ortholog of  Ceres SEQ ID NO 15169505 as cited in SEQ ID NO 61011
  misc_feature (1)..(825): Ortholog of  Ceres SEQ ID NO 13662053 as cited in SEQ ID NO 61547
  misc_feature (1)..(825): Ortholog of  Ceres SEQ ID NO 13624283 as cited in SEQ ID NO 0
aactactaaacactaaattatcaatccgctctcttctcaaaaaaaaaaaatcgactctaaaatcaaactctctcaaagctccccaaaaaaaccctagttctgaatggaatcggcggattccggacgatccgatccggtaaaaggagacgacccgggtccatctttcgtctcttcaccaccagctacacctagcaggtatgagtcacagaagcgacgcgactggaacacgttcttgcagtacctcaagaaccacaagccgcctctcgcgttgtcacggtgtagcggagcgcatgtgatcgagtttctcaagtacctcgaccagttcggtaagaccaaagtccacgtggcggcttgtccttacttcggccatcagcaacctccgtctccttgctcatgccctctcaagcaagcttggggatctctcgatgctttgatcggacggttgagagctgcctacgaggagaacggtggacggccggattctaacccgttcgccgcacgtgcggttcggatttacttgagggaagtcagagagagtcaggcaaaggctcgtgggattccttacgagaaaaagaaacggaaacggccgccaactgtcaccaccgttagagttgacgtcgcttcttcgagacaaagtgacggagacccttgtaacgtcggtgctccatctgttgccgaggccgtaccgccttagatcgaattatatataatattatagttttcttgattaatgatatatatatacttatctctatgtatgtatggaactcacttcatcttttgttccttagtacctaattattaaattttgttccttttgagtcg

SEQ ID NO: 21135 - protein, 196 aa, Arabidopsis thaliana
  peptide (1)..(196): Ceres Seq. ID no. 13499458
MESADSGRSDPVKGDDPGPSFVSSPPATPSRYESQKRRDWNTFLQYLKNHKPPLALSRCSGAHVIEFLKYLDQFGKTKVHVAACPYFGHQQPPSPCSCPLKQAWGSLDALIGRLRAAYEENGGRPDSNPFAARAVRIYLREVRESQAKARGIPYEKKKRKRPPTVTTVRVDVASSRQSDGDPCNVGAPSVAEAVPP

SEQ ID NO: 21136 - DNA, 1821 bp, Arabidopsis thaliana
  misc_feature (1)..(1821): Ceres Seq. ID no. 13488703
  misc_feature (1)..(1821): Ortholog of  Ceres SEQ ID NO 15175923 as cited in SEQ ID NO 54037
  misc_feature (1)..(1821): Ortholog of  Ceres SEQ ID NO 13503610 as cited in SEQ ID NO 62416
  misc_feature (1)..(1821): Ortholog of  Ceres SEQ ID NO 13657610 as cited in SEQ ID NO 66165
  misc_feature (1)..(1821): Ortholog of  Ceres SEQ ID NO 13598312 as cited in SEQ ID NO 68448
  misc_feature (1)..(1821): Ortholog of  Ceres SEQ ID NO 13596100 as cited in SEQ ID NO 68573
gtttcttctcggtttctccgtaagcattcagagttctgcaagtaagagaagaaggaagctatggatgtagagcaaaagaaaccgttaatcgaatcatcagatcgtaatctacctgatttcaaaaaatcagtgaagcttaaatatgtgaagcttggttaccattaccttatcactcatggaatgtaccttttcctctccccattagtacttgtaatcgctgcacagatttcaactttctctgtcaccgatcttcgtagcctctgggagcatcttcagtacaatcttatctcagtggttgtttgttctatgctgcttgttttcttaatgactatttacttcatgactcgaccacgtcctgtctacttggtgaacttctcgtgctttaaacccgatgagtcacgaaaatgcactaaaaagatctttatggatcgttctaaactcactggctctttcacagaggagaatcttgagttccagcgtaagattctacaacgttcggggctcggggaatcgacttacttacccgaggctgtacttaatgttccgcctaacccgtgtatgaaagaagctcgaaaagaggccgagactgttatgtttggagctattgatgagcttcttgcgaagacgaatgtgaacccgaaggatattgggatcttgattgttaactgtagtttgtttaacccgacaccttcgttatctgctatggttgttaatcactataagctccgcgggaatatacttagttacaacttgggaggaatgggttgcagtgctggtttgatttctattgatcttgctaaacatcttcttcactctattcccaacacttatgcaatggtgattagtatggagaacattacgttgaactggtatttcgggaatgaccggtcgaagcttgtttctaattgtctgtttagaatgggaggtgcagcgattcttctttcgaacaaaagatgggacagaagaagatcgaaatatgagcttgttgatacggttaggactcacaagggagctgatgataagtgttttggttgcataactcaagaagaggattccgcaagtaagattggtgttaccttgtcgaaagaacttatggctgttgcgggtgatgctctaaagacaaatattacgacgttaggaccactggttttaccgacatctgaacagcttctgttctttgcaacgttagtgggaagaaaactcttcaagatgaagatcaagccttacatcccagacttcaaactagcgtttgagcatttctgcatccacgcaggagggagagctgttcttgatgaattggagaagaacttgaaactcacagagtggcatatggagccctcgaggatgacactctaccgttttggtaacacgtccagttcttctttgtggtatgaattagcatatagtgaggccaaaggaaggatcaagaaaggtgatagaatttggcagatagcttttggttcggggttcaagtgcaacagctcggtttggagagcggtaaggtcggtaaaccctaagaaagagaagaacccatggatggatgaaattcatgagttcccagttgaagtccccaaggtctccacaatctagaaaccacttagtggcaaattttcagaagaggtttttgagttttcagcttttgatattttgtgtcttcccagtgaatttacctttttcttgatttgataatcagatacaccaaactggttaacaatatttttcttcttttttgcggaaaaacttgttgtagtcagtagcagaccgtcaatggtcggtccagcttgtgtttttggttgttgtgtctgcatatatatttccttt

SEQ ID NO: 21137 - protein, 509 aa, Arabidopsis thaliana
  peptide (1)..(509): Ceres Seq. ID no. 13488704
MDVEQKKPLIESSDRNLPDFKKSVKLKYVKLGYHYLITHGMYLFLSPLVLVIAAQISTFSVTDLRSLWEHLQYNLISVVVCSMLLVFLMTIYFMTRPRPVYLVNFSCFKPDESRKCTKKIFMDRSKLTGSFTEENLEFQRKILQRSGLGESTYLPEAVLNVPPNPCMKEARKEAETVMFGAIDELLAKTNVNPKDIGILIVNCSLFNPTPSLSAMVVNHYKLRGNILSYNLGGMGCSAGLISIDLAKHLLHSIPNTYAMVISMENITLNWYFGNDRSKLVSNCLFRMGGAAILLSNKRWDRRRSKYELVDTVRTHKGADDKCFGCITQEEDSASKIGVTLSKELMAVAGDALKTNITTLGPLVLPTSEQLLFFATLVGRKLFKMKIKPYIPDFKLAFEHFCIHAGGRAVLDELEKNLKLTEWHMEPSRMTLYRFGNTSSSSLWYELAYSEAKGRIKKGDRIWQIAFGSGFKCNSSVWRAVRSVNPKKEKNPWMDEIHEFPVEVPKVSTI

SEQ ID NO: 21138 - protein, 469 aa, Arabidopsis thaliana
  peptide (1)..(469): Ceres Seq. ID no. 13488705
MYLFLSPLVLVIAAQISTFSVTDLRSLWEHLQYNLISVVVCSMLLVFLMTIYFMTRPRPVYLVNFSCFKPDESRKCTKKIFMDRSKLTGSFTEENLEFQRKILQRSGLGESTYLPEAVLNVPPNPCMKEARKEAETVMFGAIDELLAKTNVNPKDIGILIVNCSLFNPTPSLSAMVVNHYKLRGNILSYNLGGMGCSAGLISIDLAKHLLHSIPNTYAMVISMENITLNWYFGNDRSKLVSNCLFRMGGAAILLSNKRWDRRRSKYELVDTVRTHKGADDKCFGCITQEEDSASKIGVTLSKELMAVAGDALKTNITTLGPLVLPTSEQLLFFATLVGRKLFKMKIKPYIPDFKLAFEHFCIHAGGRAVLDELEKNLKLTEWHMEPSRMTLYRFGNTSSSSLWYELAYSEAKGRIKKGDRIWQIAFGSGFKCNSSVWRAVRSVNPKKEKNPWMDEIHEFPVEVPKVSTI

SEQ ID NO: 21139 - protein, 427 aa, Arabidopsis thaliana
  peptide (1)..(427): Ceres Seq. ID no. 13488706
MLLVFLMTIYFMTRPRPVYLVNFSCFKPDESRKCTKKIFMDRSKLTGSFTEENLEFQRKILQRSGLGESTYLPEAVLNVPPNPCMKEARKEAETVMFGAIDELLAKTNVNPKDIGILIVNCSLFNPTPSLSAMVVNHYKLRGNILSYNLGGMGCSAGLISIDLAKHLLHSIPNTYAMVISMENITLNWYFGNDRSKLVSNCLFRMGGAAILLSNKRWDRRRSKYELVDTVRTHKGADDKCFGCITQEEDSASKIGVTLSKELMAVAGDALKTNITTLGPLVLPTSEQLLFFATLVGRKLFKMKIKPYIPDFKLAFEHFCIHAGGRAVLDELEKNLKLTEWHMEPSRMTLYRFGNTSSSSLWYELAYSEAKGRIKKGDRIWQIAFGSGFKCNSSVWRAVRSVNPKKEKNPWMDEIHEFPVEVPKVSTI

SEQ ID NO: 21140 - DNA, 1920 bp, Arabidopsis thaliana
  misc_feature (1)..(1920): Ceres Seq. ID no. 12649907
  misc_feature (1)..(1920): Ortholog of  Ceres SEQ ID NO 13596244 as cited in SEQ ID NO 69307
atcatcactgactgtgattgaatttttttttttttttacaatctgagatctgaaagatatttctaaattctcattaaattcccccataaattttcaatctttgctgattttcccccaaatttctggagatagataaccttcgtttttcaggagtttctttctatatttcttcatcgatttcgttcagtctttgagagaggttcgtcgacgtattatcgtcggaaaaaagctatgagaatctatttctcatagctccagtaatgtgaaatcgagacaacgctttatcttcagaatctgctaatccatgggagattcaatcacattccggtagatttttttccagtttctggggaagtcaaaaatttctagggtttccgatttttgttttccttttccaaatgttctcgaatcagtttgttctcttcttctctcttctcctatgtctcccatttgttttcttctttgtagcgccacatgtgtttccttctcctcctggtgaatctttaatcccaatctccgatgagattgatgaccggagtttattcatcgccgctgctggatcaacctctctttctcatctctcatctggaaaccctaaccctaagctcaagattgcttttctattcctcaccaactccgatctccatttcgcgccaatctgggatcgattcttctctggtcattcgaaatctctctacaacgtctatgtccacgcagatccttttgtcaatgtcacaagacctgggaatggctctgtgtttgagaatgccttcattgcaaacgcgaaacgcaccgcaagagcttctccgactcttatctccgccacgcggcgcctcctcgctaccgctttccttgatgaccctgcgaacacttacttcgctgtgctctctcagtattgtattcctctccactcgttcaactatgtttatagctctctctttgaatcttcaatttttgataaatctgatccggatccgaatccgaatccgagaggtattagaatcttgtatcggagttttatggaactgatatctgatgagcctaggctttggaaacggtacactgctagaggaaggtatgctatgatgcctgaggttccgtttgagaaattcagagttggttcgcagttctttgttatgactagaagacatgctttgttaacaatcaaagatcggatcttgtggcgtaaattcaagctcccgtgttatcgttctgatgagtgttacccggaggagcattatttcccgacgctgttgaacatgaaggatccggatggttgcactgggtatacgttgacgcgagttaactggactgggactgtgaaaggacatccttatacttacaaaccaaaggaagttgtgccagagttgatccagagactccggcgatcgaatcactctagctcctactttttcgcccgcaaatttactccggattgcttgaagccgcttttggccattgcagattctgtgattttcagagattaagttatgcagggtgagaaaacaaaagttttggtgaccggagaggttttatgtatgggttgaagaacaaatgccactttcagaattaagaagaggcaaagcgaaacgatgttaggaggctttgaggcttgaaataaataaaccagctttagtggtactcggagctcaggcttgttagctgttgtgacatatatatcacacgacacgagaacacagatcaagagacagagaaaccgaacttgtaatttttttttttgtttttctttttgttcttctttttgttctttggagctggtgctgttacatagcagagctctttttacctcaaaggcttggggtctgtagcattataattgtgtcaaggaaatctatgaagagaatatgttatctcttgtggtgaacaccacattgaatatataaaagatcaaagtttact

SEQ ID NO: 21141 - protein, 362 aa, Arabidopsis thaliana
  peptide (1)..(362): Ceres Seq. ID no. 12649908
MFSNQFVLFFSLLLCLPFVFFFVAPHVFPSPPGESLIPISDEIDDRSLFIAAAGSTSLSHLSSGNPNPKLKIAFLFLTNSDLHFAPIWDRFFSGHSKSLYNVYVHADPFVNVTRPGNGSVFENAFIANAKRTARASPTLISATRRLLATAFLDDPANTYFAVLSQYCIPLHSFNYVYSSLFESSIFDKSDPDPNPNPRGIRILYRSFMELISDEPRLWKRYTARGRYAMMPEVPFEKFRVGSQFFVMTRRHALLTIKDRILWRKFKLPCYRSDECYPEEHYFPTLLNMKDPDGCTGYTLTRVNWTGTVKGHPYTYKPKEVVPELIQRLRRSNHSSSYFFARKFTPDCLKPLLAIADSVIFRD

SEQ ID NO: 21142 - DNA, 714 bp, Arabidopsis thaliana
  misc_feature (1)..(714): Ceres Seq. ID no. 12421052
  misc_feature (1)..(714): Ortholog of  Ceres SEQ ID NO 13582830 as cited in SEQ ID NO 68255
aaccttttgaagaaagagtttgagcgcatcgcaaactcgaaggcgcgactgtgagagagaagaatggcgtcgtcatcatcgagaggagagatggagaagatgggaatcgatcagctaaaagctttgaaggagcaagcagatctggaagtgaatcttcttcaagatagtctcaacaacatccgtacagctaccgttcgtctcgatgccgccgccgcagctctcaacgatctctctcttcgacctcaaggtaagaagatgcttgtaccactgactgcttctctatacgtgcctgggacacttgatgaagctgataaggttttagttgatattggcactggttacttcattgagaaaacaatggatgatggaaaagattattgtcagaggaagatcaacttgctcaaatccaactttgatcaactttttgaggtcgcagcgaaaaagaaaagcgtggcagatgaagctggaatggtcttgcaggccaaagttaaacagttaacagctgcaaccacgtcgtgaaaattattccttctctagtgctttttgctattgagactattttgagattgcaaatgattttgtctgatcagttatgttttgactcttttgatctcaatcggcttgtgtttagtgtgctagaagaatttgtgctgtaattttaagtaatcagtagtgactatgagaaagaaaagacgtgttaactagttatttctc

SEQ ID NO: 21143 - protein, 151 aa, Arabidopsis thaliana
  peptide (1)..(151): Ceres Seq. ID no. 12421053
MASSSSRGEMEKMGIDQLKALKEQADLEVNLLQDSLNNIRTATVRLDAAAAALNDLSLRPQGKKMLVPLTASLYVPGTLDEADKVLVDIGTGYFIEKTMDDGKDYCQRKINLLKSNFDQLFEVAAKKKSVADEAGMVLQAKVKQLTAATTS

SEQ ID NO: 21144 - protein, 142 aa, Arabidopsis thaliana
  peptide (1)..(142): Ceres Seq. ID no. 12421054
MEKMGIDQLKALKEQADLEVNLLQDSLNNIRTATVRLDAAAAALNDLSLRPQGKKMLVPLTASLYVPGTLDEADKVLVDIGTGYFIEKTMDDGKDYCQRKINLLKSNFDQLFEVAAKKKSVADEAGMVLQAKVKQLTAATTS

SEQ ID NO: 21145 - protein, 139 aa, Arabidopsis thaliana
  peptide (1)..(139): Ceres Seq. ID no. 12421055
MGIDQLKALKEQADLEVNLLQDSLNNIRTATVRLDAAAAALNDLSLRPQGKKMLVPLTASLYVPGTLDEADKVLVDIGTGYFIEKTMDDGKDYCQRKINLLKSNFDQLFEVAAKKKSVADEAGMVLQAKVKQLTAATTS

SEQ ID NO: 21146 - DNA, 642 bp, Arabidopsis thaliana
  misc_feature (1)..(642): Ceres Seq. ID no. 12393423
  misc_feature (1)..(642): Ortholog of  Ceres SEQ ID NO 15174289 as cited in SEQ ID NO 1129
  misc_feature (1)..(642): Ortholog of  Ceres SEQ ID NO 12484054 as cited in SEQ ID NO 14991
  misc_feature (1)..(642): Ortholog of  Ceres SEQ ID NO 13591179 as cited in SEQ ID NO 64412
atcgaaaagtctacgaatttagggtttaatttgtgttaatgagccaccgtgtttcgattctatcatctcatttctcacctgcctccgccgtcatggcttccgagaaagaagctgctctcgccgccactccttccgattctcccaccatatttgacaagatcatcagcaaagagattccatccaccgtggtttttgaggatgacaaggtcttagcttttagggacataacgccccagggtcctgttcacatcctccttattccaaaagtgagggatggcctaactggcctctctaaggctgaggaaaggcacatcgacatcttgggccgccttctctacactgccaagcttgtagcaaaacaagaaggcctagcagagggtttcagaattgttatcaatgatggtcctcaaggctgtcaatcggtgtatcacattcatgttcatctcattggaggacgccaaatgaactggcctcctggttaaagatcatcttgaagtggattgttgtcctgatgataagagggacgcttagagtttgctctcgtctactaatgtctctataaataaaaaaacgtgggacatgacttttatgattgttatgcaaaaccttattttatgttatgaaaaggatatttcactgttt

SEQ ID NO: 21147 - protein, 147 aa, Arabidopsis thaliana
  peptide (1)..(147): Ceres Seq. ID no. 12393424
MSHRVSILSSHFSPASAVMASEKEAALAATPSDSPTIFDKIISKEIPSTVVFEDDKVLAFRDITPQGPVHILLIPKVRDGLTGLSKAEERHIDILGRLLYTAKLVAKQEGLAEGFRIVINDGPQGCQSVYHIHVHLIGGRQMNWPPG

SEQ ID NO: 21148 - protein, 129 aa, Arabidopsis thaliana
  peptide (1)..(129): Ceres Seq. ID no. 12393425
MASEKEAALAATPSDSPTIFDKIISKEIPSTVVFEDDKVLAFRDITPQGPVHILLIPKVRDGLTGLSKAEERHIDILGRLLYTAKLVAKQEGLAEGFRIVINDGPQGCQSVYHIHVHLIGGRQMNWPPG

SEQ ID NO: 21149 - DNA, 818 bp, Arabidopsis thaliana
  misc_feature (1)..(818): Ceres Seq. ID no. 13496769
  misc_feature (1)..(818): Ortholog of  Ceres SEQ ID NO 15170444 as cited in SEQ ID NO 52873
attcttcactcaacactcactttttctctaattccttaattctctcaactaattacaaattatgactcgcaatattctcttgacggttacattgatctgcattgttttcatcaccgtcggtggccaatctccggccaccgcaccgatccattctccttctacatctcctcataagcctaaacccacatctcccgccatttctccagctgctccaacgccggaatccacggaggctccggcgaagactccggtagaagcacctgtagaggctcctccttctcctacacctgcttctacacctcagatctctccgcccgctccttcaccggaggctgatactccttcagctccggagattgcaccttcagctgatgttccggctccagctctgacaaaacataagaagaagacaaagaagcataagaccgctccggctcctggaccagcttcggagcttttaagcccgcctgctccgcccggagaagctcctggtcctggaccaagcgatgctttctctcctgccgctgacgatcagagcggagcacaaagaataagtgttgtgatacaaatggtgggagctgcggcaatcgcatggtctctacttgttctagccttctaataaatttttgttcttcttttttttttttttttttttcaattcttaattttatttattttatatcttttttgatcctctcccatttgtctcatgtattacagctcacattttgtattcagcattttgatatattatttgtcttttatgtatacaaataataattttaatacatgctattttctgcaaaattactgttcgc

SEQ ID NO: 21150 - protein, 185 aa, Arabidopsis thaliana
  peptide (1)..(185): Ceres Seq. ID no. 13496770
MTRNILLTVTLICIVFITVGGQSPATAPIHSPSTSPHKPKPTSPAISPAAPTPESTEAPAKTPVEAPVEAPPSPTPASTPQISPPAPSPEADTPSAPEIAPSADVPAPALTKHKKKTKKHKTAPAPGPASELLSPPAPPGEAPGPGPSDAFSPAADDQSGAQRISVVIQMVGAAAIAWSLLVLAF

SEQ ID NO: 21151 - DNA, 1107 bp, Arabidopsis thaliana
  misc_feature (1)..(1107): Ceres Seq. ID no. 12393358
  misc_feature (1)..(1107): Ortholog of  Ceres SEQ ID NO 13594363 as cited in SEQ ID NO 60250
  misc_feature (1)..(1107): Ortholog of  Ceres SEQ ID NO 15225478 as cited in SEQ ID NO 63805
  misc_feature (1)..(1107): Ortholog of  Ceres SEQ ID NO 13596420 as cited in SEQ ID NO 68738
  misc_feature (1)..(1107): Ortholog of  Ceres SEQ ID NO 14309260 as cited in SEQ ID NO 0
aacaacacgatttctcacacatttcaagttttcattatcatccagaaatcttcttcttcctccgatcaccaccatgtgtacgttagagaaacgcggcgatctcttcctcctaaccctaaccggagacggcgaacacagattccaccccgacacaattgccaccattctctcccttctcgaacaagccaaatctcaatccacccgtggatccatcctcatcaccaccgccaacggcaaattcttctccaacggattcgatcttgcatgggctcaaaccgccggatccaaaaccggagccgcaaaccggcttcaccaaatggttgaatcattcaaaccggtggtagcagcgcttctcgatctccctatgccgacgatcgccgccttgaacggccacgccgccgccgcgggattgattttggctttgagccatgattacgtgttcatgaggaaagatcgtggggttctgtatatgagtgaagttgacatcgggctttcgatgccggattatttctcggcgttggttagggctaagatcgggacgagtgcggcgaggagagagctgttgttgagtgggaagaagattagaggagaagaagcggtgggtttggggattgttgactcggccgcgtatgatagtgaggaaggtgttgttgtggctagtgtgcgccttggtgagaaattggcggcgaagaaatggagcggtgaggtttatgcgtcgataaggaagagtttgtatccggagctttgtgggattcttggtttagagactagagtgtttgcaacacctaagctctaagaaagcgtctttcagagagtgaatctttggtttatttgaaaaacacatgttttgggagaaagagacaatgttaaactctagaactgtgatcacagaaataataaacatgttcaatgttggcttgttcagtgttgttgttgggcttgttcttaggcttggttgtttaaaatatggaaccggtttaatcggttttagagctaattagatgaactagagataaccgggttgtagtagttatcggagaaggagaaacggtgttgtgaatttgtgattgctgaaattacgccatgttaaaccggtattaaaacacg

SEQ ID NO: 21152 - protein, 264 aa, Arabidopsis thaliana
  peptide (1)..(264): Ceres Seq. ID no. 12393359
TTRFLTHFKFSLSSRNLLLPPITTMCTLEKRGDLFLLTLTGDGEHRFHPDTIATILSLLEQAKSQSTRGSILITTANGKFFSNGFDLAWAQTAGSKTGAANRLHQMVESFKPVVAALLDLPMPTIAALNGHAAAAGLILALSHDYVFMRKDRGVLYMSEVDIGLSMPDYFSALVRAKIGTSAARRELLLSGKKIRGEEAVGLGIVDSAAYDSEEGVVVASVRLGEKLAAKKWSGEVYASIRKSLYPELCGILGLETRVFATPKL

SEQ ID NO: 21153 - protein, 240 aa, Arabidopsis thaliana
  peptide (1)..(240): Ceres Seq. ID no. 12393360
MCTLEKRGDLFLLTLTGDGEHRFHPDTIATILSLLEQAKSQSTRGSILITTANGKFFSNGFDLAWAQTAGSKTGAANRLHQMVESFKPVVAALLDLPMPTIAALNGHAAAAGLILALSHDYVFMRKDRGVLYMSEVDIGLSMPDYFSALVRAKIGTSAARRELLLSGKKIRGEEAVGLGIVDSAAYDSEEGVVVASVRLGEKLAAKKWSGEVYASIRKSLYPELCGILGLETRVFATPKL

SEQ ID NO: 21154 - protein, 159 aa, Arabidopsis thaliana
  peptide (1)..(159): Ceres Seq. ID no. 12393361
MVESFKPVVAALLDLPMPTIAALNGHAAAAGLILALSHDYVFMRKDRGVLYMSEVDIGLSMPDYFSALVRAKIGTSAARRELLLSGKKIRGEEAVGLGIVDSAAYDSEEGVVVASVRLGEKLAAKKWSGEVYASIRKSLYPELCGILGLETRVFATPKL

SEQ ID NO: 21155 - DNA, 822 bp, Arabidopsis thaliana
  misc_feature (1)..(822): Ceres Seq. ID no. 13497029
  misc_feature (1)..(822): Ortholog of  Ceres SEQ ID NO 13595350 as cited in SEQ ID NO 55922
  misc_feature (1)..(822): Ortholog of  Ceres SEQ ID NO 15174423 as cited in SEQ ID NO 0
aaaacatatttcattgagctcctccactgaatcgctctcatccttcgcttcttcgaattccaaaggtagaacagtagaagaaatcatggatccagctgaaatgagatatttggaagaagaggatggtccgttgatgaagacaatcaaaggtagtatcactggttttggtgctgggactatttacggaaccattttagccacatggaaagatgttccaagagtggagagaaatgtggctcttccaggacttattagaacactgaagatgatgggaacccatgggctgacttttgctgctataggaggtgtttacatcggtgttgaacagctggttcagaattttagatccaagagagatttttacaatggtgctattggtggttttgtcgctggagcttctgtgcttggctatagagcaaggagcatcccgacagcgatagctgcaggtgcaacactagctgttacctctgctttgattgattctggaggtcagaccacaagagtagacaatggcagagaatactatccttacaccgtcgagaaaagagctgaagctgattcctgatttctcttttggtcactgagattaataagatgtgcattcgctgatccggggatcttgagataatctcttttgtttattttatctggatatgtgatatcatgatactctttgctcttgtttcttcttgttttcttgagagcgactttctcacatcttttgtctgaatgtttcctgcaataaaaattcaactttgtctgcagatgtaaacaaatgttttagctttcagtaatcattttaatcagacatttgcttgcttc

SEQ ID NO: 21156 - protein, 187 aa, Arabidopsis thaliana
  peptide (1)..(187): Ceres Seq. ID no. 13497030
KHISLSSSTESLSSFASSNSKGRTVEEIMDPAEMRYLEEEDGPLMKTIKGSITGFGAGTIYGTILATWKDVPRVERNVALPGLIRTLKMMGTHGLTFAAIGGVYIGVEQLVQNFRSKRDFYNGAIGGFVAGASVLGYRARSIPTAIAAGATLAVTSALIDSGGQTTRVDNGREYYPYTVEKRAEADS

SEQ ID NO: 21157 - protein, 159 aa, Arabidopsis thaliana
  peptide (1)..(159): Ceres Seq. ID no. 13497031
MDPAEMRYLEEEDGPLMKTIKGSITGFGAGTIYGTILATWKDVPRVERNVALPGLIRTLKMMGTHGLTFAAIGGVYIGVEQLVQNFRSKRDFYNGAIGGFVAGASVLGYRARSIPTAIAAGATLAVTSALIDSGGQTTRVDNGREYYPYTVEKRAEADS

SEQ ID NO: 21158 - protein, 154 aa, Arabidopsis thaliana
  peptide (1)..(154): Ceres Seq. ID no. 13497032
MRYLEEEDGPLMKTIKGSITGFGAGTIYGTILATWKDVPRVERNVALPGLIRTLKMMGTHGLTFAAIGGVYIGVEQLVQNFRSKRDFYNGAIGGFVAGASVLGYRARSIPTAIAAGATLAVTSALIDSGGQTTRVDNGREYYPYTVEKRAEADS

SEQ ID NO: 21159 - DNA, 1726 bp, Arabidopsis thaliana
  misc_feature (1)..(1726): Ceres Seq. ID no. 13490107
  misc_feature (1)..(1726): Ortholog of  Ceres SEQ ID NO 13600220 as cited in SEQ ID NO 0
aaaaatggcactcaaagcgattctctttttgggtttatttctcgtcgtgatagtttctccgatcaccgtctacggtggagctgtgtgtccggcgagttccacgtttggtcgtggaagctttcctgatggtttcttgttcggtgctacaacttctgctttccagcatgaaggtgcagcagaagaaggaggccgaggttccagcatttgggactcattcactcttaaacaacattcagaaagcaacaacaatcttgacggcaggctcggagttgatttctatcatcattacaaggaagatgttcaactattgaaaaaactgaatatggatgcctttaggttctctatatcttggtcaagaatatttccccatgggaaaaaagacaagggagtgagtgaaacaggagttaaattctacaatgatcttatcaacgagctcattgcaaatggtgtaacgcctcttgtcacattgtttcaatgggatgtacctcaggctcttgaagatgaatacggcggtttcttgagtgaccgtattttggaggatttccgtgattttgcacagtttgctttcaataaatatggtgatagagtgaagcattgggttactataaacgaaccttatgaatttagtcgtggtggatacgagactggagagaaagcaccaggaagatgttctaaatatgtcaatgagaaatgtgttgcaggcaagagtggccatgaagtttacactgttagtcacaatctgctgttggctcatgccgaagctgtggaagaattcaggaaatgtggaaagtgcacaggtggaaagatcggaattgttcaaagtccaatgtggtttgagccttatgataagaaatccacctcgagtccttcagaggagatagtgaagagagctatggatttcactctaggctggcatatggagccaataacacatggagattaccctcaggccatgaaagatgttgttggtagtcgattaccatcttttacgcccgagcagaaggagaaactgaagggttcttatgattttgtcggtatcaattacttcacttctacatttgttgctcatacggacaatgttaatccagagaaaccgagttgggaagctgattctcgcttgcagttacattcgaataacgttgatgggttcaagattggttctcagcctgctactgcgaagtatcctgtttgcgctgacgggttaagaaaagttttgaaatacatcaaagagaactacaatgacccagaaatcatagtcactggaaacgggtacaaggagacacttgaagagaaagatgtacttccagatgccctcagcgatagtaacaggaagtattatcatatgagacatctcatggcattacatggagcagtctgcgaggacaaggttaatgttaaaggttactttgtgtcgtcgcttatggatggactagagtgggaagatggatacaagacgaggtctggactgtactatgtagactatggacacaatatgggacggcatgagaaacaatctgccaagtggctctccaagctccttgagaaagtcccggacacgattcagtcgaaggtagattcggattcaaggaaagagttataaatgatcagagatccttttcgcaactctgtttaatcgatcatatgatgttatgtgtgtttttatcttaaaagagtgtaatccacgatctatgtagtttatataataaataaagaagtaacttatatc

SEQ ID NO: 21160 - protein, 532 aa, Arabidopsis thaliana
  peptide (1)..(532): Ceres Seq. ID no. 13490108
KMALKAILFLGLFLVVIVSPITVYGGAVCPASSTFGRGSFPDGFLFGATTSAFQHEGAAEEGGRGSSIWDSFTLKQHSESNNNLDGRLGVDFYHHYKEDVQLLKKLNMDAFRFSISWSRIFPHGKKDKGVSETGVKFYNDLINELIANGVTPLVTLFQWDVPQALEDEYGGFLSDRILEDFRDFAQFAFNKYGDRVKHWVTINEPYEFSRGGYETGEKAPGRCSKYVNEKCVAGKSGHEVYTVSHNLLLAHAEAVEEFRKCGKCTGGKIGIVQSPMWFEPYDKKSTSSPSEEIVKRAMDFTLGWHMEPITHGDYPQAMKDVVGSRLPSFTPEQKEKLKGSYDFVGINYFTSTFVAHTDNVNPEKPSWEADSRLQLHSNNVDGFKIGSQPATAKYPVCADGLRKVLKYIKENYNDPEIIVTGNGYKETLEEKDVLPDALSDSNRKYYHMRHLMALHGAVCEDKVNVKGYFVSSLMDGLEWEDGYKTRSGLYYVDYGHNMGRHEKQSAKWLSKLLEKVPDTIQSKVDSDSRKEL

SEQ ID NO: 21161 - protein, 531 aa, Arabidopsis thaliana
  peptide (1)..(531): Ceres Seq. ID no. 13490109
MALKAILFLGLFLVVIVSPITVYGGAVCPASSTFGRGSFPDGFLFGATTSAFQHEGAAEEGGRGSSIWDSFTLKQHSESNNNLDGRLGVDFYHHYKEDVQLLKKLNMDAFRFSISWSRIFPHGKKDKGVSETGVKFYNDLINELIANGVTPLVTLFQWDVPQALEDEYGGFLSDRILEDFRDFAQFAFNKYGDRVKHWVTINEPYEFSRGGYETGEKAPGRCSKYVNEKCVAGKSGHEVYTVSHNLLLAHAEAVEEFRKCGKCTGGKIGIVQSPMWFEPYDKKSTSSPSEEIVKRAMDFTLGWHMEPITHGDYPQAMKDVVGSRLPSFTPEQKEKLKGSYDFVGINYFTSTFVAHTDNVNPEKPSWEADSRLQLHSNNVDGFKIGSQPATAKYPVCADGLRKVLKYIKENYNDPEIIVTGNGYKETLEEKDVLPDALSDSNRKYYHMRHLMALHGAVCEDKVNVKGYFVSSLMDGLEWEDGYKTRSGLYYVDYGHNMGRHEKQSAKWLSKLLEKVPDTIQSKVDSDSRKEL

SEQ ID NO: 21162 - protein, 425 aa, Arabidopsis thaliana
  peptide (1)..(425): Ceres Seq. ID no. 13490110
MDAFRFSISWSRIFPHGKKDKGVSETGVKFYNDLINELIANGVTPLVTLFQWDVPQALEDEYGGFLSDRILEDFRDFAQFAFNKYGDRVKHWVTINEPYEFSRGGYETGEKAPGRCSKYVNEKCVAGKSGHEVYTVSHNLLLAHAEAVEEFRKCGKCTGGKIGIVQSPMWFEPYDKKSTSSPSEEIVKRAMDFTLGWHMEPITHGDYPQAMKDVVGSRLPSFTPEQKEKLKGSYDFVGINYFTSTFVAHTDNVNPEKPSWEADSRLQLHSNNVDGFKIGSQPATAKYPVCADGLRKVLKYIKENYNDPEIIVTGNGYKETLEEKDVLPDALSDSNRKYYHMRHLMALHGAVCEDKVNVKGYFVSSLMDGLEWEDGYKTRSGLYYVDYGHNMGRHEKQSAKWLSKLLEKVPDTIQSKVDSDSRKEL

SEQ ID NO: 21163 - DNA, 521 bp, Arabidopsis thaliana
  misc_feature (1)..(521): Ceres Seq. ID no. 12393362
  misc_feature (1)..(521): Ortholog of  Ceres SEQ ID NO 15170497 as cited in SEQ ID NO 52766
acttaaaccgaacagatttgtcacgaagaagaaatcagtgtagcaaacaccatccatccctgagcaaagatagaagaaaagctatgactgatttgcaaatggaggtagaggtagataccaattcttctttgcaggagtctctcccgaagccgcaagtcatgtacagatgtaagaaatgtagaaggatagttgctattgaggaaaacatagtcccgcatgaaccaggaaagggtgaagaatgctttgcttggaaaaagagaagtggaaactctgaacaagtgcaatgctcttccatctttgtcgagcctatgaaatggatgcagacaatacatgatggagtggtggaagagaagcttctatgttttggatgtaacgggagattaggttatttcaactgggctgggatgcaatgtagctgtggtgcatgggttaatccggcttttcagcttaataaaagccgaatagacgagtgtaaatccgagccaaacccgaacctgaatatggaaacttgatgaaaaagg

SEQ ID NO: 21164 - protein, 169 aa, Arabidopsis thaliana
  peptide (1)..(169): Ceres Seq. ID no. 12393363
LNRTDLSRRRNQCSKHHPSLSKDRRKAMTDLQMEVEVDTNSSLQESLPKPQVMYRCKKCRRIVAIEENIVPHEPGKGEECFAWKKRSGNSEQVQCSSIFVEPMKWMQTIHDGVVEEKLLCFGCNGRLGYFNWAGMQCSCGAWVNPAFQLNKSRIDECKSEPNPNLNMET

SEQ ID NO: 21165 - protein, 142 aa, Arabidopsis thaliana
  peptide (1)..(142): Ceres Seq. ID no. 12393364
MTDLQMEVEVDTNSSLQESLPKPQVMYRCKKCRRIVAIEENIVPHEPGKGEECFAWKKRSGNSEQVQCSSIFVEPMKWMQTIHDGVVEEKLLCFGCNGRLGYFNWAGMQCSCGAWVNPAFQLNKSRIDECKSEPNPNLNMET

SEQ ID NO: 21166 - protein, 137 aa, Arabidopsis thaliana
  peptide (1)..(137): Ceres Seq. ID no. 12393365
MEVEVDTNSSLQESLPKPQVMYRCKKCRRIVAIEENIVPHEPGKGEECFAWKKRSGNSEQVQCSSIFVEPMKWMQTIHDGVVEEKLLCFGCNGRLGYFNWAGMQCSCGAWVNPAFQLNKSRIDECKSEPNPNLNMET

SEQ ID NO: 21167 - DNA, 1708 bp, Arabidopsis thaliana
  misc_feature (1)..(1708): Ceres Seq. ID no. 13486985
  misc_feature (1)..(1708): Ortholog of  Ceres SEQ ID NO 12612314 as cited in SEQ ID NO 51420
atcttcttcccccataacactcttcttctctcatcaaaatctctaactcaaaccttcctttgatcccaagaaatctcttccaaagccctaagccaaaagcttcaagagaaaaaatggcgatgatgggtcagttatggactaacacaggctctgctcttgcaacactaatgtttgtatacacaatcttcaaacaattcttccctctcttcggaccccagttggaaccattcctttatagactcttcggtcgcttctacccttacatccaaataacattccatgaatacagcggagagcatttcaagagaagcgaagcctacttggggatccagagctatctaagcaaagactcttctgctagagcaaagaaactcaaagccaacacaactaaaggaagcaaatctattgttcttagcatggatgataaggaagagatcactgacgattttgagggcattagggtttggtggcagtcgaagaaagagggagctactaggcaatctttctcgttttaccctgaagctaatgagaagagatattacatgttaaggttccacagacgtgaccgagaagtaatcatagagaggtatcttgagcatgttatgagagaagggaagacgatagagcaaaagaacagagagaggaagctttattcgaatactccgggtcagagccatggaaacaacagtaagtggagtcatgtaacctttgagcatccagctacgtttgatactctagctatggaagagaataagaaggaagagatcaagagtgatctgatcaagtttagtaagagtaaagattattacaagaagatcggaaaagcgtggaagagagggtatcttttgtttggaccacccgggactgggaagtctacaatgatcgcagcgatggctaatttcttggagtatgatgtttatgatcttgagttgacaacggttaaggataatacacatctgagaaggttattgattgagacttcagcgaaatcgattattgtgattgaagatatcgattgttcgcttaatctaacggggcagagaaagaagaaggaggaggaagaggaagatggagacgataagaacacgattgagaagaagatgatgatgaagaatgaaggtgagaataaagagagtaaagttactttatcagggctactaaatttcattgatggtttatggtcagcttgtggtggtgagaggatcattgtattcactacaaactttgtggacaagttagatccggctttgattaggaaaggaagaatggataagcatatagagatgtcgtattgttgtttcgaagcgtttaaggtattggctaagaactatttggatgtggaagagagtgagatgtttgaggagataaagaggttgcttgaggttgaagaaatcaagatgacaccggcggatgttggggagaatctgttaccgaagtcagaaaaggaaggaggtgagacttgtttgaagagattgatcgaagcgttgaaggaagagaaggaggaagcgaagaagaaggtcgaggaagaggaggaagagaagcagaggaaaaaggaaaaggtgaaagaaatagaggcagagaaagagaagaagaaaaagattgaagaagagaattgagtttgaaggaaatttgttggattgtagtatctaactgaaataattgtagtctgattggttcatcttatgaatgttttgtgtttcatttagcg

SEQ ID NO: 21168 - protein, 500 aa, Arabidopsis thaliana
  peptide (1)..(500): Ceres Seq. ID no. 13486986
MAMMGQLWTNTGSALATLMFVYTIFKQFFPLFGPQLEPFLYRLFGRFYPYIQITFHEYSGEHFKRSEAYLGIQSYLSKDSSARAKKLKANTTKGSKSIVLSMDDKEEITDDFEGIRVWWQSKKEGATRQSFSFYPEANEKRYYMLRFHRRDREVIIERYLEHVMREGKTIEQKNRERKLYSNTPGQSHGNNSKWSHVTFEHPATFDTLAMEENKKEEIKSDLIKFSKSKDYYKKIGKAWKRGYLLFGPPGTGKSTMIAAMANFLEYDVYDLELTTVKDNTHLRRLLIETSAKSIIVIEDIDCSLNLTGQRKKKEEEEEDGDDKNTIEKKMMMKNEGENKESKVTLSGLLNFIDGLWSACGGERIIVFTTNFVDKLDPALIRKGRMDKHIEMSYCCFEAFKVLAKNYLDVEESEMFEEIKRLLEVEEIKMTPADVGENLLPKSEKEGGETCLKRLIEALKEEKEEAKKKVEEEEEEKQRKKEKVKEIEAEKEKKKKIEEEN

SEQ ID NO: 21169 - protein, 498 aa, Arabidopsis thaliana
  peptide (1)..(498): Ceres Seq. ID no. 13486987
MMGQLWTNTGSALATLMFVYTIFKQFFPLFGPQLEPFLYRLFGRFYPYIQITFHEYSGEHFKRSEAYLGIQSYLSKDSSARAKKLKANTTKGSKSIVLSMDDKEEITDDFEGIRVWWQSKKEGATRQSFSFYPEANEKRYYMLRFHRRDREVIIERYLEHVMREGKTIEQKNRERKLYSNTPGQSHGNNSKWSHVTFEHPATFDTLAMEENKKEEIKSDLIKFSKSKDYYKKIGKAWKRGYLLFGPPGTGKSTMIAAMANFLEYDVYDLELTTVKDNTHLRRLLIETSAKSIIVIEDIDCSLNLTGQRKKKEEEEEDGDDKNTIEKKMMMKNEGENKESKVTLSGLLNFIDGLWSACGGERIIVFTTNFVDKLDPALIRKGRMDKHIEMSYCCFEAFKVLAKNYLDVEESEMFEEIKRLLEVEEIKMTPADVGENLLPKSEKEGGETCLKRLIEALKEEKEEAKKKVEEEEEEKQRKKEKVKEIEAEKEKKKKIEEEN

SEQ ID NO: 21170 - protein, 497 aa, Arabidopsis thaliana
  peptide (1)..(497): Ceres Seq. ID no. 13486988
MGQLWTNTGSALATLMFVYTIFKQFFPLFGPQLEPFLYRLFGRFYPYIQITFHEYSGEHFKRSEAYLGIQSYLSKDSSARAKKLKANTTKGSKSIVLSMDDKEEITDDFEGIRVWWQSKKEGATRQSFSFYPEANEKRYYMLRFHRRDREVIIERYLEHVMREGKTIEQKNRERKLYSNTPGQSHGNNSKWSHVTFEHPATFDTLAMEENKKEEIKSDLIKFSKSKDYYKKIGKAWKRGYLLFGPPGTGKSTMIAAMANFLEYDVYDLELTTVKDNTHLRRLLIETSAKSIIVIEDIDCSLNLTGQRKKKEEEEEDGDDKNTIEKKMMMKNEGENKESKVTLSGLLNFIDGLWSACGGERIIVFTTNFVDKLDPALIRKGRMDKHIEMSYCCFEAFKVLAKNYLDVEESEMFEEIKRLLEVEEIKMTPADVGENLLPKSEKEGGETCLKRLIEALKEEKEEAKKKVEEEEEEKQRKKEKVKEIEAEKEKKKKIEEEN

SEQ ID NO: 21171 - DNA, 1859 bp, Arabidopsis thaliana
  misc_feature (1)..(1859): Ceres Seq. ID no. 13646168
  misc_feature (1)..(1859): Ortholog of  Ceres SEQ ID NO 15176230 as cited in SEQ ID NO 58796
  misc_feature (1)..(1859): Ortholog of  Ceres SEQ ID NO 14308156 as cited in SEQ ID NO 59006
  misc_feature (1)..(1859): Ortholog of  Ceres SEQ ID NO 15174240 as cited in SEQ ID NO 61866
  misc_feature (1)..(1859): Ortholog of  Ceres SEQ ID NO 13596321 as cited in SEQ ID NO 67976
atagtcaacaagagaacaaagccacagagagagagagacactaaaaccctaatctcttactcactgtctctcttcttcaatccatgtcttcaacacaagaagcgtctgttactgatttgcccgtgaagagacctagagaagcagaggaggacaataacggcggcgccatggaaacagagaacggtggaggagagataaaggagccttcttgtatgtcctctattattcctggatggttctctgagattagtcctatgtggccaggagaagcacattctctcaaggtagagaagattctattccaagggaaatcagattaccaggatgttattgttttccagtctgcaacatatggaaaggttttggttttggatggagtgattcaactcactgagagagatgaatgtgcgtatcaagaaatgatcactcatcttcctttgtgctctatctccaaccccaaaaaggtactggtgattggaggaggagatggaggagtcctgagggaagtggcacgtcatagttctgttgagcagattgacatttgtgaaatagataaaatggtggttgatgtggctaagcagtatttccctaatgtagcagttgttttttttttttttttttcctaaaaccttccataatttataatccagaacgaaagatgttcaacatagaatccatgataactcaaattaaagagcttacaaaattcccaaatagaaatgcagtttttaaaagataagagagaaagagaaggatcgatctaccgctacaacagatcaagcttcaactccttctttctggtaaacgtaggtgagtccacacttaccacagtaatggcgatcaaaatgactcgccatgaaagtcccagctccacaggttgcgttagggcactccttcctcaaacgctgaacctttccagatccatcgattttgtaaaactgaagaacagcgagcttaaccttcttatgcttgtgcttgatcttcttcggcttggtgtaagtcttcttcttcctcttcttagcaccaccacggagacggaggacgagatgaagcgtcgattccttctggatgttgtagtcggcgagggtacggccgtcttcaagctgtttcccggcgaaaatcaatcgctgctggtccggtgggattccttccttgtcttggatcttcgccttcacattgtcgatggtgtcggatgattcaacctcaagggttatggtcttccacgttagggttttcacgaagaacgctgctgaaggaacctatgatgcagttattgttgattcatctgatccaatcggtccagcaaaagagctatttgagaaacctttctttgagtcagtgaatagagctcttcgtcctggtggagttgtgtgcacacaagctaaaagcttgtggcttcacatggatatcattgaagacattgtttctaattgccgtgacatctttaaaggatctgttaactacgcttggaccagtgttccaacttacccgagtggagtcattggattcatgctttgttcatctgaaggaccacaagtcgatttcaagaagccagtgagtctaatcgatactgatgaaagctctatcaaatcacactgtcccttgaagtattacaacgctgagattcactcagctgctttctgcttgccctcttttgctaagaaggtgattgattcgaaagccaactagaaaagagaagagaaatcatttgctttagagaaacttcatgtggaagtgataatatgatgatacaatgatcctttggaaaaaaataaagaagttttaatttttagaatgtaatgttctttcacctgcaatgttatgtgactgcactgagctatcaatctctttttataagc

SEQ ID NO: 21172 - protein, 180 aa, Arabidopsis thaliana
  peptide (1)..(180): Ceres Seq. ID no. 13646169
MSSTQEASVTDLPVKRPREAEEDNNGGAMETENGGGEIKEPSCMSSIIPGWFSEISPMWPGEAHSLKVEKILFQGKSDYQDVIVFQSATYGKVLVLDGVIQLTERDECAYQEMITHLPLCSISNPKKVLVIGGGDGGVLREVARHSSVEQIDICEIDKMVVDVAKQYFPNVAVVFFFFFS

SEQ ID NO: 21173 - protein, 168 aa, Arabidopsis thaliana
  peptide (1)..(168): Ceres Seq. ID no. 13646170
MVSDDSTSRVMVFHVRVFTKNAAEGTYDAVIVDSSDPIGPAKELFEKPFFESVNRALRPGGVVCTQAKSLWLHMDIIEDIVSNCRDIFKGSVNYAWTSVPTYPSGVIGFMLCSSEGPQVDFKKPVSLIDTDESSIKSHCPLKYYNAEIHSAAFCLPSFAKKVIDSKAN

SEQ ID NO: 21174 - protein, 158 aa, Arabidopsis thaliana
  peptide (1)..(158): Ceres Seq. ID no. 13646171
MVFHVRVFTKNAAEGTYDAVIVDSSDPIGPAKELFEKPFFESVNRALRPGGVVCTQAKSLWLHMDIIEDIVSNCRDIFKGSVNYAWTSVPTYPSGVIGFMLCSSEGPQVDFKKPVSLIDTDESSIKSHCPLKYYNAEIHSAAFCLPSFAKKVIDSKAN

SEQ ID NO: 21175 - DNA, 835 bp, Arabidopsis thaliana
  misc_feature (1)..(835): Ceres Seq. ID no. 13509143
  misc_feature (1)..(835): Ortholog of  Ceres SEQ ID NO 12635572 as cited in SEQ ID NO 0
ctctaaattcacagctcatcgaaaatgggctcacggcaaggaccaccgaagcatcagaacaaattcgcctgggttcccaaagccggcgtcaagatcaacgaaacggaagtcggcgggagatttagaccattatccgagattaccggagtttgctaccgatgtcgagagcagatcgcctggaaacgcaaatacggcaaatacaaaaccctaactgaagccaccaaatgtcagaagtgtacaaagcgaaatgttcgtcaagcataccataagttatgccctggttgtgccaaggagcaaaaggtgtgtgcaaagtgttgtcaaagtgttgatcaaatccttggaagagatatttacgaagtagaggctgaacagaagctgcttgatgagactatcaagaatgctagggaaagagatcgaaggaccctattacgtgctatgaacaaagataacaaaccaaataaatcagatgaagaagcgtcaaggagtgatagcagcaaggttggtgatgtgtttccctcaacttcccttgaagaatatgcaaacaagtccggaagagttagcgggattattggtcatggtagtgtgcctgatcatgcccatgatgatgctagtggacctgaatcagatgaggatgacaatgttggtgatgatgagcatgatttgcgcgaagacagtgatgaaaatgagcaatctcaactgcagaaataaactcatgtttggttgtactactgtcaatttggtaggattgtgagattttgcaagactgtttattcctgttgttttgataaaacttttacttggtcacctgcaatgcaagactagcaaagaatactat

SEQ ID NO: 21176 - protein, 227 aa, Arabidopsis thaliana
  peptide (1)..(227): Ceres Seq. ID no. 13509144
MGSRQGPPKHQNKFAWVPKAGVKINETEVGGRFRPLSEITGVCYRCREQIAWKRKYGKYKTLTEATKCQKCTKRNVRQAYHKLCPGCAKEQKVCAKCCQSVDQILGRDIYEVEAEQKLLDETIKNARERDRRTLLRAMNKDNKPNKSDEEASRSDSSKVGDVFPSTSLEEYANKSGRVSGIIGHGSVPDHAHDDASGPESDEDDNVGDDEHDLREDSDENEQSQLQK

SEQ ID NO: 21177 - DNA, 716 bp, Arabidopsis thaliana
  misc_feature (1)..(716): Ceres Seq. ID no. 12393247
  misc_feature (1)..(716): Ortholog of  Ceres SEQ ID NO 13594979 as cited in SEQ ID NO 56172
  misc_feature (1)..(716): Ortholog of  Ceres SEQ ID NO 14316530 as cited in SEQ ID NO 60270
aaacaacgtttcgtcttctcagattctttacctttcttaaggaaaaaccccaaaagagagaagataaaaatctcgcattcagattttagggtttctgacaaattctccgacgaaattcaagatccgaatctcggcaatgtcgacaatctcgccgtcattagccgtaattgcgtttctttttctgattcttctgaatctatcttcggttttcgctgatccttcgacggaaggaggagagattattaggttaccttcggagaagatcaacggtgaaaaaaacagaggcgaattctgtgaaggaattgctaaaccggcttcgtgtccggttcagtgtttcaggcctgatccggtttgcggtgaagacagcgttacttactggtgcggttgtgcagatgctttgtgccatggtgttcgtgttgtgaaacaaggagcttgtgatgttggtaatggtgttggtttgtctgttcctggacaagctctgcttttgatacacattgtctggatgatgcttcttgggttttctattctctttgggctcttttgattttggttctaatttctctgaatcaaaacaacatatagaagattgtttaggttttcagattgcaaatgacgaatcttttttgtttatactcttctttttttctttatattgctctgtattcatattacattaaaactatgaggaaatattattattatttggtttgttgcgc

SEQ ID NO: 21178 - protein, 135 aa, Arabidopsis thaliana
  peptide (1)..(135): Ceres Seq. ID no. 12393248
MSTISPSLAVIAFLFLILLNLSSVFADPSTEGGEIIRLPSEKINGEKNRGEFCEGIAKPASCPVQCFRPDPVCGEDSVTYWCGCADALCHGVRVVKQGACDVGNGVGLSVPGQALLLIHIVWMMLLGFSILFGLF

SEQ ID NO: 21179 - protein, 71 aa, Arabidopsis thaliana
  peptide (1)..(71): Ceres Seq. ID no. 12393249
KQRFVFSDSLPFLRKNPKREKIKISHSDFRVSDKFSDEIQDPNLGNVDNLAVISRNCVSFSDSSESIFGFR

SEQ ID NO: 21180 - DNA, 668 bp, Arabidopsis thaliana
  misc_feature (1)..(668): Ceres Seq. ID no. 12482739
  misc_feature (1)..(668): Ortholog of  Ceres SEQ ID NO 13581866 as cited in SEQ ID NO 52179
  misc_feature (1)..(668): Ortholog of  Ceres SEQ ID NO 14315451 as cited in SEQ ID NO 59289
acgcacacagagttttctcttcttcgtcctagtttcttctattccaggtgagaagaaaaaatggcgtttgtgaccactgcggaagtgtgtgacgcgaatcaagagatgattcgaagtggccagctccgagctctgcaacccgtttttcagatttatggtcgtcgtcaaatattttcaggtccagtagttactgttaaagtctttgaagacaatggcttaatccgtcacttcctcgaagagaaaggcaatggtagagttcttgtggtggatggtggagggagtttacgctgtgcgatactaggaggaaacccggtcgtacaagcgcagaacaacggatgggcagggatcatagtgaatggatgcatcagagacgttgatgagatcaatggttgcgacattggagtgagagctttagcttctcatccaataaaggctagtaagaaaggacttggtgaacaaagagtctctttgaacattgcaggcactcggatatgcgatggcgaatggctttatgcagatactgatggtatccttgtttctcagattgaattatccgtttaaaaggacacaagtgatgttgttgatttgttaaaatctgtaagctactacttttgtgctttgtgtttctgtaatggctatcagagtaaaagttggcttctttgaatatg

SEQ ID NO: 21181 - protein, 166 aa, Arabidopsis thaliana
  peptide (1)..(166): Ceres Seq. ID no. 12482740
MAFVTTAEVCDANQEMIRSGQLRALQPVFQIYGRRQIFSGPVVTVKVFEDNGLIRHFLEEKGNGRVLVVDGGGSLRCAILGGNPVVQAQNNGWAGIIVNGCIRDVDEINGCDIGVRALASHPIKASKKGLGEQRVSLNIAGTRICDGEWLYADTDGILVSQIELSV

SEQ ID NO: 21182 - protein, 151 aa, Arabidopsis thaliana
  peptide (1)..(151): Ceres Seq. ID no. 12482741
MIRSGQLRALQPVFQIYGRRQIFSGPVVTVKVFEDNGLIRHFLEEKGNGRVLVVDGGGSLRCAILGGNPVVQAQNNGWAGIIVNGCIRDVDEINGCDIGVRALASHPIKASKKGLGEQRVSLNIAGTRICDGEWLYADTDGILVSQIELSV

SEQ ID NO: 21183 - DNA, 937 bp, Arabidopsis thaliana
  misc_feature (1)..(937): Ceres Seq. ID no. 12482820
  misc_feature (1)..(937): Ortholog of  Ceres SEQ ID NO 15178816 as cited in SEQ ID NO 405
ctatctctcatccacatcttagttcatgttcgagtttctctgcttcaattacaaagaatggctgcttcaagtgctgtcaccgcaaactacgtcctcaagccacctccattcgcactggatgctttggagccgcatatgagcaaacaaactctggagtttcactggggaaaacatcacagagcttacgtggacaacctcaagaaacaggttcttggaaccgagcttgaaggcaagcccttagagcacattatccacagcacttacaacaatggtgatctcctccctgctttcaacaacgctgctcaggcgtggaaccacgagttcttctgggagtcaatgaaaccaggtggtggaggaaaaccatcaggagagcttcttgctttgcttgaaagagatttcacttcttatgagaagttctatgaagagttcaatgctgctgcagccactcagtttggagctggctgggcctggcttgcttattcaaatgaaaaactcaaagtagtgaaaactcccaatgctgtgaatccccttgtgctcggctctttcccattgcttaccattgatgtctgggagcatgcttactaccttgacttccagaaccgaagaccagattacataaagacattcatgaccaatcttgtgtcttgggaagctgtaagtgccagacttgaggccgccaaggctgcttctgcttaagcaaatttctgaacaatttgacttcagtgacagtgagttctgcatcaccgaagtctcttataaaatattggtcgctgtaataaggacacagctctcttgttgtgtatgtgtcacagagttcttcattttgcttgtgtaatgaacaattaaacatgctcttttctgagtgtgtgtgcgttttgtgtgtgtcaagtttttcatcgtctcctttattaaactcaaattggcacctaccatcagt

SEQ ID NO: 21184 - protein, 231 aa, Arabidopsis thaliana
  peptide (1)..(231): Ceres Seq. ID no. 12482821
LSLIHILVHVRVSLLQLQRMAASSAVTANYVLKPPPFALDALEPHMSKQTLEFHWGKHHRAYVDNLKKQVLGTELEGKPLEHIIHSTYNNGDLLPAFNNAAQAWNHEFFWESMKPGGGGKPSGELLALLERDFTSYEKFYEEFNAAAATQFGAGWAWLAYSNEKLKVVKTPNAVNPLVLGSFPLLTIDVWEHAYYLDFQNRRPDYIKTFMTNLVSWEAVSARLEAAKAASA

SEQ ID NO: 21185 - protein, 212 aa, Arabidopsis thaliana
  peptide (1)..(212): Ceres Seq. ID no. 12482822
MAASSAVTANYVLKPPPFALDALEPHMSKQTLEFHWGKHHRAYVDNLKKQVLGTELEGKPLEHIIHSTYNNGDLLPAFNNAAQAWNHEFFWESMKPGGGGKPSGELLALLERDFTSYEKFYEEFNAAAATQFGAGWAWLAYSNEKLKVVKTPNAVNPLVLGSFPLLTIDVWEHAYYLDFQNRRPDYIKTFMTNLVSWEAVSARLEAAKAASA

SEQ ID NO: 21186 - protein, 186 aa, Arabidopsis thaliana
  peptide (1)..(186): Ceres Seq. ID no. 12482823
MSKQTLEFHWGKHHRAYVDNLKKQVLGTELEGKPLEHIIHSTYNNGDLLPAFNNAAQAWNHEFFWESMKPGGGGKPSGELLALLERDFTSYEKFYEEFNAAAATQFGAGWAWLAYSNEKLKVVKTPNAVNPLVLGSFPLLTIDVWEHAYYLDFQNRRPDYIKTFMTNLVSWEAVSARLEAAKAASA

SEQ ID NO: 21187 - DNA, 844 bp, Arabidopsis thaliana
  misc_feature (1)..(844): Ceres Seq. ID no. 12377524
  misc_feature (1)..(844): Ortholog of  Ceres SEQ ID NO 13595021 as cited in SEQ ID NO 55815
atctcttttctcttctcatcaaaacataccaataagcaatttgctcattagagaacagagaaaaaaaaaacaatggcaactcaagccgccgggatcttcaactccgccataacaaccgccgcaacctccggcgtcaagaaactccactttttctcaacaacccaccgtcccaaatccctctccttcaccaaaaccgcaatccgcgccgagaaaacagattcctccgccgccgctgctgcagcccccgccacgaaagaagctcccgtgggattcacgccaccgcagctagacccaaacacaccgtctccgatcttcgctggaagcaccggtggtcttctacgtaaagcgcaagtggaagagttctacgttatcacgtggaactcaccgaaagaacagatctttgagatgccgacaggaggagcagcgatcatgagagaaggtccgaatcttctgaagctagcgaggaaagagcagtgtttagctttggggacaaggcttagatccaagtacaagatcacttaccagttttacagagtgtttcctaacggtgaggttcaatatcttcatcctaaagatggtgtttatccagagaaggcgaatccaggaagagaaggtgttggtctcaacatgagatctattgggaaaaatgttagtcccattgaagttaagtttactggcaaacaaagttatgatttgtaagatctgtaaactaaaaaaaccaaaaactatgtgcatgtggtgatgattatgactatgtttcatgttaatttttaatggattttgttttgataatttgttgttccatttggtttaatggatcttttatgggcctaaactataacgt

SEQ ID NO: 21188 - protein, 208 aa, Arabidopsis thaliana
  peptide (1)..(208): Ceres Seq. ID no. 12377525
MATQAAGIFNSAITTAATSGVKKLHFFSTTHRPKSLSFTKTAIRAEKTDSSAAAAAAPATKEAPVGFTPPQLDPNTPSPIFAGSTGGLLRKAQVEEFYVITWNSPKEQIFEMPTGGAAIMREGPNLLKLARKEQCLALGTRLRSKYKITYQFYRVFPNGEVQYLHPKDGVYPEKANPGREGVGLNMRSIGKNVSPIEVKFTGKQSYDL

SEQ ID NO: 21189 - DNA, 817 bp, Arabidopsis thaliana
  misc_feature (1)..(817): Ceres Seq. ID no. 13496797
  misc_feature (1)..(817): Ortholog of  Ceres SEQ ID NO 13638986 as cited in SEQ ID NO 56098
gactctctacgtttccttcgtcttcttcttcttctctcttccctatatataaaacccttcatgttgtttagatcaggttaagatcattttgagtctctccaaaccctaatatcaaattctcatctcataactaacaaaagcatcccaaaatttctagtaaatggcggaggaattcgatgaatctgaggtagtgttctccgatggtttaagctccgttctccataaagagaacgagaatcgcctgtttggttctgatatggagaggaagaagacgaggcggatcaagaggacgacgacggagaaggcgtcgttgtcgagctcgcttccggtgagtatccctgagaacatctttcggaggtacgttgggaaagaggaggatgaatactcagaggaggaatattccgaaggaggaggagagatgattccgccgcatattatgatcggacggaggatccaaggaggacaaatggcgttttccgtttgttcaggtagtggaaggactcttaagggaagagatctgagccgggttcggaattcggttcttaggttaaccggttttttggaggcttgaaccgttaccggtttgccatacttcatcatcttttcccaactcttttgtttttttgcatattacggaaaattgctagtggatccccgtgttgtttatttaagtaaagggtggggaaaatgtgaaacaaagctttctccttagtttttgtttttccatattcttttgtttttcctaaattgtaataggaaacaaggaaatttcgggttaattatgagaagaataacaataattcttgtgttaggattt

SEQ ID NO: 21190 - protein, 136 aa, Arabidopsis thaliana
  peptide (1)..(136): Ceres Seq. ID no. 13496798
MAEEFDESEVVFSDGLSSVLHKENENRLFGSDMERKKTRRIKRTTTEKASLSSSLPVSIPENIFRRYVGKEEDEYSEEEYSEGGGEMIPPHIMIGRRIQGGQMAFSVCSGSGRTLKGRDLSRVRNSVLRLTGFLEA

SEQ ID NO: 21191 - protein, 104 aa, Arabidopsis thaliana
  peptide (1)..(104): Ceres Seq. ID no. 13496799
MERKKTRRIKRTTTEKASLSSSLPVSIPENIFRRYVGKEEDEYSEEEYSEGGGEMIPPHIMIGRRIQGGQMAFSVCSGSGRTLKGRDLSRVRNSVLRLTGFLEA

SEQ ID NO: 21192 - DNA, 1010 bp, Arabidopsis thaliana
  misc_feature (1)..(1010): Ceres Seq. ID no. 13648013
  misc_feature (1)..(1010): Ortholog of  Ceres SEQ ID NO 13599585 as cited in SEQ ID NO 988
  misc_feature (1)..(1010): Ortholog of  Ceres SEQ ID NO 13594624 as cited in SEQ ID NO 55765
  misc_feature (1)..(1010): Ortholog of  Ceres SEQ ID NO 15177682 as cited in SEQ ID NO 0
agaaccactagttgtgatttgtgaaactactgaagtaaacaagtaaaccacaacaatggcgttgttctccccgccaatctcttcttcatctcttcaaaatcccaatttcatcccgaaattctcattctctctcctctccagtaaccgcttctctctcctctccgtcactcgagcttcctccgacagtggatcaacctctcccaccgccgccgtctccgtagaggctcctgagcccgtggaagtgatagttaaagagcctccccaatcaacaccagctgttaaaaaggaagaaaccgccaccgctaaaaatgttgccgtcgaaggtgaagagatgaaaacaacggagagtgttatcaaattccaagatgcgaggtggattaatggaacttgggatctgaaacaattcgagaaagatggaaaaaccgattgggattctgtaatcgttgctgaggcaaagagaagaaaatggctagaagagaatccagaaacaacgagtaacgacgagccagtgcttttcgatacatcgattattccatggtgggcttggattaagagataccacttacctgaagctgaactcttaaatggtcgtgcggcgatgataggattctttatggcttactttgtcgatagtcttactggagtaggacttgttgatcaaatggggaatttcttctgcaagacactattgtttgtggctgtggccggagttttgtttattcgtaagaatgaggatgtggataaactcaagaatttgtttgatgagactacattgtatgataagcaatggcaagcagcttggaaaaatgatgatgatgagtcattgggttctaagaagaagtgataacaaagattcttgctttctttttttgttgttgttgtaattaggagatgaacttaccaaatgtaatatcaagagatttgaacaatgtttcctcagattatcgttaatcatgtctagtctctacttaaaaaaaaaaaaaaaaaaaactcgagggggggcccggtac

SEQ ID NO: 21193 - protein, 262 aa, Arabidopsis thaliana
  peptide (1)..(262): Ceres Seq. ID no. 15219523
MALFSPPISSSSLQNPNFIPKFSFSLLSSNRFSLLSVTRASSDSGSTSPTAAVSVEAPEPVEVIVKEPPQSTPAVKKEETATAKNVAVEGEEMKTTESVIKFQDARWINGTWDLKQFEKDGKTDWDSVIVAEAKRRKWLEENPETTSNDEPVLFDTSIIPWWAWIKRYHLPEAELLNGRAAMIGFFMAYFVDSLTGVGLVDQMGNFFCKTLLFVAVAGVLFIRKNEDVDKLKNLFDETTLYDKQWQAAWKNDDDESLGSKKK

SEQ ID NO: 21194 - protein, 170 aa, Arabidopsis thaliana
  peptide (1)..(170): Ceres Seq. ID no. 15219524
MKTTESVIKFQDARWINGTWDLKQFEKDGKTDWDSVIVAEAKRRKWLEENPETTSNDEPVLFDTSIIPWWAWIKRYHLPEAELLNGRAAMIGFFMAYFVDSLTGVGLVDQMGNFFCKTLLFVAVAGVLFIRKNEDVDKLKNLFDETTLYDKQWQAAWKNDDDESLGSKKK

SEQ ID NO: 21195 - DNA, 2753 bp, Arabidopsis thaliana
  misc_feature (1)..(2753): Ceres Seq. ID no. 13492484
  misc_feature (1)..(2753): Ortholog of  Ceres SEQ ID NO 14314647 as cited in SEQ ID NO 59937
gacttttctcggacttgggagacaatggagactgaatacgaccaagttcttcgatccgttgctcaggtgaacatcgccgaccaaatcggagaatccgacgacgtagaaagagacggaaacggcgtaaaagtttcgtgcttcactgaagttttcgatgatgttactatccagttccagatcatccgtctcgcgaaacagatttacgtatgggtcggttgcaattccgccaaatttgggagtttgtacgcagccgcttcaacacgaccgagcaatacagtgagtgttacatcggtacttggtggaacatctgataacactggatctggcattgcgcgtagattagtgttgaagactggtctcaatataatactggcttgcaacatccctaaaaacaatcccttgcttgaggcaaaagctgagaaagtgttgattagaaagctgattgatcttggttacacaatgtcaaaacctgtaagagcaacataacccaatttagctgtttcttgaggttgtttctccttcattgtgtcctaccctttttatacggaaatttgtgactgattctactaaggtatcttgatcgattggcatgaaatgatcactttttttttggttttcgataagttttcttggcattgtatcttgaagatactatcttctccccatttcgtagctgcattcatctgcataatgctcgatgagaaatgtttaaagcgtttattacttcgaccacaaaacaaagagagagttggttccttgttcatgactttcaaatgtgtttgttttcttattcttcttgccgatttggcgtgatttcttcacctaatttggaatatagttatggtgatgcaatatttgcatgtttgatcttttgttcggtaaaaaggcaaatcctttggacataccaaagtgtcaaactatatgatgaaaccattcttctttccctctatatttgtcacttgatgatctgtactattgaattgatacagagttaccaccaagaattagatgatgtgtgtatattgacgtctatataaaaatcagaagttgttttggcatctaacctttaaatttgtgaactctctgaccaaatgtaaataaaaagaattgatttttttggtttggttcggtttggccttacacacggaaactaattggacccgaataaaccgaaattgaacaaaaccctaaattatgttttacttcactcttcaataaatcatgattttcttttaaactttttatatccataaacgacgacgttttggctggcatatggtttgggtttttcacaaaatttaggattgatatttttagttttttattctcagagacgattgtgaggaagcttgttgatcgttgcggtctgagtaagcgagtagatcattggtttgtctcttctttcttacttcgattctttgcttcatccagaataatcacagttccaattctattacctttctttttggtgtttgtgactcttatgttcatagctcttctgttgaattcacaagcattgttttctttttgatctgattcatccctgagagcataatgtgattagttgtattcctgacactcctctgttacgtgtattttactatttagtttcagtcttggtagacacatataaactgagaacattgcaagtaaaaaaaaaagagttttctttgagaaatttctctttagaatggatatgccaaagagtatcctgatcctctacttagctatataactagggatttttgaatctttgctatcaggttttgttatttactttctctggccaagccaactataaaagttaatggaagaggaccattgtgaggattctcataattatatgggttttgctctgcatcaggtaaaactagtattggttctataatactgcaaaagttagtttgttgcttttgagttgatttccctatgcctgcaggctaaacttgctctggaggctcttgaagttcccgtggggtctctatttttttgctttggcttcataccaatttgtgtttcgtaccagtgtatcaattaatgtcatataggataactaatgcgttttctttctggtttgtgtggaccagatgtgtttttcttgaggacggtaaggtcattgcttcagggcgaaaccgaacaaatgagacacgcaatgccacaagacatgcagagatggaagcaattgatcagcttgtcggacagtggcagaaagatggactctcaccttcacaagtcgctgagaaattctcgaaatgtgttctttatgtaacatgtgaaccttgcataatgtgtgcatcggccttatcgtttctcggtatcaaggaagtgtattatggatgtccaaatgataaatttgggggatgtggttccattttgtcgcttcacttaggtagtgaggaagctcaaagaggaaaaggatacaagtgcagaggaggaataatggcagaagaagctgtctctcttttcaaatgtttctatgagcaaggcaatcccaacgctccaaagccacaccgccctgttgttcaaagagagaggacttgaggtgaacgtatcgttaaaactgaagttcttcggcttctgcaacaacaacaatcagacctgaagattacactcacagtccagttcaaacaacaacaatccagagcagaagccataatttgggactccaaaagcttatttattagttttggattttattcacatatatgacaatcaaaataacatgttttgttatcaaatcatggctacttcct

SEQ ID NO: 21196 - protein, 167 aa, Arabidopsis thaliana
  peptide (1)..(167): Ceres Seq. ID no. 13492485
MSYRITNAFSFWFVWTRCVFLEDGKVIASGRNRTNETRNATRHAEMEAIDQLVGQWQKDGLSPSQVAEKFSKCVLYVTCEPCIMCASALSFLGIKEVYYGCPNDKFGGCGSILSLHLGSEEAQRGKGYKCRGGIMAEEAVSLFKCFYEQGNPNAPKPHRPVVQRERT

SEQ ID NO: 21197 - protein, 161 aa, Arabidopsis thaliana
  peptide (1)..(161): Ceres Seq. ID no. 13492486
DFSRTWETMETEYDQVLRSVAQVNIADQIGESDDVERDGNGVKVSCFTEVFDDVTIQFQIIRLAKQIYVWVGCNSAKFGSLYAAASTRPSNTVSVTSVLGGTSDNTGSGIARRLVLKTGLNIILACNIPKNNPLLEAKAEKVLIRKLIDLGYTMSKPVRAT

SEQ ID NO: 21198 - protein, 153 aa, Arabidopsis thaliana
  peptide (1)..(153): Ceres Seq. ID no. 13492487
METEYDQVLRSVAQVNIADQIGESDDVERDGNGVKVSCFTEVFDDVTIQFQIIRLAKQIYVWVGCNSAKFGSLYAAASTRPSNTVSVTSVLGGTSDNTGSGIARRLVLKTGLNIILACNIPKNNPLLEAKAEKVLIRKLIDLGYTMSKPVRAT

SEQ ID NO: 21199 - DNA, 1046 bp, Arabidopsis thaliana
  misc_feature (1)..(1046): Ceres Seq. ID no. 12420615
  misc_feature (1)..(1046): Ortholog of  Ceres SEQ ID NO 12557361 as cited in SEQ ID NO 72
  misc_feature (1)..(1046): Ortholog of  Ceres SEQ ID NO 13662949 as cited in SEQ ID NO 64276
gaagagggatgcgatcctctcgtcatcgctggttccatcagtttcagtgagaatcagatcgtcgttgtactgagagctccggcattggttcacggcggagctggagagttatctaagaacggagaggttactgatctgaattgttgaagatcggaaaatgacagaatcgagtctggatctgcaggaatctggttgggaagaacttaggcgggaagctcgtaaaattgaaggagatctagacgttaagctctcttcttacgctaagctaggcgccaggtttactcaaggcgggtatgttgacactgggtctccaaccgttggatcggggagatcatggaagtctatggagatggaaattcaatcgttgcttgagaagttgttggatattaatgattccatgagtagatgtgctgcatctgctgcacccacaacatcggttactcaaaaactagcaaggcacagggatatacttcatgaatatacccaggagtttcgaagaataaaaggaaatataaactcgttgagagaacacgctgagcttctgagttctgtcagggatgacataagtgaatataaggcttctggtagtatgtcaccaggtgtgcaagtgttaagggagagagcttcaatccatggaagtatatcccatattgatgatgtgattggtcaagctcaagcgacaagagcagttcttggctctcaacgatctctgttttcagatgttcaagggaaagtaaaaaatctcggagacaaattcccagtgattcgtggcttacttggctcaattaaaaggaaacgttctcgggacacacttatcctctccgctgtcatcgctgcttgtacgttgtttctaatcatctactggctctcaaaataaacagaatgttcatacacctaagctataaaacgagtttgccttgacatccctagatcgatttttttacaagttttttcttgcttttgtgtttttgccattatgttgggttatatgtttgtaggacaatattacaccctgaatcatatcgtaaaagtaaaattcgaaacat

SEQ ID NO: 21200 - protein, 239 aa, Arabidopsis thaliana
  peptide (1)..(239): Ceres Seq. ID no. 12420616
MTESSLDLQESGWEELRREARKIEGDLDVKLSSYAKLGARFTQGGYVDTGSPTVGSGRSWKSMEMEIQSLLEKLLDINDSMSRCAASAAPTTSVTQKLARHRDILHEYTQEFRRIKGNINSLREHAELLSSVRDDISEYKASGSMSPGVQVLRERASIHGSISHIDDVIGQAQATRAVLGSQRSLFSDVQGKVKNLGDKFPVIRGLLGSIKRKRSRDTLILSAVIAACTLFLIIYWLSK

SEQ ID NO: 21201 - protein, 177 aa, Arabidopsis thaliana
  peptide (1)..(177): Ceres Seq. ID no. 12420617
MEMEIQSLLEKLLDINDSMSRCAASAAPTTSVTQKLARHRDILHEYTQEFRRIKGNINSLREHAELLSSVRDDISEYKASGSMSPGVQVLRERASIHGSISHIDDVIGQAQATRAVLGSQRSLFSDVQGKVKNLGDKFPVIRGLLGSIKRKRSRDTLILSAVIAACTLFLIIYWLSK

SEQ ID NO: 21202 - protein, 175 aa, Arabidopsis thaliana
  peptide (1)..(175): Ceres Seq. ID no. 12420618
MEIQSLLEKLLDINDSMSRCAASAAPTTSVTQKLARHRDILHEYTQEFRRIKGNINSLREHAELLSSVRDDISEYKASGSMSPGVQVLRERASIHGSISHIDDVIGQAQATRAVLGSQRSLFSDVQGKVKNLGDKFPVIRGLLGSIKRKRSRDTLILSAVIAACTLFLIIYWLSK

SEQ ID NO: 21203 - DNA, 1056 bp, Arabidopsis thaliana
  misc_feature (1)..(1056): Ceres Seq. ID no. 12327020
  misc_feature (1)..(1056): Ortholog of  Ceres SEQ ID NO 12627215 as cited in SEQ ID NO 60976
  misc_feature (1)..(1056): Ortholog of  Ceres SEQ ID NO 15178542 as cited in SEQ ID NO 65410
  misc_feature (1)..(1056): Ortholog of  Ceres SEQ ID NO 12635657 as cited in SEQ ID NO 0
  misc_feature (1)..(1056): Ortholog of  Ceres SEQ ID NO 13599649 as cited in SEQ ID NO 0
  misc_feature (1)..(1056): Ortholog of  Ceres SEQ ID NO 14309404 as cited in SEQ ID NO 0
aaacttaaaaaacaaggctcgaggcggttctcttatctgcaaaactaaagactgttgtctaaagcgaaccaacaaaaagtcttcatctttaatcattcaatggcttcttcgtcttctatgcagatggttcacacttcccgctccattgcccagattgggttcggtgttaagtcgcaattagtttctgcaaatcgaacaactcaatcagtttgctttggagctcgttcctctggaattgcattatcttcgagattgcactatgcatcacccattaagcaattttctggggtttatgcgaccaccaagcatcagagaaccgcttgtgttaaatccatggctgctgaggaagaagaagtaatcgaacctcaagctaaagtgacaaacaaggtttactttgatgtggaaattggaggtgaagttgctggcagaattgtgatgggtctctttggagaagttgtgcctaaaaccgttgaaaacttccgtgccttgtgtactggtgagaagaaatacgggtacaagggttcctctttccatcgtattattaaggatttcatgatccaaggaggtgatttcaccgagggaaatggtactggaggtattagtatttacggtgccaagttcgaagatgaaaacttcaccctgaagcatactggacctggaatcttgagcatggcaaacgctggtcctaatactaatggaagccagtttttcatttgtaccgtcaagacttcatggttagataacaagcatgtcgtgtttggacaagtaattgaaggtatgaagcttgttaggactcttgagtctcaagagactcgcgctttcgatgttcccaagaaaggttgtagaatctatgcctgcggagagctcccgttagatgcttgataatcactattgaccgatgcattgtctttgccatctttgttctgttttttgctattatgactattgaggaatccaaaccatcaaaaagccaaagattttcaaattctggtcttttatttattatatatttcggatacatgagttataagttcttttaatcgatgtgggattctc

SEQ ID NO: 21204 - protein, 260 aa, Arabidopsis thaliana
  peptide (1)..(260): Ceres Seq. ID no. 12327021
MASSSSMQMVHTSRSIAQIGFGVKSQLVSANRTTQSVCFGARSSGIALSSRLHYASPIKQFSGVYATTKHQRTACVKSMAAEEEEVIEPQAKVTNKVYFDVEIGGEVAGRIVMGLFGEVVPKTVENFRALCTGEKKYGYKGSSFHRIIKDFMIQGGDFTEGNGTGGISIYGAKFEDENFTLKHTGPGILSMANAGPNTNGSQFFICTVKTSWLDNKHVVFGQVIEGMKLVRTLESQETRAFDVPKKGCRIYACGELPLDA

SEQ ID NO: 21205 - protein, 254 aa, Arabidopsis thaliana
  peptide (1)..(254): Ceres Seq. ID no. 12327022
MQMVHTSRSIAQIGFGVKSQLVSANRTTQSVCFGARSSGIALSSRLHYASPIKQFSGVYATTKHQRTACVKSMAAEEEEVIEPQAKVTNKVYFDVEIGGEVAGRIVMGLFGEVVPKTVENFRALCTGEKKYGYKGSSFHRIIKDFMIQGGDFTEGNGTGGISIYGAKFEDENFTLKHTGPGILSMANAGPNTNGSQFFICTVKTSWLDNKHVVFGQVIEGMKLVRTLESQETRAFDVPKKGCRIYACGELPLDA

SEQ ID NO: 21206 - protein, 252 aa, Arabidopsis thaliana
  peptide (1)..(252): Ceres Seq. ID no. 12327023
MVHTSRSIAQIGFGVKSQLVSANRTTQSVCFGARSSGIALSSRLHYASPIKQFSGVYATTKHQRTACVKSMAAEEEEVIEPQAKVTNKVYFDVEIGGEVAGRIVMGLFGEVVPKTVENFRALCTGEKKYGYKGSSFHRIIKDFMIQGGDFTEGNGTGGISIYGAKFEDENFTLKHTGPGILSMANAGPNTNGSQFFICTVKTSWLDNKHVVFGQVIEGMKLVRTLESQETRAFDVPKKGCRIYACGELPLDA

SEQ ID NO: 21207 - DNA, 727 bp, Arabidopsis thaliana
  misc_feature (1)..(727): Ceres Seq. ID no. 12420972
  misc_feature (1)..(727): Ortholog of  Ceres SEQ ID NO 12557737 as cited in SEQ ID NO 81
ctagtttaatgtcttggtataaaagcctatattttgcatttttcatccgactctctgcgttaggtttcattttagcggcagacgagagagcaaaagcaaggagaaaccctaaccatggcgacacaaccagctactgaatctgtgcaatgcttcggaaggaagaagaccgcagtggccgtcactcactgcaagcgtggatctggtttaattaagctcaacggttgcccaatcgagcttttccagccagagatcctccgattcaagatcttcgagccgattcttctcctcggaaagcaccgtttcgcaggtgtgaacatgaggatccgtgtcaacggtggtggtcacacatcacaggtttacgccatccgtcagagtatcgcgaaggctcttgttgcgtactaccagaagtatgtggatgagcagtcgaagaaggagattaaagatatcttggtgaggtatgataggactctgcttgtggcggatccgaggaggtgtgagccgaagaagtttggtggtcgtggtgctcgttctcgttaccagaagagttaccgttaaacaaagctggtttgtgttttgtttttcaatttcgattcatctcaaggtttttggagtttttgattatggacttgtgagactcttagaatttctgttttatgatttattggataactgtgattctccaagaacttatgtcttatatgattttgtcttcatttcgttgcttcct

SEQ ID NO: 21208 - protein, 146 aa, Arabidopsis thaliana [sequence omitted]

SEQ ID NO: 21209 - protein, 90 aa, Arabidopsis thaliana
  peptide (1)..(90): Ceres Seq. ID no. 12420974
MIGLCLWRIRGGVSRRSLVVVVLVLVTRRVTVKQSWFVFCFSISIHLKVFGVFDYGLVRLLEFLFYDLLDNCDSPRTYVLYDFVFISLLP

SEQ ID NO: 21210 - protein, 79 aa, Arabidopsis thaliana
  peptide (1)..(79): Ceres Seq. ID no. 12420975
MRIRVNGGGHTSQVYAIRQSIAKALVAYYQKYVDEQSKKEIKDILVRYDRTLLVADPRRCEPKKFGGRGARSRYQKSYR

SEQ ID NO: 21211 - DNA, 1041 bp, Arabidopsis thaliana
  misc_feature (1)..(1041): Ceres Seq. ID no. 12600744
  misc_feature (1)..(1041): Ortholog of  Ceres SEQ ID NO 13595072 as cited in SEQ ID NO 55971
gaaccagttttaatcactctcactcacaagttagtcataaaaaaaaaaaacacacaaaaaagtttcaatggccgcctcaacaatggctctctcctcccctgctttcgccggaaaggctgtgaacctttcccctgcggcatcagaagtccttggaagcggccgtgtgacaatgaggaagactgttgccaagccaaagggtccatcaggcagcccatggtacggatccgaccgagtcaagtacttgggtccattctctggcgagtcacccagctaccttaccggagagttccctggagactacggatgggacacagctggtctatccgctgaccccgagacattcgcaaggaaccgtgagctagaagttatccacagcaggtgggccatgctcggagccctaggctgcgtcttccctgaacttttggccaggaacggagtcaagtttggagaggcagtttggttcaaggctggttcacagatctttagcgatggagggctcgattacttgggaaaccctagcttggttcacgctcagagcattttggccatttgggccactcaagttatcttgatgggagccgttgaaggctacagagtcgcaggaaatgggccgttgggagaggccgaggacttgctttaccccggtggtagcttcgacccattgggtttggctaccgacccagaggcattcgctgagttgaaggtgaaggagctcaagaacggaagattggctatgttctctatgtttggattcttcgttcaagccatcgtcactggtaagggaccgatagagaaccttgctgaccatttggccgatccagtcaacaacaacgcttgggcctttgccaccaactttgttcccggaaagtgagccaagttctatctgtttgtaatttacttttctttcaatcttttgaattcgagtgagagacaggaggagaaagagtaggtttgtgtttgtggtggatggtagagactttcagatgtaaatttgcaaagactttgtatgatttgtcattaatcaaataactcattgttctc

SEQ ID NO: 21212 - protein, 267 aa, Arabidopsis thaliana
  peptide (1)..(267): Ceres Seq. ID no. 12600745
MAASTMALSSPAFAGKAVNLSPAASEVLGSGRVTMRKTVAKPKGPSGSPWYGSDRVKYLGPFSGESPSYLTGEFPGDYGWDTAGLSADPETFARNRELEVIHSRWAMLGALGCVFPELLARNGVKFGEAVWFKAGSQIFSDGGLDYLGNPSLVHAQSILAIWATQVILMGAVEGYRVAGNGPLGEAEDLLYPGGSFDPLGLATDPEAFAELKVKELKNGRLAMFSMFGFFVQAIVTGKGPIENLADHLADPVNNNAWAFATNFVPGK

SEQ ID NO: 21213 - protein, 262 aa, Arabidopsis thaliana
  peptide (1)..(262): Ceres Seq. ID no. 12600746
MALSSPAFAGKAVNLSPAASEVLGSGRVTMRKTVAKPKGPSGSPWYGSDRVKYLGPFSGESPSYLTGEFPGDYGWDTAGLSADPETFARNRELEVIHSRWAMLGALGCVFPELLARNGVKFGEAVWFKAGSQIFSDGGLDYLGNPSLVHAQSILAIWATQVILMGAVEGYRVAGNGPLGEAEDLLYPGGSFDPLGLATDPEAFAELKVKELKNGRLAMFSMFGFFVQAIVTGKGPIENLADHLADPVNNNAWAFATNFVPGK

SEQ ID NO: 21214 - protein, 233 aa, Arabidopsis thaliana
  peptide (1)..(233): Ceres Seq. ID no. 12600747
MRKTVAKPKGPSGSPWYGSDRVKYLGPFSGESPSYLTGEFPGDYGWDTAGLSADPETFARNRELEVIHSRWAMLGALGCVFPELLARNGVKFGEAVWFKAGSQIFSDGGLDYLGNPSLVHAQSILAIWATQVILMGAVEGYRVAGNGPLGEAEDLLYPGGSFDPLGLATDPEAFAELKVKELKNGRLAMFSMFGFFVQAIVTGKGPIENLADHLADPVNNNAWAFATNFVPGK

SEQ ID NO: 21215 - DNA, 1128 bp, Arabidopsis thaliana
  misc_feature (1)..(1128): Ceres Seq. ID no. 12327330
  misc_feature (1)..(1128): Ortholog of  Ceres SEQ ID NO 12609314 as cited in SEQ ID NO 51796
  misc_feature (1)..(1128): Ortholog of  Ceres SEQ ID NO 15226254 as cited in SEQ ID NO 68176
atttttttgcatagaagagagagaggcggagagagaggaaagtgaagaagcaatcgtgagagactctctcgagtcttccctgagtcactcctctcctctcacacctttttgcttcgcgattaagagtcagagagagagagatagtaaacatcgaacgtcttccatttcatcttccttcgattaccttgttagggttttgtattttggcttctggattcttcttcactatgcataagttgagcagaagcaaccgtgacaaacttcagcagttcgtggctatcacaggagctagtgagaagaatgctcttcaggctctcaaagccagtgattggcaccttgaagcagcgtttgatgtgttttacagccagcctcaaccaagaagcaatgctgctgaagtaagacgcttggaggagctctacaatagatataaagacccgtattctgatatgattcttgcggagggtatctcggttctgtgtaatgatcttgaggtggaaccgcaagacatagtcacgttggttctttcgtggcatatgaatgctgcaacagcgtgtgagttttccaggcaagaatttatcagtggattacaggcattaggtgtagattcaatcgggaagttgcaggaaaagctgccatttatgcgttctgagcttaaagatgaacaaaagttccatgagatatacaactttgcttttgggtgggcgaaagagaaggggcagaaatctcttgccttagacacagcgattgggatgtggcagttgctctttgcagaaagagagtggcctttggtaactcactggtgtgatttcttgcaggatcgtcataacaaggccatatctaaggacacatgggcacagctactggaattttcaaggatggtcgacccagtgctgtcgaattacgatgcagaaggagcatggccttacctgattgatgaattcgttgagtatttgtatgacaaaaatgtcgttgagaagtgaccagccaactgggagaagtaatcaactctatttgacaatgttcctttcttctcattattttaaatagacttgcttatctcacagatttttctattgtgtttgtcagaatctttaaattgatgattaaataagtaagcttttcaacctc

SEQ ID NO: 21216 - protein, 250 aa, Arabidopsis thaliana
  peptide (1)..(250): Ceres Seq. ID no. 12327331
MHKLSRSNRDKLQQFVAITGASEKNALQALKASDWHLEAAFDVFYSQPQPRSNAAEVRRLEELYNRYKDPYSDMILAEGISVLCNDLEVEPQDIVTLVLSWHMNAATACEFSRQEFISGLQALGVDSIGKLQEKLPFMRSELKDEQKFHEIYNFAFGWAKEKGQKSLALDTAIGMWQLLFAEREWPLVTHWCDFLQDRHNKAISKDTWAQLLEFSRMVDPVLSNYDAEGAWPYLIDEFVEYLYDKNVVEK

SEQ ID NO: 21217 - protein, 177 aa, Arabidopsis thaliana
  peptide (1)..(177): Ceres Seq. ID no. 12327332
MILAEGISVLCNDLEVEPQDIVTLVLSWHMNAATACEFSRQEFISGLQALGVDSIGKLQEKLPFMRSELKDEQKFHEIYNFAFGWAKEKGQKSLALDTAIGMWQLLFAEREWPLVTHWCDFLQDRHNKAISKDTWAQLLEFSRMVDPVLSNYDAEGAWPYLIDEFVEYLYDKNVVEK

SEQ ID NO: 21218 - protein, 148 aa, Arabidopsis thaliana
  peptide (1)..(148): Ceres Seq. ID no. 12327333
MNAATACEFSRQEFISGLQALGVDSIGKLQEKLPFMRSELKDEQKFHEIYNFAFGWAKEKGQKSLALDTAIGMWQLLFAEREWPLVTHWCDFLQDRHNKAISKDTWAQLLEFSRMVDPVLSNYDAEGAWPYLIDEFVEYLYDKNVVEK

SEQ ID NO: 21219 - DNA, 1159 bp, Arabidopsis thaliana
  misc_feature (1)..(1159): Ceres Seq. ID no. 12324408
  misc_feature (1)..(1159): Ortholog of  Ceres SEQ ID NO 13638441 as cited in SEQ ID NO 58066
accacacgattaaaccaaagagaagagagagagagagagaaacagagaagaaaagattgaagcaatcgaatggagagtgtggtggcaacatggagcagagaagaagagaaagcattcgagaacgcaattgcgttgcattgtgtagaggaagagataacagaggatcaatggaacaaaatgtcgtcaatggtaccaagcaaagccttagaagaagtaaagaaacattaccaaatccttttagaagatgtcaaagcaatcgagaatggtcaagttcctttacctcgttatcatcaccgcaaaggtctcatcgtagatgaagcagcagcagcagctacttctcctgccaacagagactctcattcctctggatcatctgagaagaaaccaaatcctggcacctccgggataagtagctccaatggaggaagaagtggtggctcgagagctgagcaagagagaagaaaagggattccatggactgaagaagagcatcggttgtttcttttgggtttggacaagtttgggaaaggagattggagaagcatttcaaggaactttgtgatctcaagaactccaacacaagttgcaagtcatgctcaaaaatacttcatcaggcttaactcgatgaaccgagatagaaggcggtctagcattcacgacatcaccactgtgaacaatcaagctcctgcggttacaggaggaggacaacaaccgcaagtggttaaacatagaccagctcagccacaaccacagccacaaccgcaaccacaacaacatcatcccccaacaatggctggattagggatgtatggtggtgcgccagtgggacaaccgatcatcgcaccacctgatcatatgggttcagctgttggaacacctgtgatgcttccacctccaatgggaactcatcatcatcaccatcaccatcatcttggagttgctccttatgctgtaccggcttatccggtaccgccattaccgcagcaacatccagctccgtcgacaatgcactgactgaaaacaatacagttggtattaaaactgacatatattgtactgaaaacttgtgtacattctcaaatcgaatagcgaaactgcggcaaataataatgtacagcagaggaatctgtttttccatttcaaatctatgattttcttc

SEQ ID NO: 21220 - protein, 314 aa, Arabidopsis thaliana
  peptide (1)..(314): Ceres Seq. ID no. 12324409
MESVVATWSREEEKAFENAIALHCVEEEITEDQWNKMSSMVPSKALEEVKKHYQILLEDVKAIENGQVPLPRYHHRKGLIVDEAAAAATSPANRDSHSSGSSEKKPNPGTSGISSSNGGRSGGSRAEQERRKGIPWTEEEHRLFLLGLDKFGKGDWRSISRNFVISRTPTQVASHAQKYFIRLNSMNRDRRRSSIHDITTVNNQAPAVTGGGQQPQVVKHRPAQPQPQPQPQPQQHHPPTMAGLGMYGGAPVGQPIIAPPDHMGSAVGTPVMLPPPMGTHHHHHHHHLGVAPYAVPAYPVPPLPQQHPAPSTMH

SEQ ID NO: 21221 - protein, 278 aa, Arabidopsis thaliana
  peptide (1)..(278): Ceres Seq. ID no. 12324410
MSSMVPSKALEEVKKHYQILLEDVKAIENGQVPLPRYHHRKGLIVDEAAAAATSPANRDSHSSGSSEKKPNPGTSGISSSNGGRSGGSRAEQERRKGIPWTEEEHRLFLLGLDKFGKGDWRSISRNFVISRTPTQVASHAQKYFIRLNSMNRDRRRSSIHDITTVNNQAPAVTGGGQQPQVVKHRPAQPQPQPQPQPQQHHPPTMAGLGMYGGAPVGQPIIAPPDHMGSAVGTPVMLPPPMGTHHHHHHHHLGVAPYAVPAYPVPPLPQQHPAPSTMH

SEQ ID NO: 21222 - protein, 275 aa, Arabidopsis thaliana
  peptide (1)..(275): Ceres Seq. ID no. 12324411
MVPSKALEEVKKHYQILLEDVKAIENGQVPLPRYHHRKGLIVDEAAAAATSPANRDSHSSGSSEKKPNPGTSGISSSNGGRSGGSRAEQERRKGIPWTEEEHRLFLLGLDKFGKGDWRSISRNFVISRTPTQVASHAQKYFIRLNSMNRDRRRSSIHDITTVNNQAPAVTGGGQQPQVVKHRPAQPQPQPQPQPQQHHPPTMAGLGMYGGAPVGQPIIAPPDHMGSAVGTPVMLPPPMGTHHHHHHHHLGVAPYAVPAYPVPPLPQQHPAPSTMH

SEQ ID NO: 21223 - DNA, 1581 bp, Arabidopsis thaliana
  misc_feature (1)..(1581): Ceres Seq. ID no. 12325301
  misc_feature (1)..(1581): Ortholog of  Ceres SEQ ID NO 14314464 as cited in SEQ ID NO 52405
  misc_feature (1)..(1581): Ortholog of  Ceres SEQ ID NO 15177592 as cited in SEQ ID NO 58436
  misc_feature (1)..(1581): Ortholog of  Ceres SEQ ID NO 13655251 as cited in SEQ ID NO 62888
  misc_feature (1)..(1581): Ortholog of  Ceres SEQ ID NO 13597194 as cited in SEQ ID NO 63661
  misc_feature (1)..(1581): Ortholog of  Ceres SEQ ID NO 14302883 as cited in SEQ ID NO 66384
  misc_feature (1)..(1581): Ortholog of  Ceres SEQ ID NO 13662855 as cited in SEQ ID NO 69059
ataccggaaatatcgtaccgtcttcctaaaataggaaatgtagcattacggagaaagacagataagctctctctgttctcttgccacacttcccaatacatggatccattttgacgtcatcttcatcttcaatcactatcactatctctctattatataaatctcttcatacccttttaccgatccttcaccgtgatcgtttaatcagacctcaatttcgttgttaaagaacaaagctttaagcagccatggatccaaaccaacgtatcgcgagaatctctgctcatctcaatcctcctaatcttcataatcagattgctgacgggtcaggtttgaatcgggtggcttgtcgggcaaaaggtggatcacccggattcaaagtggcgatacttggagcagctggtggaattggacaacctcttgcgatgttgatgaagatgaatcctttggtttcggttcttcatctctatgatgttgctaatgctcctggtgttactgctgatattagtcatatggatactagtgccgttgttcgtggatttctcgggcagccgcagttagaggaagcacttacgggtatggatttagtgatcatacctgctggtgttccgaggaaaccagggatgacgagggatgatctgtttaacattaatgctgggattgtgaagacactctctgaagctatagctaaatgttgtcctaaagcaattgtgaatataatcagtaatccggtgaactccacggtgccaatcgcagctgaggttttcaagaaagctggaacctttgatccaaagaaactcatgggtgtcactatgcttgatgttgttagagctaatacttttgtggcggaagtaatgagtcttgatccccgtgaagttgaagttccggttgttggaggacacgcaggagttacgattttaccactgctttcgcaggtgaaacctccttgctcgttcactcaaaaagagattgaatatctcacagaccgcatccaaaacggtggcactgaagttgttgaggctaaagctggagcaggttctgcaacactatccatggcatatgcagcagtggagtttgcagatgcttgcctcaggggtctacgaggtgatgcaaacatcgttgagtgcgcatatgtggcatcccatgtgactgagcttcccttcttcgcatcgaaggtgcgtctgggacgatgtgggatcgatgaagtgtacggccttggaccattgaacgaatatgagaggatgggattagagaaggcaaagaaagagctttcagtaagtattcataaaggtgttacctttgcgaagaaataaagagactcgatcgtgaataaacacacttaagtgatggttttggaatagtcagagttttggaataagaataacgcctcacaataaaagctcttgcgggttttcttggatccgatcctaaagcttcaaaaaactcaactcctttaggtaaaatcttcgattgttttatcgttccatcgaaccactttgttcttagatacaagaacgtttatgatttatgtagttgggttataaaagtgagaacagagcaataatcttgcaacattttttc

SEQ ID NO: 21224 - protein, 354 aa, Arabidopsis thaliana
  peptide (1)..(354): Ceres Seq. ID no. 12325302
MDPNQRIARISAHLNPPNLHNQIADGSGLNRVACRAKGGSPGFKVAILGAAGGIGQPLAMLMKMNPLVSVLHLYDVANAPGVTADISHMDTSAVVRGFLGQPQLEEALTGMDLVIIPAGVPRKPGMTRDDLFNINAGIVKTLSEAIAKCCPKAIVNIISNPVNSTVPIAAEVFKKAGTFDPKKLMGVTMLDVVRANTFVAEVMSLDPREVEVPVVGGHAGVTILPLLSQVKPPCSFTQKEIEYLTDRIQNGGTEVVEAKAGAGSATLSMAYAAVEFADACLRGLRGDANIVECAYVASHVTELPFFASKVRLGRCGIDEVYGLGPLNEYERMGLEKAKKELSVSIHKGVTFAKK

SEQ ID NO: 21225 - protein, 295 aa, Arabidopsis thaliana
  peptide (1)..(295): Ceres Seq. ID no. 12325303
MLMKMNPLVSVLHLYDVANAPGVTADISHMDTSAVVRGFLGQPQLEEALTGMDLVIIPAGVPRKPGMTRDDLFNINAGIVKTLSEAIAKCCPKAIVNIISNPVNSTVPIAAEVFKKAGTFDPKKLMGVTMLDVVRANTFVAEVMSLDPREVEVPVVGGHAGVTILPLLSQVKPPCSFTQKEIEYLTDRIQNGGTEVVEAKAGAGSATLSMAYAAVEFADACLRGLRGDANIVECAYVASHVTELPFFASKVRLGRCGIDEVYGLGPLNEYERMGLEKAKKELSVSIHKGVTFAKK

SEQ ID NO: 21226 - protein, 293 aa, Arabidopsis thaliana
  peptide (1)..(293): Ceres Seq. ID no. 12325304
MKMNPLVSVLHLYDVANAPGVTADISHMDTSAVVRGFLGQPQLEEALTGMDLVIIPAGVPRKPGMTRDDLFNINAGIVKTLSEAIAKCCPKAIVNIISNPVNSTVPIAAEVFKKAGTFDPKKLMGVTMLDVVRANTFVAEVMSLDPREVEVPVVGGHAGVTILPLLSQVKPPCSFTQKEIEYLTDRIQNGGTEVVEAKAGAGSATLSMAYAAVEFADACLRGLRGDANIVECAYVASHVTELPFFASKVRLGRCGIDEVYGLGPLNEYERMGLEKAKKELSVSIHKGVTFAKK

SEQ ID NO: 21227 - DNA, 1721 bp, Arabidopsis thaliana
  misc_feature (1)..(1721): Ceres Seq. ID no. 12329109
  misc_feature (1)..(1721): Ortholog of  Ceres SEQ ID NO 14303850 as cited in SEQ ID NO 53464
  misc_feature (1)..(1721): Ortholog of  Ceres SEQ ID NO 15176262 as cited in SEQ ID NO 54751
  misc_feature (1)..(1721): Ortholog of  Ceres SEQ ID NO 13656177 as cited in SEQ ID NO 64997
aaaaaaactctttcggatattccaccagtctctcgcaatcttcgctcttctctttgctctctctctctcaacgcggttcagatccgagtttgggagattcaagctccctgaaaaaagccctttactctcgcttaccaactttgctccagcatggcaggatctgcaccagaaggcacacagtttgatgcacgtcagtttgaccagaaactcaatgaagtacttgagggacaagatgagttcttcacatcctatgatgatgttcatgagagctttgatgccatgggtcttcaagagaaccttctcaggggtatttatgcttatggttttgagaagccttctgctattcagcaaagaggaatcgtccccttctgtaagggtcttgatgtgattcaacaggctcagtctggtactgggaaaacagcaactttctgctctggtgtcttgcagcagctggacttctcccttatccagtgtcaggctttggttctagctccaactagagagcttgctcagcaaattgagaaggtcatgagggcccttggtgattaccttggtgtcaaggttcacgcctgtgttggtggaaccagtgtccgtgaggatcagcgcatcctccaagctggtgtccatgttgttgttggaactccagggcgtgtctttgacatgttgaagaggcagtctcttcgtgctgacaacatcaagatgtttgttctcgatgaagctgatgaaatgctctcccgtggtttcaaggaccagatctatgacatattccagcttcttccaccaaagatccaagttggtgtgttctccgcaacaatgccaccagaagctcttgagatcacaaggaagttcatgagcaagccagtgagaatcttggtgaagcgtgatgagcttacccttgaaggtatcaagcagttctacgtcaacgttgagaaagaagagtggaagctcgagacactctgtgatctctacgagactcttgccatcactcagagtgtcatcttcgtgaacaccaggcgtaaggttgattggctcacagacaaaatgagaagccgtgaccacacagtctctgcaactcacggagacatggaccagaacaccagggacatcatcatgagagagttcaggtctggttcctcccgtgttctcatcaccactgacctcttagctcgtggtattgatgtccaacaagtctccctggttatcaacttcgatctcccaactcagccagagaactaccttcaccgtatcggaagaagtggaaggttcgggagaaagggtgttgcgatcaatttcgtgacccgtgatgatgagaggatgctgtttgatattcagaaattctacaatgtggttgtcgaagagctgccttcgaacgtggccgatctgctgtgaagggagaaaagaagtcggttctgttgctgtgtttgctctgccgtactagtatcaccggagaagaaaggttttcttgttttgcaaggcactctttgatctgattttgacccgtcgtctatcagcgatttacatttcttaaattttcttagttgttgttctctcctctctctcccagctacgaacatatctctctcttcttgaccatttttaagtttaagtcatatggagtatttatttcttcactattttaatattcggctttgttgtttgtctttgatttttgtatcaatcaaatcttttcatcaaagtttggttttaagctttttcaaatc

SEQ ID NO: 21228 - protein, 412 aa, Arabidopsis thaliana
  peptide (1)..(412): Ceres Seq. ID no. 12329110
MAGSAPEGTQFDARQFDQKLNEVLEGQDEFFTSYDDVHESFDAMGLQENLLRGIYAYGFEKPSAIQQRGIVPFCKGLDVIQQAQSGTGKTATFCSGVLQQLDFSLIQCQALVLAPTRELAQQIEKVMRALGDYLGVKVHACVGGTSVREDQRILQAGVHVVVGTPGRVFDMLKRQSLRADNIKMFVLDEADEMLSRGFKDQIYDIFQLLPPKIQVGVFSATMPPEALEITRKFMSKPVRILVKRDELTLEGIKQFYVNVEKEEWKLETLCDLYETLAITQSVIFVNTRRKVDWLTDKMRSRDHTVSATHGDMDQNTRDIIMREFRSGSSRVLITTDLLARGIDVQQVSLVINFDLPTQPENYLHRIGRSGRFGRKGVAINFVTRDDERMLFDIQKFYNVVVEELPSNVADLL

SEQ ID NO: 21229 - protein, 369 aa, Arabidopsis thaliana
  peptide (1)..(369): Ceres Seq. ID no. 12329111
MGLQENLLRGIYAYGFEKPSAIQQRGIVPFCKGLDVIQQAQSGTGKTATFCSGVLQQLDFSLIQCQALVLAPTRELAQQIEKVMRALGDYLGVKVHACVGGTSVREDQRILQAGVHVVVGTPGRVFDMLKRQSLRADNIKMFVLDEADEMLSRGFKDQIYDIFQLLPPKIQVGVFSATMPPEALEITRKFMSKPVRILVKRDELTLEGIKQFYVNVEKEEWKLETLCDLYETLAITQSVIFVNTRRKVDWLTDKMRSRDHTVSATHGDMDQNTRDIIMREFRSGSSRVLITTDLLARGIDVQQVSLVINFDLPTQPENYLHRIGRSGRFGRKGVAINFVTRDDERMLFDIQKFYNVVVEELPSNVADLL

SEQ ID NO: 21230 - protein, 286 aa, Arabidopsis thaliana
  peptide (1)..(286): Ceres Seq. ID no. 12329112
MRALGDYLGVKVHACVGGTSVREDQRILQAGVHVVVGTPGRVFDMLKRQSLRADNIKMFVLDEADEMLSRGFKDQIYDIFQLLPPKIQVGVFSATMPPEALEITRKFMSKPVRILVKRDELTLEGIKQFYVNVEKEEWKLETLCDLYETLAITQSVIFVNTRRKVDWLTDKMRSRDHTVSATHGDMDQNTRDIIMREFRSGSSRVLITTDLLARGIDVQQVSLVINFDLPTQPENYLHRIGRSGRFGRKGVAINFVTRDDERMLFDIQKFYNVVVEELPSNVADLL

SEQ ID NO: 21231 - DNA, 1175 bp, Arabidopsis thaliana
  misc_feature (1)..(1175): Ceres Seq. ID no. 13487882
  misc_feature (1)..(1175): Ortholog of  Ceres SEQ ID NO 12582736 as cited in SEQ ID NO 51489
  misc_feature (1)..(1175): Ortholog of  Ceres SEQ ID NO 13658622 as cited in SEQ ID NO 60780
agccaccaccgcacatctctctcctttgccctcgttttttttcggttctcgtctttcgttcttcacttttagacaagcaaatatgagacccccagttacaggaggacgtggtggtggaggattcagaggtggaagagatggtggtggaagaggttttggaggtggaagaagctttggaggaggccgtagtggtgacagaggccgtagtgggcctcgcggcagaggacgtggtgcgcctcgtggtcgtcgaggaccacctcgtggaggaatgaaaggaggaagcaaagtgattgttgagcctcacagacatgcgggagtgtttattgctaaaggtaaagaagatgctcttgtcactaagaatttggttcctggtgaagctgtttacaatgagaagagaatctctgttcagaatgaagatggaactaaggttgaatacagagtttggaatccgtttagatctaagttagctgctgcaattcttggtggtgtcgacaacatttggatcaaacctggtgccaaagttctttacttgggtgctgcttctgggaccactgtctctcatgtttctgacctcgttggccctgagggatgtgtttatgctgttgagttttctcatagaagtggtagagatttggtgaacatggccaagaagagaactaacgttattccaatcattgaagatgctagacatccggctaagtacagaatgctcgtgggcatggttgatgtcatattctctgatgttgctcagccagatcaggcaagaatcttggccctgaatgcctcatttttcctcaaaactggtggacactttgttatctcaatcaaggccaactgtatcgactctacagttgcagcagaagcagtcttccagagcgaggtgaagaagttgcaacaagagcagtttaaaccagcagaacaggtgactctcgagccgtttgagcgtgaccatgcctgtgttgttggtggttaccgcatgcccaagaaacaaaaagccccagcctcatagaggaactgtggacagtagtacctgtgtattaagacttatttactgggttttgtttttatctcttcgcttgttgtattaagctagagatggataatgcttttatgtctcatttggaaattttattctcgtttaagaactaatatatattgatgcaacattttcgtcc

SEQ ID NO: 21232 - protein, 335 aa, Arabidopsis thaliana
  peptide (1)..(335): Ceres Seq. ID no. 15219230
ATTAHLSPLPSFFFGSRLSFFTFRQANMRPPVTGGRGGGGFRGGRDGGGRGFGGGRSFGGGRSGDRGRSGPRGRGRGAPRGRRGPPRGGMKGGSKVIVEPHRHAGVFIAKGKEDALVTKNLVPGEAVYNEKRISVQNEDGTKVEYRVWNPFRSKLAAAILGGVDNIWIKPGAKVLYLGAASGTTVSHVSDLVGPEGCVYAVEFSHRSGRDLVNMAKKRTNVIPIIEDARHPAKYRMLVGMVDVIFSDVAQPDQARILALNASFFLKTGGHFVISIKANCIDSTVAAEAVFQSEVKKLQQEQFKPAEQVTLEPFERDHACVVGGYRMPKKQKAPAS

SEQ ID NO: 21233 - protein, 308 aa, Arabidopsis thaliana
  peptide (1)..(308): Ceres Seq. ID no. 15219231
MRPPVTGGRGGGGFRGGRDGGGRGFGGGRSFGGGRSGDRGRSGPRGRGRGAPRGRRGPPRGGMKGGSKVIVEPHRHAGVFIAKGKEDALVTKNLVPGEAVYNEKRISVQNEDGTKVEYRVWNPFRSKLAAAILGGVDNIWIKPGAKVLYLGAASGTTVSHVSDLVGPEGCVYAVEFSHRSGRDLVNMAKKRTNVIPIIEDARHPAKYRMLVGMVDVIFSDVAQPDQARILALNASFFLKTGGHFVISIKANCIDSTVAAEAVFQSEVKKLQQEQFKPAEQVTLEPFERDHACVVGGYRMPKKQKAPAS

SEQ ID NO: 21234 - protein, 246 aa, Arabidopsis thaliana
  peptide (1)..(246): Ceres Seq. ID no. 15219232
MKGGSKVIVEPHRHAGVFIAKGKEDALVTKNLVPGEAVYNEKRISVQNEDGTKVEYRVWNPFRSKLAAAILGGVDNIWIKPGAKVLYLGAASGTTVSHVSDLVGPEGCVYAVEFSHRSGRDLVNMAKKRTNVIPIIEDARHPAKYRMLVGMVDVIFSDVAQPDQARILALNASFFLKTGGHFVISIKANCIDSTVAAEAVFQSEVKKLQQEQFKPAEQVTLEPFERDHACVVGGYRMPKKQKAPAS

SEQ ID NO: 21235 - DNA, 1207 bp, Arabidopsis thaliana
  misc_feature (1)..(1207): Ceres Seq. ID no. 12324520
  misc_feature (1)..(1207): Ortholog of  Ceres SEQ ID NO 13637842 as cited in SEQ ID NO 54650
  misc_feature (1)..(1207): Ortholog of  Ceres SEQ ID NO 12608127 as cited in SEQ ID NO 57579
  misc_feature (1)..(1207): Ortholog of  Ceres SEQ ID NO 12634558 as cited in SEQ ID NO 0
  misc_feature (1)..(1207): Ortholog of  Ceres SEQ ID NO 15180294 as cited in SEQ ID NO 0
aaattgcccaaaaagaaacagaaacttttctccgagaatcctcatttctccgttgaaaaaaggaccttgagaggaaatgtttcacttttctagggttcttataatccacttccgcatcattggagaatggaaaatctcctcttctctttgatatttcttcggatttcgcttatgtcctgaatctcttgaagacccaattgaaaaaatctcactttttttctcccggcgtttccggcgatatacaatgcggattctcgtgaatctcattctcttctccttgattcctctggcgttctccaatgaaaactccagctcgtatctcattgcgcgaccattgatcttcgaaacccagctcaagaacataaacgacaatgtcaatctacattgcacgagctggagattcgcggcggagacaaacaatctcgctccatggaaaaccattccagctgaatgcgccgattacgtgaaagattacctgatgggtgaaggttacgtcgtcgatgtggagagagtctccgaagaagctaaggtttacgcgagcagcttcgaatctaacggtgacgggaaagacatttggattttcgatattgatgagacgttattgtcgaatcttccttattacatggaacacggttgtgggttggaagtttttgatcattcaaagtttgatatgtgggtagagaaagggatagcacctgctatagcaccaagcttgaagctttaccaaaaggttatacatttggggtacaaagttatcttgcttacagggcgtagagagaaccaccgggttatcactgtcgaaaacctgcgcaatgccggtttccataactgggacaagcttattctgagatcgttggatgatcggaacaaaacagcgaccatgtacaagtcagagaagagagaggagatggtgaaagaagggtataggatcagaggcaattcaggtgaccaatggagtgatttgttgggttctgcaatgtcagaaagatccttcaaacttccaaatccaatgtattatatcccctgaaggggatcaactagaatcaggaggcaattcaggttactaattggagcaacctactgttttggaagtttgggttgcaataaatatatgtactaatgactgcatcggcttgagtgtctaaatttgtaacttattgaaaactttttgtggttgaagacaaatccagttaaccgacatgagttt

SEQ ID NO: 21236 - protein, 260 aa, Arabidopsis thaliana
  peptide (1)..(260): Ceres Seq. ID no. 12324521
MRILVNLILFSLIPLAFSNENSSSYLIARPLIFETQLKNINDNVNLHCTSWRFAAETNNLAPWKTIPAECADYVKDYLMGEGYVVDVERVSEEAKVYASSFESNGDGKDIWIFDIDETLLSNLPYYMEHGCGLEVFDHSKFDMWVEKGIAPAIAPSLKLYQKVIHLGYKVILLTGRRENHRVITVENLRNAGFHNWDKLILRSLDDRNKTATMYKSEKREEMVKEGYRIRGNSGDQWSDLLGSAMSERSFKLPNPMYYIP

SEQ ID NO: 21237 - protein, 182 aa, Arabidopsis thaliana
  peptide (1)..(182): Ceres Seq. ID no. 12324522
MGEGYVVDVERVSEEAKVYASSFESNGDGKDIWIFDIDETLLSNLPYYMEHGCGLEVFDHSKFDMWVEKGIAPAIAPSLKLYQKVIHLGYKVILLTGRRENHRVITVENLRNAGFHNWDKLILRSLDDRNKTATMYKSEKREEMVKEGYRIRGNSGDQWSDLLGSAMSERSFKLPNPMYYIP

SEQ ID NO: 21238 - protein, 134 aa, Arabidopsis thaliana
  peptide (1)..(134): Ceres Seq. ID no. 12324523
MEHGCGLEVFDHSKFDMWVEKGIAPAIAPSLKLYQKVIHLGYKVILLTGRRENHRVITVENLRNAGFHNWDKLILRSLDDRNKTATMYKSEKREEMVKEGYRIRGNSGDQWSDLLGSAMSERSFKLPNPMYYIP

SEQ ID NO: 21239 - DNA, 1282 bp, Arabidopsis thaliana
  misc_feature (1)..(1282): Ceres Seq. ID no. 12674392
  misc_feature (1)..(1282): Ortholog of  Ceres SEQ ID NO 13595556 as cited in SEQ ID NO 56727
aagaccttgcgctagaagaacagtttcggctttgttttgttcaattctcacctcaccccggacagagtccaaaacaacggtttatttcttgcgtttgtcgggaaatcagagttgagtataataaacacccttcacgacattctttgcttgtccaccttggtatctgaaattgggggactcttattataaaagatatgatgatttgttactctccaattacaacatgttctaggaatgctatcagtatcaagaggcatttaggctctcgcctctacggcgttgtggctcacggatcatctaaattctcctgctacagtcttttatcaggactttcaagaagacattataccggttttcgtgtatcggtctctaatagaccttctagttggcacgataaaggactttttgggtcagtattgatcaatcgaccaactgttgctcctaaggaaaagcttgaagtttctttcttgtcccctgaggctaatatgaaatgctcgaagatagaatctaacatgagaaatctctattgttattcaagatttgcatatacaggtgtgattgttagcttgcttgtttgttattcttcgacttcccaatcagcgtacgcagattcttcaagggataaagatgctaacaacgtgcatcatcattcgtctgatggtaaattccacaatgggaaaagagtttatactgattactctatcattggtattccgggggatggcagatgtttgtttcgttctgtagctcacggattctgcttacgctctgggaaactagctccaggcgagaagatgcagagagaactcgctgacgaattacgtaccagggttgctgatgagtttatccaaagaagacaggaaacagaatggttcgtggaaggagatttcgacacctacgtcagacaaattcgggatccacacgtgtggggaggtgaacctgaactcttcatggcttcacacgttctccagatgccaatcacagtgtatatgaaagacgataaagctggaggactgataagtattgcagaatatggtcaagaatacggtaaagacgacccaatccgagtcctataccatggttttggtcattacgatgcccttttgcttcacgagagtaaagcttcgattccaaaatctaaactttagtatacttagttttgcatctttgacttttgtcaggtgttgatgatgtttttgtttactgacacaaccactatctgtatgccttgtagaatgtaacctttttttaccttttactttgaataaaaattttcagtttc

SEQ ID NO: 21240 - protein, 317 aa, Arabidopsis thaliana
  peptide (1)..(317): Ceres Seq. ID no. 12674393
MMICYSPITTCSRNAISIKRHLGSRLYGVVAHGSSKFSCYSLLSGLSRRHYTGFRVSVSNRPSSWHDKGLFGSVLINRPTVAPKEKLEVSFLSPEANMKCSKIESNMRNLYCYSRFAYTGVIVSLLVCYSSTSQSAYADSSRDKDANNVHHHSSDGKFHNGKRVYTDYSIIGIPGDGRCLFRSVAHGFCLRSGKLAPGEKMQRELADELRTRVADEFIQRRQETEWFVEGDFDTYVRQIRDPHVWGGEPELFMASHVLQMPITVYMKDDKAGGLISIAEYGQEYGKDDPIRVLYHGFGHYDALLLHESKASIPKSKL

SEQ ID NO: 21241 - protein, 316 aa, Arabidopsis thaliana
  peptide (1)..(316): Ceres Seq. ID no. 12674394
MICYSPITTCSRNAISIKRHLGSRLYGVVAHGSSKFSCYSLLSGLSRRHYTGFRVSVSNRPSSWHDKGLFGSVLINRPTVAPKEKLEVSFLSPEANMKCSKIESNMRNLYCYSRFAYTGVIVSLLVCYSSTSQSAYADSSRDKDANNVHHHSSDGKFHNGKRVYTDYSIIGIPGDGRCLFRSVAHGFCLRSGKLAPGEKMQRELADELRTRVADEFIQRRQETEWFVEGDFDTYVRQIRDPHVWGGEPELFMASHVLQMPITVYMKDDKAGGLISIAEYGQEYGKDDPIRVLYHGFGHYDALLLHESKASIPKSKL

SEQ ID NO: 21242 - protein, 220 aa, Arabidopsis thaliana
  peptide (1)..(220): Ceres Seq. ID no. 12674395
MKCSKIESNMRNLYCYSRFAYTGVIVSLLVCYSSTSQSAYADSSRDKDANNVHHHSSDGKFHNGKRVYTDYSIIGIPGDGRCLFRSVAHGFCLRSGKLAPGEKMQRELADELRTRVADEFIQRRQETEWFVEGDFDTYVRQIRDPHVWGGEPELFMASHVLQMPITVYMKDDKAGGLISIAEYGQEYGKDDPIRVLYHGFGHYDALLLHESKASIPKSKL

SEQ ID NO: 21243 - DNA, 1639 bp, Arabidopsis thaliana
  misc_feature (1)..(1639): Ceres Seq. ID no. 12334814
  misc_feature (1)..(1639): Ortholog of  Ceres SEQ ID NO 13597446 as cited in SEQ ID NO 64098
  misc_feature (1)..(1639): Ortholog of  Ceres SEQ ID NO 15226246 as cited in SEQ ID NO 68314
attaaagaaatgggtaatggtagtcgtgtatagaatcgagagagaggtgtgtatagaaacgagaggcgaagattgcatcgaacggcgaaatcgggcctacagtaatcccaaattctaatccttatcctcttctctctcgtttttattctccttcttcttcaatctcttggtcttctcgactcctcccagcgcttcaatatctcccaagacccaaccatcggagggagggggcgagatgatgggattgagttccttggtctttaccgagtttcacagcctcggcttctctgaccttatagtttttgttgcgccactctggattgctgtggctgccggtgttttggttggttgggtttggaggcccaagtgggcttatctcgattctaaactcttgtccaattcacctaaattcctcaatcttcagcttcccacttccatcctcaaaacttcttctcaccacgttaaccccagcctttcttccaaagagaaaactgggtttgtaacggacgatgattttaggcatctatggaagttggttgaggtcaaagatggcggtccttgttggattcaaatgatggaccgatcaaccccaaccttctcatatcaagcttggaggcgagatcctgagaatgggcctccccagtaccgtagcagaactgtgtttgaggatgccactcccgagatggtcagggacttcttttgggatgatgagttccgttccaagtgggatgatatgcttttgtattcttctactctcgagcgttgcaaggacacgggcactatggttgtgcaatgggtgcgaaagttccccttcttttgtagcgacagggagtatattataggccgtcgtatatgggatgctggccgagtcttttactgcattactaagggagtacaatacccgtctgtacctagacaaaacaagccaaggcgagtcgacttgtactattcaagctggtgtatccgtgcagttgaatcaaaaagaggcgatggtgagatgacatcatgtgaggtactactatttcaccatgaagatatgggaataccgtgggagattgcaaagcttggggtgagacagggtatgtggggtgcagtcaagaagattgagccaggcctacgtgcatatcagagggctaaagcagcgggagcaggtttatccccgagtgccataatggctcacatcaacaccaaagtgagtgcagaggagttcatgaatgagaggggttcgatagcagaggttacagaagacaagccgacggggaaaaacataccaaagatactagtggtaggaggggcgattgcacttgcatgtacattggacaaagggctgttgacaaaggcggtgatattcggagtagccagaagatttgcaagaatgggaaaaaggatgtaggagagagtgtacatgtaagtagacagagaacgaatgagggaatgagagacgtgaaaagggtctctcctttcacaagttgaatagagaaaggctatctctttagtcattgtcttggtggatgtatcaatcatgtaatagtaaagagaaaaagaagcgagagttattctttcagtgttgaatttctgagagcgcggaaagatagttccaccgcgctgtgctaataaacatctccgtcttttcttgtcc

SEQ ID NO: 21244 - protein, 385 aa, Arabidopsis thaliana
  peptide (1)..(385): Ceres Seq. ID no. 12334815
MMGLSSLVFTEFHSLGFSDLIVFVAPLWIAVAAGVLVGWVWRPKWAYLDSKLLSNSPKFLNLQLPTSILKTSSHHVNPSLSSKEKTGFVTDDDFRHLWKLVEVKDGGPCWIQMMDRSTPTFSYQAWRRDPENGPPQYRSRTVFEDATPEMVRDFFWDDEFRSKWDDMLLYSSTLERCKDTGTMVVQWVRKFPFFCSDREYIIGRRIWDAGRVFYCITKGVQYPSVPRQNKPRRVDLYYSSWCIRAVESKRGDGEMTSCEVLLFHHEDMGIPWEIAKLGVRQGMWGAVKKIEPGLRAYQRAKAAGAGLSPSAIMAHINTKVSAEEFMNERGSIAEVTEDKPTGKNIPKILVVGGAIALACTLDKGLLTKAVIFGVARRFARMGKRM

SEQ ID NO: 21245 - protein, 384 aa, Arabidopsis thaliana
  peptide (1)..(384): Ceres Seq. ID no. 12334816
MGLSSLVFTEFHSLGFSDLIVFVAPLWIAVAAGVLVGWVWRPKWAYLDSKLLSNSPKFLNLQLPTSILKTSSHHVNPSLSSKEKTGFVTDDDFRHLWKLVEVKDGGPCWIQMMDRSTPTFSYQAWRRDPENGPPQYRSRTVFEDATPEMVRDFFWDDEFRSKWDDMLLYSSTLERCKDTGTMVVQWVRKFPFFCSDREYIIGRRIWDAGRVFYCITKGVQYPSVPRQNKPRRVDLYYSSWCIRAVESKRGDGEMTSCEVLLFHHEDMGIPWEIAKLGVRQGMWGAVKKIEPGLRAYQRAKAAGAGLSPSAIMAHINTKVSAEEFMNERGSIAEVTEDKPTGKNIPKILVVGGAIALACTLDKGLLTKAVIFGVARRFARMGKRM

SEQ ID NO: 21246 - protein, 273 aa, Arabidopsis thaliana
  peptide (1)..(273): Ceres Seq. ID no. 12334817
MMDRSTPTFSYQAWRRDPENGPPQYRSRTVFEDATPEMVRDFFWDDEFRSKWDDMLLYSSTLERCKDTGTMVVQWVRKFPFFCSDREYIIGRRIWDAGRVFYCITKGVQYPSVPRQNKPRRVDLYYSSWCIRAVESKRGDGEMTSCEVLLFHHEDMGIPWEIAKLGVRQGMWGAVKKIEPGLRAYQRAKAAGAGLSPSAIMAHINTKVSAEEFMNERGSIAEVTEDKPTGKNIPKILVVGGAIALACTLDKGLLTKAVIFGVARRFARMGKRM

SEQ ID NO: 21247 - DNA, 1104 bp, Arabidopsis thaliana
  misc_feature (1)..(1104): Ceres Seq. ID no. 12324554
  misc_feature (1)..(1104): Ortholog of  Ceres SEQ ID NO 14313959 as cited in SEQ ID NO 57842
atagacagctaatctcgatgtgtgattctttttttttcaactaatttttgactattttttttctgttttctttatttaacaaaaatctcacttggcgtgtctgatcttgttccccgtcgtcgtctctaacttacacatttccattctccgaatctctatctctccttttgcttcatcggtgtgatctctgagacgaaagaagaagaagatggtggttattgagcagaagaagaggtttgctttgtttttagcgacgtgtgattcagagttcgtgaagaagacttacggtggttacttcaatgtcttcgtttcaactttcggcgaagaaggtgagcaatgggatctattccgagtcatcgacggacaatttcccgacgagaatgatttagacaagtacgacggtttcgttatcagtggtagtccacatgatgctttcggagacgccgattggattgttaagctttgcgaagtttgtcagaaacttgatcacatgaagaagaaagttctcggcatctgcttcggccaccagataattactagagttaaaggtgggaagataggaagagcactcaaaggtgcagatatgggacttagaagcataaccatagcgaaagacaatgaaaaactacgaggttactttggagacgttgaggtcccagcatatttagctattataaaatgtcatcaggatgaagtgttggaacttcctgagtctgctacactacttgcttcttctgaggtatgtaacgtcgagatgttctctattggagatcattttttctgtattcaagggcatccagagtataacaaagagattctgtttgagattgtggaccgagtccttaatatgaagctgatggagcaagagtttgcggataaggcaaagagtacgatggagactgcgcaaccagacaggattctatggcagaagctctgcaaaaacttcctgaaaggttgatgatccgagactatgttatctctgtatgaacttatcaaaaactatgtcatctctcaataaacctgcagtatctttcatattttatcttcaggaaacagaaagaaacacatataaaacaaatcacaatcacaaataatcttttatgc

SEQ ID NO: 21248 - protein, 249 aa, Arabidopsis thaliana
  peptide (1)..(249): Ceres Seq. ID no. 12324555
MVVIEQKKRFALFLATCDSEFVKKTYGGYFNVFVSTFGEEGEQWDLFRVIDGQFPDENDLDKYDGFVISGSPHDAFGDADWIVKLCEVCQKLDHMKKKVLGICFGHQIITRVKGGKIGRALKGADMGLRSITIAKDNEKLRGYFGDVEVPAYLAIIKCHQDEVLELPESATLLASSEVCNVEMFSIGDHFFCIQGHPEYNKEILFEIVDRVLNMKLMEQEFADKAKSTMETAQPDRILWQKLCKNFLKG

SEQ ID NO: 21249 - protein, 155 aa, Arabidopsis thaliana
  peptide (1)..(155): Ceres Seq. ID no. 12324556
MKKKVLGICFGHQIITRVKGGKIGRALKGADMGLRSITIAKDNEKLRGYFGDVEVPAYLAIIKCHQDEVLELPESATLLASSEVCNVEMFSIGDHFFCIQGHPEYNKEILFEIVDRVLNMKLMEQEFADKAKSTMETAQPDRILWQKLCKNFLKG

SEQ ID NO: 21250 - protein, 124 aa, Arabidopsis thaliana
  peptide (1)..(124): Ceres Seq. ID no. 12324557
MGLRSITIAKDNEKLRGYFGDVEVPAYLAIIKCHQDEVLELPESATLLASSEVCNVEMFSIGDHFFCIQGHPEYNKEILFEIVDRVLNMKLMEQEFADKAKSTMETAQPDRILWQKLCKNFLKG

SEQ ID NO: 21251 - DNA, 1476 bp, Arabidopsis thaliana
  misc_feature (1)..(1476): Ceres Seq. ID no. 13497511
  misc_feature (1)..(1476): Ortholog of  Ceres SEQ ID NO 14303542 as cited in SEQ ID NO 63539
  misc_feature (1)..(1476): Ortholog of  Ceres SEQ ID NO 12407937 as cited in SEQ ID NO 0
gtactcagtacttacatcttcttcatctgacgatagcaaaaatgacaagcaatccctaatttcgcctcaaaaaatcccaaaaagcttcgttcttttttagtcatcatcatcttcttcttttcttcttcttcggttgctaaatcgaagatggcgactgctctggtttctcctcttacttcacaactcaaccatgaagctgtctgttccaagtttgtgttacccaaatcgccgttcatgtcgggatctaagctcttttcatcgaacatgccttgctctactgttcctagacgcacaagaagatcacactgctttgcttctgctaaagatatgagctttgaccatatccctaaacaatttcgtggagacaatctcaaagacggagtgatgcagaacttcaagaacgtaccacaatatttttacgggcttaattcagctcaaatggatatgttcatgacagaagatagccctgtccgtaggcaagcggaaaaagttacagaggaaagcatctcgtctagaaataactatttgaacaatggaggaatatggagtatgtccggtatgaatgcagcagatgctagaagatatagcatgagtgtccagatgtacagaggtggaggtggcggcggaggatctgaaagaccaagaactgctcctccagatttgccttctttgctattggatgctcgcatatgctaccttggcatgccaatcgtacctgcagttactgagttactcgttgctcaatttatgtggttagactatgataacccaacaaagcccatctacttatatataaattcacccgggacccagaatgagaagatggaaactgttggatcagaaacagaggcttatgccatagccgatactatttcttattgcaaatcagatgtatacactatcaattgtggcatggcttttggtcaagcagcaatgcttctttctctcgggaaaaaaggttatcgtgccgtacaaccacattcatcaacaaaattatatctgccaaaagtaaacagatcgagtggagctgccatagacatgtggataaaggccaaggaacttgatgcaaataccgagtactacatcgagctgttagctaagggaacagggaaatccaaagagcagatcaacgaggacatcaagcgacctaaatatctccaagctcaagcagccattgactatggaattgcagacaagatagctgactcgcaggacagttctttcgagaaacgggattacgatgggacccttgcccagagagctatgagacctggaggaggcagtccagcagctccagccggactaagatgatcaattcccaccagaaagaaagaggttgaatcctaatttcctagtcactctggaatatgtagctcttacaatctataagcaaacacatgtggtagtaacatacaaaaaagtgttggcaaaagggaaataacatcaaagttatctaggtggaaagttatttgtatt

SEQ ID NO: 21252 - protein, 387 aa, Arabidopsis thaliana
  peptide (1)..(387): Ceres Seq. ID no. 13497512
MATALVSPLTSQLNHEAVCSKFVLPKSPFMSGSKLFSSNMPCSTVPRRTRRSHCFASAKDMSFDHIPKQFRGDNLKDGVMQNFKNVPQYFYGLNSAQMDMFMTEDSPVRRQAEKVTEESISSRNNYLNNGGIWSMSGMNAADARRYSMSVQMYRGGGGGGGSERPRTAPPDLPSLLLDARICYLGMPIVPAVTELLVAQFMWLDYDNPTKPIYLYINSPGTQNEKMETVGSETEAYAIADTISYCKSDVYTINCGMAFGQAAMLLSLGKKGYRAVQPHSSTKLYLPKVNRSSGAAIDMWIKAKELDANTEYYIELLAKGTGKSKEQINEDIKRPKYLQAQAAIDYGIADKIADSQDSSFEKRDYDGTLAQRAMRPGGGSPAAPAGLR

SEQ ID NO: 21253 - protein, 358 aa, Arabidopsis thaliana
  peptide (1)..(358): Ceres Seq. ID no. 13497513
MSGSKLFSSNMPCSTVPRRTRRSHCFASAKDMSFDHIPKQFRGDNLKDGVMQNFKNVPQYFYGLNSAQMDMFMTEDSPVRRQAEKVTEESISSRNNYLNNGGIWSMSGMNAADARRYSMSVQMYRGGGGGGGSERPRTAPPDLPSLLLDARICYLGMPIVPAVTELLVAQFMWLDYDNPTKPIYLYINSPGTQNEKMETVGSETEAYAIADTISYCKSDVYTINCGMAFGQAAMLLSLGKKGYRAVQPHSSTKLYLPKVNRSSGAAIDMWIKAKELDANTEYYIELLAKGTGKSKEQINEDIKRPKYLQAQAAIDYGIADKIADSQDSSFEKRDYDGTLAQRAMRPGGGSPAAPAGLR

SEQ ID NO: 21254 - protein, 348 aa, Arabidopsis thaliana
  peptide (1)..(348): Ceres Seq. ID no. 13497514
MPCSTVPRRTRRSHCFASAKDMSFDHIPKQFRGDNLKDGVMQNFKNVPQYFYGLNSAQMDMFMTEDSPVRRQAEKVTEESISSRNNYLNNGGIWSMSGMNAADARRYSMSVQMYRGGGGGGGSERPRTAPPDLPSLLLDARICYLGMPIVPAVTELLVAQFMWLDYDNPTKPIYLYINSPGTQNEKMETVGSETEAYAIADTISYCKSDVYTINCGMAFGQAAMLLSLGKKGYRAVQPHSSTKLYLPKVNRSSGAAIDMWIKAKELDANTEYYIELLAKGTGKSKEQINEDIKRPKYLQAQAAIDYGIADKIADSQDSSFEKRDYDGTLAQRAMRPGGGSPAAPAGLR

SEQ ID NO: 21255 - DNA, 1302 bp, Arabidopsis thaliana
  misc_feature (1)..(1302): Ceres Seq. ID no. 12334951
  misc_feature (1)..(1302): Ortholog of  Ceres SEQ ID NO 15170617 as cited in SEQ ID NO 52614
aagaaccaactcaatacgcatcacaaagaaccctaaattcctggaagatctcaaaaggaaaattcaaaaccaaagcttcaagcaatcatcaagcaaaggaaaagctcaaattttgggtcttttatatatttatttcataaagttacaatctttttgattgtggtttcagtgtacgaacacgcaagaactcgcgtgaaaaaattgtatccaagcttcgtgaaaggagtctctctgtatttagtggcgttttgttctgttgttatttctgaaatattgaagcttttgatttgggtttcaagagagcagagatgtgtagtttgtcggcgattatgttgttaccaacgaagctgaaaccagcttattcagacaaacggagtaacagtagcagcagcagctcactcttcttcaacaatagaagatccaagaagaagaaccaatcgattgttcccgttgcaaggttgtttggaccggcgattttcgaatcatccaaattgaaagtactcttcttaggggttgatgagaagaagcatccttcaacgctccctaggacttacacactcactcacagtgacattacagctaaactaaccttagctatttctcaatccataaacaactctcagttgcaaggatgggcaaataggctataccgggatgaagttgtggcagaatggaagaaagtgaaagggaaaatgtcgcttcacgttcattgtcacataagcggtggccatttccttttagatctctttgcaaagtttcgatatttcatcttttgcaaagaactacctgtggtgttgaaggcttttgtgcatggagatgggaacttgttgaacaactatcctgagctacaagaagctcttgtttgggtctatttccattctaatgtcaatgagttcaacaaagtcgagtgttggggtccgctttgggaagctgtttcgcctgatggtcacaagactgagactcttcccgaggctcggtgtgcggacgagtgtagttgttgttttccaaccgttagctcgattccatggtctcatagtcttagtaatgaaggtgtaaatggttactctgggactcagactgagggaattgctactccaaatccggagaaactctagtgactaaatatcaaattacaagtttttcttttggtagtttgtacaaagtgaaaaggaaatggcaggactttccttttggtggatctaaatattggtttggtttggtgtacataatgtggtataggaaaataatgattatttgtaggttaaatacagattttaaagtttcaaatggtattttgtgtct

SEQ ID NO: 21256 - protein, 268 aa, Arabidopsis thaliana
  peptide (1)..(268): Ceres Seq. ID no. 12334952
MCSLSAIMLLPTKLKPAYSDKRSNSSSSSSLFFNNRRSKKKNQSIVPVARLFGPAIFESSKLKVLFLGVDEKKHPSTLPRTYTLTHSDITAKLTLAISQSINNSQLQGWANRLYRDEVVAEWKKVKGKMSLHVHCHISGGHFLLDLFAKFRYFIFCKELPVVLKAFVHGDGNLLNNYPELQEALVWVYFHSNVNEFNKVECWGPLWEAVSPDGHKTETLPEARCADECSCCFPTVSSIPWSHSLSNEGVNGYSGTQTEGIATPNPEKL

SEQ ID NO: 21257 - protein, 261 aa, Arabidopsis thaliana
  peptide (1)..(261): Ceres Seq. ID no. 12334953
MLLPTKLKPAYSDKRSNSSSSSSLFFNNRRSKKKNQSIVPVARLFGPAIFESSKLKVLFLGVDEKKHPSTLPRTYTLTHSDITAKLTLAISQSINNSQLQGWANRLYRDEVVAEWKKVKGKMSLHVHCHISGGHFLLDLFAKFRYFIFCKELPVVLKAFVHGDGNLLNNYPELQEALVWVYFHSNVNEFNKVECWGPLWEAVSPDGHKTETLPEARCADECSCCFPTVSSIPWSHSLSNEGVNGYSGTQTEGIATPNPEKL

SEQ ID NO: 21258 - protein, 140 aa, Arabidopsis thaliana
  peptide (1)..(140): Ceres Seq. ID no. 12334954
MSLHVHCHISGGHFLLDLFAKFRYFIFCKELPVVLKAFVHGDGNLLNNYPELQEALVWVYFHSNVNEFNKVECWGPLWEAVSPDGHKTETLPEARCADECSCCFPTVSSIPWSHSLSNEGVNGYSGTQTEGIATPNPEKL

SEQ ID NO: 21259 - DNA, 1755 bp, Arabidopsis thaliana
  misc_feature (1)..(1755): Ceres Seq. ID no. 13488508
  misc_feature (1)..(1755): Ortholog of  Ceres SEQ ID NO 15178228 as cited in SEQ ID NO 58330
  misc_feature (1)..(1755): Ortholog of  Ceres SEQ ID NO 13596635 as cited in SEQ ID NO 62488
gtcgcgattactctctttgagctctctctctctcttctaacatcggtcttgtattggtgcttattggatatctccggcgaaggaaacgagtttcgcggttagatttttctttatcgcttaccggcgaggatgatcgtttcttcggtaaggtcgattaatcggttctgttttcgaagatgttgttgttagagttagatccgcatggttttggtgatcgttttggatcgaagacgtggttccacagacgcaaaaaatgccgtcgtctcttgctttgagatttggcttctgaaatctttcctctttcgttctcgttgaatcctaatttttgttttgtcttttttagaaatttttggtctttctaatcctggggataggttacagtctccgattgtaaatagaaatttgcggcgaggttaggaaaagttgtacagatagagattgagctctgaaacacatctcaggaacattttttgttccttgtttaaaaaagtttttttttttgtgtgtgtttctctgggttggttagaaagtggcgaagatgaatttgggtgcggccgaggaagaatcggctcaggagattcatttaccagctgatatcaattgggagatgcttgataaatccaagtttttcgttttaggcgctgctttgttttcaggggtatctggagctctttatcctgcggttttgatgaaaactcggcaacaagtgtgtcattcgcaaggttcttgtattaaaactgcgtttactcttgtgagacatgaaggtttaaggggattgtacagaggatttggaacttctttgatgggaactatccctgctcgtgctttgtacatgactgccttggaggttactaagagtaacgtaggctctgctgctgtcagcttggggttgacagaggctaaagctgctgctgttgctaatgcggttggaggtttgagtgctgcgatggctgcacagcttgtttggactcctgttgatgtggttagccaaaggcttatggttcaaggaagtgctggtcttgttaatgcatcaaggtgtaattatgttaacgggtttgatgcatttagaaagatcgttcgcgctgatggaccgaaggggttatacagagggtttgggatatcgattctgacttatgcgccgtctaatgctgtttggtgggcgtcttactctgttgcacagcggatggtttggggtggaattgggtgttatgtctgtaagaaagacgaagaaagcgggaacaatagtaccacgatgaaaccagattctaaaacgataatggctgttcaaggagttagtgctgcgattgctggaagtgtttctgctttgattacaatgccactcgacacaatcaagacgagattgcaggttcttgatggggaagatagtagtaacaacgggaagcgtggaccgagtattggacagactgtaagaaacttggttagagaaggtggatggacggcttgttatagaggattgggaccaagatgtgcttcaatgtcaatgtctgcaacaactatgatcactacctacgagttcttgaaacggctttctgctaagaaccatgacgggttttattctaaatcatagtgataacaactgggaatccacatagaagaatcttttatggaaatgtctctagttttcttacttatcttgttctttatctagctcttctgctatttcatttgtttccagtcatatgtaaggaatgtgttaaattcagttgtttttaaataaataaatgttctttccac

SEQ ID NO: 21260 - protein, 349 aa, Arabidopsis thaliana
  peptide (1)..(349): Ceres Seq. ID no. 13488509
MNLGAAEEESAQEIHLPADINWEMLDKSKFFVLGAALFSGVSGALYPAVLMKTRQQVCHSQGSCIKTAFTLVRHEGLRGLYRGFGTSLMGTIPARALYMTALEVTKSNVGSAAVSLGLTEAKAAAVANAVGGLSAAMAAQLVWTPVDVVSQRLMVQGSAGLVNASRCNYVNGFDAFRKIVRADGPKGLYRGFGISILTYAPSNAVWWASYSVAQRMVWGGIGCYVCKKDEESGNNSTTMKPDSKTIMAVQGVSAAIAGSVSALITMPLDTIKTRLQVLDGEDSSNNGKRGPSIGQTVRNLVREGGWTACYRGLGPRCASMSMSATTMITTYEFLKRLSAKNHDGFYSKS

SEQ ID NO: 21261 - protein, 326 aa, Arabidopsis thaliana
  peptide (1)..(326): Ceres Seq. ID no. 13488510
MLDKSKFFVLGAALFSGVSGALYPAVLMKTRQQVCHSQGSCIKTAFTLVRHEGLRGLYRGFGTSLMGTIPARALYMTALEVTKSNVGSAAVSLGLTEAKAAAVANAVGGLSAAMAAQLVWTPVDVVSQRLMVQGSAGLVNASRCNYVNGFDAFRKIVRADGPKGLYRGFGISILTYAPSNAVWWASYSVAQRMVWGGIGCYVCKKDEESGNNSTTMKPDSKTIMAVQGVSAAIAGSVSALITMPLDTIKTRLQVLDGEDSSNNGKRGPSIGQTVRNLVREGGWTACYRGLGPRCASMSMSATTMITTYEFLKRLSAKNHDGFYSKS

SEQ ID NO: 21262 - protein, 299 aa, Arabidopsis thaliana
  peptide (1)..(299): Ceres Seq. ID no. 13488511
MKTRQQVCHSQGSCIKTAFTLVRHEGLRGLYRGFGTSLMGTIPARALYMTALEVTKSNVGSAAVSLGLTEAKAAAVANAVGGLSAAMAAQLVWTPVDVVSQRLMVQGSAGLVNASRCNYVNGFDAFRKIVRADGPKGLYRGFGISILTYAPSNAVWWASYSVAQRMVWGGIGCYVCKKDEESGNNSTTMKPDSKTIMAVQGVSAAIAGSVSALITMPLDTIKTRLQVLDGEDSSNNGKRGPSIGQTVRNLVREGGWTACYRGLGPRCASMSMSATTMITTYEFLKRLSAKNHDGFYSKS

SEQ ID NO: 21263 - DNA, 653 bp, Arabidopsis thaliana
  misc_feature (1)..(653): Ceres Seq. ID no. 13500154
  misc_feature (1)..(653): Ortholog of  Ceres SEQ ID NO 13622871 as cited in SEQ ID NO 0
tccgacaacaaaatcagcgacagctcaaacgttgatatttttctccggcttttctagggtttaaattttctttccgatcagagattaatggcgactctagactccgacgttaccatgattcctgccggagaagcctccagcagcgtagccgcgtcgtcttccaacaagaaagctaagcgattcgaaattaagaagtggagcgccgttgctctctgggcttgggatatcgttgttgacaactgtgcgatctgcagaaaccacatcatggatctttgtatcgagtgtcaggctaatcaggccagtgccacaagtgaagagtgcactgtagcttggggggtttgcaatcacgccttccactttcactgcatcagcagatggctaaagactcgtcaagtttgtccattggataacagtgagtgggagtttcagaaatatggtcactaaatcaacaaatggttccagcaagcatgtgtctaatcgtgaagacatcaggttcatttggttaccaccgcatatgataactaaagattgttcaagtttttgccctttttttggtactgtattttacaatttgtggaaacagagatttactgttcagtgttcactaaacctattatggttgtgctttgggtgacgtctttgatttcaaaatt

SEQ ID NO: 21264 - protein, 118 aa, Arabidopsis thaliana
  peptide (1)..(118): Ceres Seq. ID no. 13500155
MATLDSDVTMIPAGEASSSVAASSSNKKAKRFEIKKWSAVALWAWDIVVDNCAICRNHIMDLCIECQANQASATSEECTVAWGVCNHAFHFHCISRWLKTRQVCPLDNSEWEFQKYGH

SEQ ID NO: 21265 - protein, 109 aa, Arabidopsis thaliana
  peptide (1)..(109): Ceres Seq. ID no. 13500156
MIPAGEASSSVAASSSNKKAKRFEIKKWSAVALWAWDIVVDNCAICRNHIMDLCIECQANQASATSEECTVAWGVCNHAFHFHCISRWLKTRQVCPLDNSEWEFQKYGH

SEQ ID NO: 21266 - protein, 66 aa, Arabidopsis thaliana
  peptide (1)..(66): Ceres Seq. ID no. 13500157
MVTKSTNGSSKHVSNREDIRFIWLPPHMITKDCSSFCPFFGTVFYNLWKQRFTVQCSLNLLWLCFG

SEQ ID NO: 21267 - DNA, 1699 bp, Arabidopsis thaliana
  misc_feature (1)..(1699): Ceres Seq. ID no. 13499971
  misc_feature (1)..(1699): Ortholog of  Ceres SEQ ID NO 13654409 as cited in SEQ ID NO 68534
tggattttctctatagacgcaatcaccgccgattctctctctctctctctcgagtctctcgacggtcgcatatcaaaagtccatttctttcttctctttggaggatcagcaactatggatgaagagtacgaagtcatagttctgggtactggtctcaaggagtgcatccttagtggtcttctctccgtcgatggtcttaaggtacttcacatggacaggaatgactactacggtggagagtcaacttctcttaatctcaatcagctgtggaagaagttcaggggagaagagaaggctcctgctcatttaggttctagcagagactacaatgttgacatgatgccaaagtttatgatggctaacggaaagcttgttcgtgtccttattcatacggatgtgaccaagtacttgtcttttaaagctgttgatggaagctatgtttttgtccaaggcaaggtccaaaaagtgccagcaactcccatggaggccctcaaatctcctcttatgggtatttttgagaaacgtcgagctggaaagtttttcagctatgttcaagaatacgacgagaaggacccaaaaacacatgatggaatggatttgaggagagttacaactaaggatttgattgcgaaattcggtcttaaagaagatactattgactttattggtcatgcagtggcacttcactgtaatgacaatcatctccatcaacctgcctatgatactgtaatgagaatgaagctctacgcagagtcccttgcacgttttcaaggaggttcaccatatatctatcctctctatgggttgggagaattgcctcaggcatttgcacgacttagtgctgtctatggtgggacgtatatgttgaacaaacctgagtgcaaggtagagtttgacgaggagggtaaggtttctggtgttacatctgagggagagactgccaaatgcaagaaagttgtctgcgatccttcttacctaaccaacaaggtcaggaagattggcagggttgctcgggcgattgccattatgagccaccctattccaaacaccaatgattctcagtcggtgcaagtcattctaccccaaaaacaattgggccgcaaatcagacatgtatgtcttctgttgttcatattcacacaacgttgctcccaagggaaagttcatagcatttgtgtcaacagacgctgaaactgataaccctcaaaccgagctccagcctggaatcgaccttcttggtcctgttgatgagctgttcttcgacatctatgatagatatgagcctgtcaacgaacccactttggacaactgcttcatatcaacgagttatgatgctacaacacactttgacacaactgttgttgatgtgttgaacatgtataaattgatcaccggaaaggaactggatctaagtgtggatcttaacgcagctagtgctgcagaggaggaatgatggaaaatattgcaagctctgtctctctctgttagtcaccaaatgatgtaaccggttctctttctccctcttcttaaaagttgtctcaccaaatgttctgttaaaatactaaatcaaaccgatctcatcatgcgtacctattcccggttatcgcagtctgtttttttcttctcaaaaaactaaaatgttggatttcgtggtttttgtttggagtgtctaatatatcatcatgctcttccgtttgaac

SEQ ID NO: 21268 - protein, 483 aa, Arabidopsis thaliana
  peptide (1)..(483): Ceres Seq. ID no. 13499972
WIFSIDAITADSLSLSLESLDGRISKVHFFLLFGGSATMDEEYEVIVLGTGLKECILSGLLSVDGLKVLHMDRNDYYGGESTSLNLNQLWKKFRGEEKAPAHLGSSRDYNVDMMPKFMMANGKLVRVLIHTDVTKYLSFKAVDGSYVFVQGKVQKVPATPMEALKSPLMGIFEKRRAGKFFSYVQEYDEKDPKTHDGMDLRRVTTKDLIAKFGLKEDTIDFIGHAVALHCNDNHLHQPAYDTVMRMKLYAESLARFQGGSPYIYPLYGLGELPQAFARLSAVYGGTYMLNKPECKVEFDEEGKVSGVTSEGETAKCKKVVCDPSYLTNKVRKIGRVARAIAIMSHPIPNTNDSQSVQVILPQKQLGRKSDMYVFCCSYSHNVAPKGKFIAFVSTDAETDNPQTELQPGIDLLGPVDELFFDIYDRYEPVNEPTLDNCFISTSYDATTHFDTTVVDVLNMYKLITGKELDLSVDLNAASAAEEE

SEQ ID NO: 21269 - protein, 445 aa, Arabidopsis thaliana
  peptide (1)..(445): Ceres Seq. ID no. 13499973
MDEEYEVIVLGTGLKECILSGLLSVDGLKVLHMDRNDYYGGESTSLNLNQLWKKFRGEEKAPAHLGSSRDYNVDMMPKFMMANGKLVRVLIHTDVTKYLSFKAVDGSYVFVQGKVQKVPATPMEALKSPLMGIFEKRRAGKFFSYVQEYDEKDPKTHDGMDLRRVTTKDLIAKFGLKEDTIDFIGHAVALHCNDNHLHQPAYDTVMRMKLYAESLARFQGGSPYIYPLYGLGELPQAFARLSAVYGGTYMLNKPECKVEFDEEGKVSGVTSEGETAKCKKVVCDPSYLTNKVRKIGRVARAIAIMSHPIPNTNDSQSVQVILPQKQLGRKSDMYVFCCSYSHNVAPKGKFIAFVSTDAETDNPQTELQPGIDLLGPVDELFFDIYDRYEPVNEPTLDNCFISTSYDATTHFDTTVVDVLNMYKLITGKELDLSVDLNAASAAEEE

SEQ ID NO: 21270 - protein, 413 aa, Arabidopsis thaliana
  peptide (1)..(413): Ceres Seq. ID no. 13499974
MDRNDYYGGESTSLNLNQLWKKFRGEEKAPAHLGSSRDYNVDMMPKFMMANGKLVRVLIHTDVTKYLSFKAVDGSYVFVQGKVQKVPATPMEALKSPLMGIFEKRRAGKFFSYVQEYDEKDPKTHDGMDLRRVTTKDLIAKFGLKEDTIDFIGHAVALHCNDNHLHQPAYDTVMRMKLYAESLARFQGGSPYIYPLYGLGELPQAFARLSAVYGGTYMLNKPECKVEFDEEGKVSGVTSEGETAKCKKVVCDPSYLTNKVRKIGRVARAIAIMSHPIPNTNDSQSVQVILPQKQLGRKSDMYVFCCSYSHNVAPKGKFIAFVSTDAETDNPQTELQPGIDLLGPVDELFFDIYDRYEPVNEPTLDNCFISTSYDATTHFDTTVVDVLNMYKLITGKELDLSVDLNAASAAEEE

SEQ ID NO: 21271 - DNA, 1110 bp, Arabidopsis thaliana
  misc_feature (1)..(1110): Ceres Seq. ID no. 12327364
  misc_feature (1)..(1110): Ortholog of  Ceres SEQ ID NO 13599278 as cited in SEQ ID NO 0
ataattaaagtcttcttcttcttcttcttctctacaaattatctcactctcttcgtttttttttccttctcaacaatggcgacttcttctactttctcgtcactactaccttcaccaccagctcttctttccgaccaccgttctcctccaccatccatcagatactccttttctcccttaactactccaaaatcgtctcgtttgggtttcactgtaccggagaagagaaacctcgctgctaattcgtctctcgttgaagtatccattggcggagaaagtgacccaccaccatcatcatctggatcaggaggagacgacaagcaaattgcattactcaaactcaaattacttagtgtagtttcgggattaaacagaggacttgtggcgagtgttgatgatttagaaagagctgaagtggctgctaaagaacttgaaactgctgggggaccggttgatttaaccgatgatcttgataagcttcaagggaaatggaggctgttgtatagtagtgcgttctcttctcggtctttaggtggtagccgtcctggtctacctactggacgtttgatccctgttactcttggccaggtgtttcaacggattaatgtgtttagcaaagattttgataacatagcagaggtggaattaggagccccttggccatttccgccattagaagccactgcgacattggcacacaagtttgaactcttaggcacttgcaagatcaagataacatttgagaaaacaactgtgaagacatcgggaaacttgtcgcagattcctccgtttgatatcccgaggcttcccgacagtttcagaccatcgtcaaaccctggaactggggatttcgaagttacctatgttgatgataccatgcgcataactcgcggggacagaggtgaacttagggtattcgtcattgcttaattctcaaagctttgacatgtaaagataaataaatactttctgcttgatgcagtctcatgagttttgtacaaatcatgtgaacatataaatgcgctttataagtaaatgagtgtcttgttcaatgaatcatatgaaagaatttgtatgactcagaaaattggacaatgatatagaacttcc

SEQ ID NO: 21272 - protein, 309 aa, Arabidopsis thaliana
  peptide (1)..(309): Ceres Seq. ID no. 12327365
IIKVFFFFFFSTNYLTLFVFFSFSTMATSSTFSSLLPSPPALLSDHRSPPPSIRYSFSPLTTPKSSRLGFTVPEKRNLAANSSLVEVSIGGESDPPPSSSGSGGDDKQIALLKLKLLSVVSGLNRGLVASVDDLERAEVAAKELETAGGPVDLTDDLDKLQGKWRLLYSSAFSSRSLGGSRPGLPTGRLIPVTLGQVFQRINVFSKDFDNIAEVELGAPWPFPPLEATATLAHKFELLGTCKIKITFEKTTVKTSGNLSQIPPFDIPRLPDSFRPSSNPGTGDFEVTYVDDTMRITRGDRGELRVFVIA

SEQ ID NO: 21273 - protein, 284 aa, Arabidopsis thaliana
  peptide (1)..(284): Ceres Seq. ID no. 12327366
MATSSTFSSLLPSPPALLSDHRSPPPSIRYSFSPLTTPKSSRLGFTVPEKRNLAANSSLVEVSIGGESDPPPSSSGSGGDDKQIALLKLKLLSVVSGLNRGLVASVDDLERAEVAAKELETAGGPVDLTDDLDKLQGKWRLLYSSAFSSRSLGGSRPGLPTGRLIPVTLGQVFQRINVFSKDFDNIAEVELGAPWPFPPLEATATLAHKFELLGTCKIKITFEKTTVKTSGNLSQIPPFDIPRLPDSFRPSSNPGTGDFEVTYVDDTMRITRGDRGELRVFVIA

SEQ ID NO: 21274 - DNA, 683 bp, Arabidopsis thaliana
  misc_feature (1)..(683): Ceres Seq. ID no. 13497372
  misc_feature (1)..(683): Ortholog of  Ceres SEQ ID NO 14314198 as cited in SEQ ID NO 57472
  misc_feature (1)..(683): Ortholog of  Ceres SEQ ID NO 12783998 as cited in SEQ ID NO 61535
  misc_feature (1)..(683): Ortholog of  Ceres SEQ ID NO 15174264 as cited in SEQ ID NO 61877
aaaaaacacaaaacttgatctcacgactccatcttctaaaattcagaatctttctttgaaacttttttcgtgtgaagaaaatggcaccaaaggcagagaagaagccggcagagaagaaaccagtggaagagaaatcaaaagccgagaaagctccggcggagaagaaaccaaaagccggcaagaaactcccgaaggaagccggtgccggcggcgataagaagaagaagatgaagaagaagagtgttgagacgtacaagatctacatcttcaaggttctgaaacaagttcatccagatattggtatttcaagcaaagctatggggattatgaacagtttcatcaacgacatcttcgagaaattggcatcggaatcttcgaagcttgctaggtataacaagaagccgacgattacctctagggagattcagactgctgttagacttgttcttcctggtgagcttgcgaaacatgctgtttctgaaggaaccaaggctgtgactaagtttactagctcttgaattgtggatcttgttgaaatcgatgtttgtaaaattagggttttttagatttgatggttgttgttgactcttcgatcgatttctgttttgttatcttgttgcgatgtaatcaaatcggatccgatttctttcttaaatcaaatctatcaagtaaaatcttttgcc

SEQ ID NO: 21275 - protein, 145 aa, Arabidopsis thaliana
  peptide (1)..(145): Ceres Seq. ID no. 13497373
MAPKAEKKPAEKKPVEEKSKAEKAPAEKKPKAGKKLPKEAGAGGDKKKKMKKKSVETYKIYIFKVLKQVHPDIGISSKAMGIMNSFINDIFEKLASESSKLARYNKKPTITSREIQTAVRLVLPGELAKHAVSEGTKAVTKFTSS

SEQ ID NO: 21276 - protein, 96 aa, Arabidopsis thaliana
  peptide (1)..(96): Ceres Seq. ID no. 13497374
MKKKSVETYKIYIFKVLKQVHPDIGISSKAMGIMNSFINDIFEKLASESSKLARYNKKPTITSREIQTAVRLVLPGELAKHAVSEGTKAVTKFTSS

SEQ ID NO: 21277 - DNA, 1360 bp, Arabidopsis thaliana
  misc_feature (1)..(1360): Ceres Seq. ID no. 13487763
  misc_feature (1)..(1360): Ortholog of  Ceres SEQ ID NO 15174737 as cited in SEQ ID NO 52912
  misc_feature (1)..(1360): Ortholog of  Ceres SEQ ID NO 13624551 as cited in SEQ ID NO 0
atctcatttatcatcatccttcaagaacacaaagctagacagaaaaaaaaaaatgtgttcctcaaaattaaaaaatctgacccaagaaaacatttctcagatcaacggccgtccggttcttcaaccgaagtcgaaccaagttccgacattagaccgacgtaactcactaaaaaaatcgcctcctaagcctttgaatccaattgcatcaaagataccctcaccaagaccaatttctctaatctctcctcctttgtctcccaacacaaaatccttaagaaaaccggccggttcttgcaaggaacttcttaggtctagctctacaaaatcgaaaccagtgatatcaccagagaacagtgatggtggctacaaagaggttatgcctatggtgattgttcaaaagcagcctggaagtatagcagctgccagaagagaagaggttgcaatgaaacaagaagagagaaagaagaaaatttctcattacggtagaatcaaatccgtaaaatcgaatgaaaagaacttaaatgttgagcatgagaagaagaagagatgcagtttcatcactacaagttcagatccaatatatgtcgcttaccatgacaaagaatggggagttccagttcatgatgacaatctactatttgagcttctggtgttaaccggagctcaggtcggatcagattggacttcggttttaaagagaagaaacacttttagagaggctttctctggtttcgaagcagagttggtcgcagacttcaacgagaagaagatacaatcaatagtcaacgactatggcattaaccttagccaagtccttgcagttgttgacaacgctaaacaaattctcaaggtgaaaagagatttggggtcattcaacaaatacatttgggggtttatgaaacacaaaccggtcaccacaaaatacacatcatgccaaaagataccggttaagacatcgaaatcggagactataagcaaagacatggttcgtcgtgggtttagattcgttggtccgacggttatacattcgttaatgcaagccgccggtttaaccaacgaccacttgatcacatgtccgaggcatctcgagtgtacggccatggcggctttataggcaaaaggatcatgttgtaattgttgttgtagtcacattggctttaatttatatgtaaataaataatattttgtgttattattttagtactatagctcttctttttgtcaacattgtagtactatatctaccatgtgatatttaggtttgaggtcctaactttaggtattgatatttgtacaaaagctttttgtgtctgtgtttgtgattctgctttaaatttaatatatgtgtgtgtgtttattt

SEQ ID NO: 21278 - protein, 370 aa, Arabidopsis thaliana
  peptide (1)..(370): Ceres Seq. ID no. 13487764
SHLSSSFKNTKLDRKKKMCSSKLKNLTQENISQINGRPVLQPKSNQVPTLDRRNSLKKSPPKPLNPIASKIPSPRPISLISPPLSPNTKSLRKPAGSCKELLRSSSTKSKPVISPENSDGGYKEVMPMVIVQKQPGSIAAARREEVAMKQEERKKKISHYGRIKSVKSNEKNLNVEHEKKKRCSFITTSSDPIYVAYHDKEWGVPVHDDNLLFELLVLTGAQVGSDWTSVLKRRNTFREAFSGFEAELVADFNEKKIQSIVNDYGINLSQVLAVVDNAKQILKVKRDLGSFNKYIWGFMKHKPVTTKYTSCQKIPVKTSKSETISKDMVRRGFRFVGPTVIHSLMQAAGLTNDHLITCPRHLECTAMAAL

SEQ ID NO: 21279 - protein, 353 aa, Arabidopsis thaliana
  peptide (1)..(353): Ceres Seq. ID no. 13487765
MCSSKLKNLTQENISQINGRPVLQPKSNQVPTLDRRNSLKKSPPKPLNPIASKIPSPRPISLISPPLSPNTKSLRKPAGSCKELLRSSSTKSKPVISPENSDGGYKEVMPMVIVQKQPGSIAAARREEVAMKQEERKKKISHYGRIKSVKSNEKNLNVEHEKKKRCSFITTSSDPIYVAYHDKEWGVPVHDDNLLFELLVLTGAQVGSDWTSVLKRRNTFREAFSGFEAELVADFNEKKIQSIVNDYGINLSQVLAVVDNAKQILKVKRDLGSFNKYIWGFMKHKPVTTKYTSCQKIPVKTSKSETISKDMVRRGFRFVGPTVIHSLMQAAGLTNDHLITCPRHLECTAMAAL

SEQ ID NO: 21280 - protein, 245 aa, Arabidopsis thaliana
  peptide (1)..(245): Ceres Seq. ID no. 13487766
MPMVIVQKQPGSIAAARREEVAMKQEERKKKISHYGRIKSVKSNEKNLNVEHEKKKRCSFITTSSDPIYVAYHDKEWGVPVHDDNLLFELLVLTGAQVGSDWTSVLKRRNTFREAFSGFEAELVADFNEKKIQSIVNDYGINLSQVLAVVDNAKQILKVKRDLGSFNKYIWGFMKHKPVTTKYTSCQKIPVKTSKSETISKDMVRRGFRFVGPTVIHSLMQAAGLTNDHLITCPRHLECTAMAAL

SEQ ID NO: 21281 - DNA, 814 bp, Arabidopsis thaliana
  misc_feature (1)..(814): Ceres Seq. ID no. 12340005
  misc_feature (1)..(814): Ortholog of  Ceres SEQ ID NO 14308813 as cited in SEQ ID NO 55485
  misc_feature (1)..(814): Ortholog of  Ceres SEQ ID NO 13655744 as cited in SEQ ID NO 64032
  misc_feature (1)..(814): Ortholog of  Ceres SEQ ID NO 13590394 as cited in SEQ ID NO 66581
taagatttatgaacttatggatgctgttgatgattacatccctatccctcagagacaaactgaattgccattcttgttagctgttgaggatgtgttctctatcactggacgtggtacggtggctacagggcgtgtcgagagaggtacggttaaggtaggagagactgtagatttagtgggtttgagggagactaggagttacactgtcactggggttgaaatgtttcagaagattcttgatgaggctttagctggtgacaatgtagggttgttgcttaggggtattcaaaaggctgatattcagagaggtatggttttagctaagccgggatcgattactccacataccaagtttgaagcaattatctatgtgttgaagaaagaggaaggtggaaggcattctccattctttgcaggttacaggcctcagttctacatgaggacgactgatgttacgggtaaagtgacgaagatcatgaacgacaaagatgaagagtcgaagatggttatgcccggtgatcgagtgaagattgttgttgagcttattgtgccggtggcttgtgaacaagggatgaggtttgctatcagagaaggaggaaagactgttggtgctggagttattgggacgatcctcgaatgattataaggttttagagagtttcatatagtgagcatctctacttgctttctttttgtttcactcttgattctcaaactctttgagtttttacctttttttatttatttttgtgccattttccataagaacttgaaatcaaaatgtcatatatttcttgattttctgatccttgtt

SEQ ID NO: 21282 - protein, 212 aa, Arabidopsis thaliana
  peptide (1)..(212): Ceres Seq. ID no. 12340006
KIYELMDAVDDYIPIPQRQTELPFLLAVEDVFSITGRGTVATGRVERGTVKVGETVDLVGLRETRSYTVTGVEMFQKILDEALAGDNVGLLLRGIQKADIQRGMVLAKPGSITPHTKFEAIIYVLKKEEGGRHSPFFAGYRPQFYMRTTDVTGKVTKIMNDKDEESKMVMPGDRVKIVVELIVPVACEQGMRFAIREGGKTVGAGVIGTILE

SEQ ID NO: 21283 - protein, 207 aa, Arabidopsis thaliana
  peptide (1)..(207): Ceres Seq. ID no. 12340007
MDAVDDYIPIPQRQTELPFLLAVEDVFSITGRGTVATGRVERGTVKVGETVDLVGLRETRSYTVTGVEMFQKILDEALAGDNVGLLLRGIQKADIQRGMVLAKPGSITPHTKFEAIIYVLKKEEGGRHSPFFAGYRPQFYMRTTDVTGKVTKIMNDKDEESKMVMPGDRVKIVVELIVPVACEQGMRFAIREGGKTVGAGVIGTILE

SEQ ID NO: 21284 - protein, 139 aa, Arabidopsis thaliana
  peptide (1)..(139): Ceres Seq. ID no. 12340008
MFQKILDEALAGDNVGLLLRGIQKADIQRGMVLAKPGSITPHTKFEAIIYVLKKEEGGRHSPFFAGYRPQFYMRTTDVTGKVTKIMNDKDEESKMVMPGDRVKIVVELIVPVACEQGMRFAIREGGKTVGAGVIGTILE

SEQ ID NO: 21285 - DNA, 1102 bp, Arabidopsis thaliana
  misc_feature (1)..(1102): Ceres Seq. ID no. 12369939
  misc_feature (1)..(1102): Ortholog of  Ceres SEQ ID NO 13491587 as cited in SEQ ID NO 20500
  misc_feature (1)..(1102): Ortholog of  Ceres SEQ ID NO 15169711 as cited in SEQ ID NO 54274
actcccaaaattctctccatcaatctctcttacacactacacaaattcaacaactgaaaccaactcagagcaaaagcttgatttgacactatggcgagcattagcaacgagcccgagcgtgagaacagagacgaagaagagactggagccaacgaagatgaagacaccggtgctcaggttgctcctatcgtcaggcttgaagaagtcgccgtcaccaccggtgaagaagacgaagacaccatcctcgatctgaaatcgaagttgtatcgatttgataaagatggaagtcagtggaaggagagaggtgctggtactgttaagtttttgaaacatagagtttctgggaagattcgtctcgttatgaggcaatcgaaaactttgaagatctgtgctaatcatcttgttggatcgggtatgagtgttcaggaacacgctgggaatgataagtcttgtgtatggcacgctcgtgatttctccgatggtgaattgaaggatgagctcttctgtatccggtttgcttcagttgagaattgcaaagcatttatgcaaaagttcaaggaagtagctgaatctgaagaagagaaagaagagagcaaagatgcctctgataccgctggtcttcttgagaagttaacagtggaagagaaggaaagtgagaagaaaccagtggagaaggcagaggaaaacaaaaagagtgaagctgttgaagaaaagaaaacagaggagtctgttccctcagcttaagatgcatgcttacacacacatacggccaggtaatcaatagcctgatgtgttttaaatccatcgaaggaagacttggcttttattttcaaattgaatacatgttttgagtcgtgttgagagtctatatgtttagtgtcacaaaagtgtcacaggtgacattttgcatattgcgagattgattttcgtgcttgtttgggtttcattatctggaagaaaaaaagagtgtattttgagctctcttatgatttttttttggaaaaagtgtggactcaagagaagattttattttgagttcacaaaaatttgtatgcatggatgattcgcgtgttctctttttaatgccagtcgtgttattgaa

SEQ ID NO: 21286 - protein, 217 aa, Arabidopsis thaliana
  peptide (1)..(217): Ceres Seq. ID no. 12369940
MASISNEPERENRDEEETGANEDEDTGAQVAPIVRLEEVAVTTGEEDEDTILDLKSKLYRFDKDGSQWKERGAGTVKFLKHRVSGKIRLVMRQSKTLKICANHLVGSGMSVQEHAGNDKSCVWHARDFSDGELKDELFCIRFASVENCKAFMQKFKEVAESEEEKEESKDASDTAGLLEKLTVEEKESEKKPVEKAEENKKSEAVEEKKTEESVPSA

SEQ ID NO: 21287 - protein, 127 aa, Arabidopsis thaliana
  peptide (1)..(127): Ceres Seq. ID no. 12369941
MRQSKTLKICANHLVGSGMSVQEHAGNDKSCVWHARDFSDGELKDELFCIRFASVENCKAFMQKFKEVAESEEEKEESKDASDTAGLLEKLTVEEKESEKKPVEKAEENKKSEAVEEKKTEESVPSA

SEQ ID NO: 21288 - protein, 109 aa, Arabidopsis thaliana
  peptide (1)..(109): Ceres Seq. ID no. 12369942
MSVQEHAGNDKSCVWHARDFSDGELKDELFCIRFASVENCKAFMQKFKEVAESEEEKEESKDASDTAGLLEKLTVEEKESEKKPVEKAEENKKSEAVEEKKTEESVPSA

SEQ ID NO: 21289 - DNA, 865 bp, Arabidopsis thaliana
  misc_feature (1)..(865): Ceres Seq. ID no. 12393293
  misc_feature (1)..(865): Ortholog of  Ceres SEQ ID NO 13599568 as cited in SEQ ID NO 509
  misc_feature (1)..(865): Ortholog of  Ceres SEQ ID NO 13638595 as cited in SEQ ID NO 52050
  misc_feature (1)..(865): Ortholog of  Ceres SEQ ID NO 13594748 as cited in SEQ ID NO 52114
  misc_feature (1)..(865): Ortholog of  Ceres SEQ ID NO 12623490 as cited in SEQ ID NO 61136
  misc_feature (1)..(865): Ortholog of  Ceres SEQ ID NO 12583993 as cited in SEQ ID NO 68098
  misc_feature (1)..(865): Ortholog of  Ceres SEQ ID NO 13654535 as cited in SEQ ID NO 68227
aaactcatcaataacatcttacaaacaacaacaatcaacaatggcaacttccatgatccctatattcgtcaccttcatgctcgtggccgcccacatggccctcgccgatacaaatatgcttcaagacttttgtgttgctgatctctccaacggtttgaaagtcaacggatacccttgcaaagacccagcaaaagtaacaccagaagacttctacttcataggcttagccactgctgcagccacagccaactcttcaatgggctcagctgttacaggagccaacgttgagaaagtgcctggcctcaacactctgggagtctccatctctcggatcgactacgcacctggcggacttaacccaccacatcttcacccaagagcctctgaagccatcttcgtccttgaaggccgtctcttcgtcggtttcttaaccactaccgggaaactcatctccaaacacgtcaacaaaggagacgttttcgttttccccaaagctctcctccatttccagcagaaccctaacaaagctcctgcttccgtcctcgctgctttcgatagccagcttcccgggactcaagttgttggaccatctctgtttggttctaacccaccgattcctgatgacctgcttgccaaggcgttcggggctgcagcaccagagattcagaagattaagggaaaattcccaccaaagaaataaataagtttcagaccagagcactaatctaataatgatatacaatgatgaacataaaaatgtaaacttctaagcaaaagcttgtaactttttttcattcttttctttattattgtagatactcttttgactatatttggcccattgattacgatgagaccagttttc

SEQ ID NO: 21290 - protein, 232 aa, Arabidopsis thaliana
  peptide (1)..(232): Ceres Seq. ID no. 12393294
NSSITSYKQQQSTMATSMIPIFVTFMLVAAHMALADTNMLQDFCVADLSNGLKVNGYPCKDPAKVTPEDFYFIGLATAAATANSSMGSAVTGANVEKVPGLNTLGVSISRIDYAPGGLNPPHLHPRASEAIFVLEGRLFVGFLTTTGKLISKHVNKGDVFVFPKALLHFQQNPNKAPASVLAAFDSQLPGTQVVGPSLFGSNPPIPDDLLAKAFGAAAPEIQKIKGKFPPKK

SEQ ID NO: 21291 - protein, 219 aa, Arabidopsis thaliana
  peptide (1)..(219): Ceres Seq. ID no. 12393295
MATSMIPIFVTFMLVAAHMALADTNMLQDFCVADLSNGLKVNGYPCKDPAKVTPEDFYFIGLATAAATANSSMGSAVTGANVEKVPGLNTLGVSISRIDYAPGGLNPPHLHPRASEAIFVLEGRLFVGFLTTTGKLISKHVNKGDVFVFPKALLHFQQNPNKAPASVLAAFDSQLPGTQVVGPSLFGSNPPIPDDLLAKAFGAAAPEIQKIKGKFPPKK

SEQ ID NO: 21292 - protein, 215 aa, Arabidopsis thaliana
  peptide (1)..(215): Ceres Seq. ID no. 12393296
MIPIFVTFMLVAAHMALADTNMLQDFCVADLSNGLKVNGYPCKDPAKVTPEDFYFIGLATAAATANSSMGSAVTGANVEKVPGLNTLGVSISRIDYAPGGLNPPHLHPRASEAIFVLEGRLFVGFLTTTGKLISKHVNKGDVFVFPKALLHFQQNPNKAPASVLAAFDSQLPGTQVVGPSLFGSNPPIPDDLLAKAFGAAAPEIQKIKGKFPPKK

SEQ ID NO: 21293 - DNA, 1251 bp, Arabidopsis thaliana
  misc_feature (1)..(1251): Ceres Seq. ID no. 12391659
  misc_feature (1)..(1251): Ortholog of  Ceres SEQ ID NO 13659759 as cited in SEQ ID NO 67663
acatgaaaactaaacacacgtacacaagaaaccccaaaacattttgcctagaaagttgtttaaattacctcttaaaccttaagaaatcatatccagaaactcaatggatcaacaagggatggtcaagaaaagactagccgttctcgtcggctgcaactaccctaacacaaggaacgagcttcacggttgcatcaatgatgttctagccatgaaagaaactattttgtcacgtttcggattcaaacaagacgacattgaggtgctaacggacgagccagaatcaaaggtaaagccgacaggtgccaacatcaaggctgctctacgtaggatggtggataaagctcaagccggatctggagacatcttgttcttccactacagtggccatggaactcgtattccttcggttaaatctgctcatccttttaaacaagacgaagctattgttccttgtgatttcaatctcatcacagatgttgatttccgagaattggtcaatcaacttcctaaaggaacaagctttaccatgatctctgattcttgccatagtggtggtctcatcgacaaggagaaagaacagatcggaccctcttcggtctccagcaacatatctccggctattgagacaacgaacaagactataacatcacgtgccttgcccttcaaggcagtccttgaccacttgagttctctcaccggaattacaacttccgacatcggcacacatctacttgagctctttggccgcgatgctggtcttaagtttcggttaccggcaatggatctaatggatcttttggagactatgacggcccgtgaaaaacacgtggactcagggatattgatgagcgggtgtcaggcggatgagacgtctgctgacgtcggcgttgggaacgggaaagcgtacggagcgtttagcaacgcgattcaaagggtgttgaacgaaaatgaaggtgccatgaagaacaagcaactagtgatgatggcaagggatgtgcttgagagactagggtttcatcaacacccttgtctctactgcagcgaccagaacgcagacgcgacgttcctttctcaaccttgaattttaaacgtttgcgttgttttcttttatttgttttatcacgtttgcctttggggttgttgtaaattgttaactggtggaatgtgtgtattttctattctctgtggtgtactctaaaaggaaaaaggacatataaaacttgtttaataacatttatcttttttaatggt

SEQ ID NO: 21294 - protein, 325 aa, Arabidopsis thaliana
  peptide (1)..(325): Ceres Seq. ID no. 12391660
MDQQGMVKKRLAVLVGCNYPNTRNELHGCINDVLAMKETILSRFGFKQDDIEVLTDEPESKVKPTGANIKAALRRMVDKAQAGSGDILFFHYSGHGTRIPSVKSAHPFKQDEAIVPCDFNLITDVDFRELVNQLPKGTSFTMISDSCHSGGLIDKEKEQIGPSSVSSNISPAIETTNKTITSRALPFKAVLDHLSSLTGITTSDIGTHLLELFGRDAGLKFRLPAMDLMDLLETMTAREKHVDSGILMSGCQADETSADVGVGNGKAYGAFSNAIQRVLNENEGAMKNKQLVMMARDVLERLGFHQHPCLYCSDQNADATFLSQP

SEQ ID NO: 21295 - protein, 320 aa, Arabidopsis thaliana
  peptide (1)..(320): Ceres Seq. ID no. 12391661
MVKKRLAVLVGCNYPNTRNELHGCINDVLAMKETILSRFGFKQDDIEVLTDEPESKVKPTGANIKAALRRMVDKAQAGSGDILFFHYSGHGTRIPSVKSAHPFKQDEAIVPCDFNLITDVDFRELVNQLPKGTSFTMISDSCHSGGLIDKEKEQIGPSSVSSNISPAIETTNKTITSRALPFKAVLDHLSSLTGITTSDIGTHLLELFGRDAGLKFRLPAMDLMDLLETMTAREKHVDSGILMSGCQADETSADVGVGNGKAYGAFSNAIQRVLNENEGAMKNKQLVMMARDVLERLGFHQHPCLYCSDQNADATFLSQP

SEQ ID NO: 21296 - protein, 290 aa, Arabidopsis thaliana
  peptide (1)..(290): Ceres Seq. ID no. 12391662
MKETILSRFGFKQDDIEVLTDEPESKVKPTGANIKAALRRMVDKAQAGSGDILFFHYSGHGTRIPSVKSAHPFKQDEAIVPCDFNLITDVDFRELVNQLPKGTSFTMISDSCHSGGLIDKEKEQIGPSSVSSNISPAIETTNKTITSRALPFKAVLDHLSSLTGITTSDIGTHLLELFGRDAGLKFRLPAMDLMDLLETMTAREKHVDSGILMSGCQADETSADVGVGNGKAYGAFSNAIQRVLNENEGAMKNKQLVMMARDVLERLGFHQHPCLYCSDQNADATFLSQP

SEQ ID NO: 21297 - DNA, 1229 bp, Arabidopsis thaliana
  misc_feature (1)..(1229): Ceres Seq. ID no. 12331912
  misc_feature (1)..(1229): Ortholog of  Ceres SEQ ID NO 13594117 as cited in SEQ ID NO 57050
agggttccggattcaggtcggtgtcgccaccgcccttcttcgtgcttctcttccttctttgtcggatcgtcaggtttacagatcagctcttgtggaggatatgggtgaagaagacaccgcgacggtggatcagaacagtttcggtggtggcaaagattcattgcttcgtaatcgtcattcgtcgccattgccttcaccgacacagctttcttctaaagtgattacattgcctaccgtattaacccttggccgtgtagctgccgttccgattctcgtcgccaccttttacgttgattgctggtggggaagaactgctacgacaagtattttcattgcagcagccattacagattggcttgatggatatattgcacggaagatgagattgggttctgaatttggtgcatttttggatccagtggcagataagcttatggtagcagctacattgatattgttgtgcactaaaccaatggtcgccgttgtcttaggaccagttccatggttagtgacagtaccttcaatcgccatcattggtagagagattactatgtctgcagtaagagaatgggctgcatctcaaaacggcaagctttcagaggctgttgctgtaaatagcttgggaaagtggaaaactgcaacgcagatgatagcgctaaccatacttcttgcaagccgggatagcagttttgagagactattaccgtcgggtattgggttgctctatgtatctgcagggctctctatatggtctttagttgtttatatgaggaagatatggagagtactgctaaagaagtagcaacaaaaaactcttttttagggctttttgcattcagtatatacacatagaatggaagatttacctctcttcttcttgaagaaagctgactaatttctctctggatacaaatgaaattagttgggcaagcactataagactcttatatgatgctttagttctgttttcaactttgggcactggggtcgtactctacttggtttggttttgtataatatctctgaatcacattgctccggctagcaccgaattttaatgaagcagcaagcacgatcttatgggcaatgatggaaaagcagcaggcgcaatttcgttctagtcgaagacttggtctcatgaattctgatataaatgaaaacaattgttgcatgtcatgtagatgcttttaccgatacaatataatttatatatataaaaaactttggtt

SEQ ID NO: 21298 - protein, 266 aa, Arabidopsis thaliana
  peptide (1)..(266): Ceres Seq. ID no. 12331913
GFRIQVGVATALLRASLPSLSDRQVYRSALVEDMGEEDTATVDQNSFGGGKDSLLRNRHSSPLPSPTQLSSKVITLPTVLTLGRVAAVPILVATFYVDCWWGRTATTSIFIAAAITDWLDGYIARKMRLGSEFGAFLDPVADKLMVAATLILLCTKPMVAVVLGPVPWLVTVPSIAIIGREITMSAVREWAASQNGKLSEAVAVNSLGKWKTATQMIALTILLASRDSSFERLLPSGIGLLYVSAGLSIWSLVVYMRKIWRVLLKK

SEQ ID NO: 21299 - protein, 233 aa, Arabidopsis thaliana
  peptide (1)..(233): Ceres Seq. ID no. 12331914
MGEEDTATVDQNSFGGGKDSLLRNRHSSPLPSPTQLSSKVITLPTVLTLGRVAAVPILVATFYVDCWWGRTATTSIFIAAAITDWLDGYIARKMRLGSEFGAFLDPVADKLMVAATLILLCTKPMVAVVLGPVPWLVTVPSIAIIGREITMSAVREWAASQNGKLSEAVAVNSLGKWKTATQMIALTILLASRDSSFERLLPSGIGLLYVSAGLSIWSLVVYMRKIWRVLLKK

SEQ ID NO: 21300 - protein, 140 aa, Arabidopsis thaliana
  peptide (1)..(140): Ceres Seq. ID no. 12331915
MRLGSEFGAFLDPVADKLMVAATLILLCTKPMVAVVLGPVPWLVTVPSIAIIGREITMSAVREWAASQNGKLSEAVAVNSLGKWKTATQMIALTILLASRDSSFERLLPSGIGLLYVSAGLSIWSLVVYMRKIWRVLLKK

SEQ ID NO: 21301 - DNA, 1091 bp, Arabidopsis thaliana
  misc_feature (1)..(1091): Ceres Seq. ID no. 12333256
  misc_feature (1)..(1091): Ortholog of  Ceres SEQ ID NO 13585461 as cited in SEQ ID NO 69106
aaaacgacaagtagttttcttagaatttatcattatccagatttttgagaaggagacggcgaagaagagaagaagatcaaaactatggcgagtcaccacgcgatcgaagtgacgaagacggtgctagaagtagccgacgtagcatggaccgccgtagaaacctaccatcaccatcaccaccaccaagacgagaatcacgagtcaacgaatccgatttctgatccacgagatcgtgaattagaagctcttcgtcaagagaatcgtcgtctcaggactttgcttgaatcgaatcttaaactctttgagactctcgctgaatctgctgcgttctctcatgattgccctagcgacctctatgctaggcttgtaacgatggttacttcaagagatttcttggctagattagagaatcttagacaagctttatctaatggtactcagaatcaatttccattcaaggaaccaacagaagatgatgtgaagactgttgaagttcttatagagatgggtcatcaagagccaagttggtgggttttggttactgatgatatggttcctagtaatgtcgaggaacaaagcgcgatcgataacgaacattacattgttgtgaatgaagatcatgtgattgatgctgttgctcactttttggctaaatgtattatgtcaaatcccaaagctaagaatctcaaacctgaagagcttcagaaactgctggtgcaagaagttactgctttgagcaaggtagggaaggtagtggatatatggcatgctgggaaaatgttctacacgttttccacttggggacttgcttttggagggttataccaagctcgtggtgcgctgaagatagctgctaagggtgttcatgcgaccagcaaggttgttcttagggctctctgaaagttataagaggtctatctcctactatctttgggtttgtctttctgtgcgagactctgttttaaaattaatagcattgcgtgtgtaaatagtgtaaatagggtttgatcaatgttgtatttcatattgatttcaaattcgacatttgttctttgattctcgtttataaacgcagacaatttgtgaatacc

SEQ ID NO: 21302 - protein, 271 aa, Arabidopsis thaliana
  peptide (1)..(271): Ceres Seq. ID no. 12333257
MASHHAIEVTKTVLEVADVAWTAVETYHHHHHHQDENHESTNPISDPRDRELEALRQENRRLRTLLESNLKLFETLAESAAFSHDCPSDLYARLVTMVTSRDFLARLENLRQALSNGTQNQFPFKEPTEDDVKTVEVLIEMGHQEPSWWVLVTDDMVPSNVEEQSAIDNEHYIVVNEDHVIDAVAHFLAKCIMSNPKAKNLKPEELQKLLVQEVTALSKVGKVVDIWHAGKMFYTFSTWGLAFGGLYQARGALKIAAKGVHATSKVVLRAL

SEQ ID NO: 21303 - protein, 175 aa, Arabidopsis thaliana
  peptide (1)..(175): Ceres Seq. ID no. 12333258
MVTSRDFLARLENLRQALSNGTQNQFPFKEPTEDDVKTVEVLIEMGHQEPSWWVLVTDDMVPSNVEEQSAIDNEHYIVVNEDHVIDAVAHFLAKCIMSNPKAKNLKPEELQKLLVQEVTALSKVGKVVDIWHAGKMFYTFSTWGLAFGGLYQARGALKIAAKGVHATSKVVLRAL

SEQ ID NO: 21304 - DNA, 1790 bp, Arabidopsis thaliana
  misc_feature (1)..(1790): Ceres Seq. ID no. 12371075
  misc_feature (1)..(1790): Ortholog of  Ceres SEQ ID NO 13596816 as cited in SEQ ID NO 62287
atcccaaatcacactcaccactctctcttctcaacatttttctccaacaaaaacaaaaaacaatgactccttttgctctgttcctcttcactctccttgccctttcaagttcatgttgctctgccattggtccacaaaacaacagaacagtgttagcacttgcaagcagaattgggatcaactatggaaaattaggcaacaatcttccttctccttaccaatcaatcaacctcatcaaaaccattaaagcaggccacgtcaagctctatgacgccgatccagaaaccctaaagctcctctctacgaccaatctttacgtcaccatcatggtccctaacaaccagatcatctcaataggtgctgatcaagccgctgctgataactgggtcgccactaatgtccttccttttcacccgcaaacccgaatccgattcgtcctcgttggcaacgaggtcctcagctacagttctgatcaagacaagcaaatatgggctaatcttgtccctgccatgcgtaaagtagtgaactctcttagagctcgtggaattcacaacatcaaagttgggacacctcttgccatggacgctcttcgttcgagttttcctccttcgagtggtacattccgggaagatatcgctgttccgatgatgttaccgttgttgaagtttctcaatggaacaaactctttcttcttccttgatgtttacccttacttcccttggtctactgatccggttaataaccatttggattttgctctgttcgaatcgaattctacttataccgatcctcaaaccggtttggtttacaccaatcttctagaccagatgctcgattcggttatctttgcgatgaccaagctcggttatccgaatatcagtctcgcaatctctgaaaccgggtggcctaatgacggtgatatccatgaaaccggagctaatattgtcaatgccgcgacgtataaccggaatttgatcaagaagatgactgctaacccgccactcggtacaccagctaggcgcggtgcacctataccgacgtttttgttctctttgttcaatgaaaaccagaaacccggttcgggaacagagagacattggggaattttgaaccctgacggtacaccgatctacgacatcgatttcagcggtacaagatcgttttctggttttgattcgttgcctaaaccgagtaacaatgttccgtttaaaggtaatgtatggtgtgtggcggttgatggggccgatgaggcagagctagggcaggcgcttaactttgcttgcggaagaagcaatgcaacatgtgcagcgttggctccaggaggagaatgctatgcaccggtgacggttacttggcatgcaagctatgcgtttagctcgtactgggctcagttccggaaccaaagctctcaatgctacttcaatggtttggctcgtgagaccacgaccaaccctggaaatgagcgttgcaagtttcctagcgttacattgtgaggctgcctcgtgactcaggcgtgtggaggaaaggatcaaaagaatcattcgcattaagttgattatatctcttgataattatgattagtttcctttttattccaagtttttactctttgtgtcccattgttgtgcaagatctataataatctatagaaatttgttcctcatcccttctcatttctcatatatctagtagtttattaatgttctgaaggaaattatgagaattttataactaattcaagaacatgttttgcgatcattactatacgagaaatatgaagtttttgatcc

SEQ ID NO: 21305 - protein, 496 aa, Arabidopsis thaliana
  peptide (1)..(496): Ceres Seq. ID no. 12371076
PKSHSPLSLLNIFLQQKQKTMTPFALFLFTLLALSSSCCSAIGPQNNRTVLALASRIGINYGKLGNNLPSPYQSINLIKTIKAGHVKLYDADPETLKLLSTTNLYVTIMVPNNQIISIGADQAAADNWVATNVLPFHPQTRIRFVLVGNEVLSYSSDQDKQIWANLVPAMRKVVNSLRARGIHNIKVGTPLAMDALRSSFPPSSGTFREDIAVPMMLPLLKFLNGTNSFFFLDVYPYFPWSTDPVNNHLDFALFESNSTYTDPQTGLVYTNLLDQMLDSVIFAMTKLGYPNISLAISETGWPNDGDIHETGANIVNAATYNRNLIKKMTANPPLGTPARRGAPIPTFLFSLFNENQKPGSGTERHWGILNPDGTPIYDIDFSGTRSFSGFDSLPKPSNNVPFKGNVWCVAVDGADEAELGQALNFACGRSNATCAALAPGGECYAPVTVTWHASYAFSSYWAQFRNQSSQCYFNGLARETTTNPGNERCKFPSVTL

SEQ ID NO: 21306 - protein, 476 aa, Arabidopsis thaliana
  peptide (1)..(476): Ceres Seq. ID no. 12371077
MTPFALFLFTLLALSSSCCSAIGPQNNRTVLALASRIGINYGKLGNNLPSPYQSINLIKTIKAGHVKLYDADPETLKLLSTTNLYVTIMVPNNQIISIGADQAAADNWVATNVLPFHPQTRIRFVLVGNEVLSYSSDQDKQIWANLVPAMRKVVNSLRARGIHNIKVGTPLAMDALRSSFPPSSGTFREDIAVPMMLPLLKFLNGTNSFFFLDVYPYFPWSTDPVNNHLDFALFESNSTYTDPQTGLVYTNLLDQMLDSVIFAMTKLGYPNISLAISETGWPNDGDIHETGANIVNAATYNRNLIKKMTANPPLGTPARRGAPIPTFLFSLFNENQKPGSGTERHWGILNPDGTPIYDIDFSGTRSFSGFDSLPKPSNNVPFKGNVWCVAVDGADEAELGQALNFACGRSNATCAALAPGGECYAPVTVTWHASYAFSSYWAQFRNQSSQCYFNGLARETTTNPGNERCKFPSVTL

SEQ ID NO: 21307 - protein, 388 aa, Arabidopsis thaliana
  peptide (1)..(388): Ceres Seq. ID no. 12371078
MVPNNQIISIGADQAAADNWVATNVLPFHPQTRIRFVLVGNEVLSYSSDQDKQIWANLVPAMRKVVNSLRARGIHNIKVGTPLAMDALRSSFPPSSGTFREDIAVPMMLPLLKFLNGTNSFFFLDVYPYFPWSTDPVNNHLDFALFESNSTYTDPQTGLVYTNLLDQMLDSVIFAMTKLGYPNISLAISETGWPNDGDIHETGANIVNAATYNRNLIKKMTANPPLGTPARRGAPIPTFLFSLFNENQKPGSGTERHWGILNPDGTPIYDIDFSGTRSFSGFDSLPKPSNNVPFKGNVWCVAVDGADEAELGQALNFACGRSNATCAALAPGGECYAPVTVTWHASYAFSSYWAQFRNQSSQCYFNGLARETTTNPGNERCKFPSVTL

SEQ ID NO: 21308 - DNA, 656 bp, Arabidopsis thaliana
  misc_feature (1)..(656): Ceres Seq. ID no. 12370552
  misc_feature (1)..(656): Ortholog of  Ceres SEQ ID NO 14305967 as cited in SEQ ID NO 1343
  misc_feature (1)..(656): Ortholog of  Ceres SEQ ID NO 14309614 as cited in SEQ ID NO 52633
attcatctccaaactttcaaaaaaaaacctaaaacaaaaaaaatctctttccttcttctttctccatcaatggcgtcaacaaaacccaccgatcaaatcaaacaactcaaagatatcttcgctcgcttcgacatggacaaggacggaagcttaacgcagctagaactcgccgctcttctgcgttctctcggaatcaaacctcgcggcgatcaaatctctcttctgtaaaaccaaatcgaccgtaacggtaacggatccgtagagttcgacgagctcgtcgtgggcgatattgccggatataaacgaagaggtgttgataaatcaagaacagttgatggaggttttccgttcgtttgatcgtgacggtaacggttcaataacggcggcggaacttgctgggtcaatggctaaaatgggacatccgttgacttaccgtgaattaacggaaatgatgacggaagctgattcaaacggtgacggtgttattagttttaatgagttttctcatattatggctaaatcggctgctgattttcttggattaaccgcttcttgatctgttttgttttaattactctctttttttcttctcctgtcaatgcaacttgtgcaattaacaatgtgctaatctttcgtttggtgtgacgtaaaaattt

SEQ ID NO: 21309 - protein, 75 aa, Arabidopsis thaliana
  peptide (1)..(75): Ceres Seq. ID no. 12370553
IHLQTFKKKPKTKKISFLLLSPSMASTKPTDQIKQLKDIFARFDMDKDGSLTQLELAALLRSLGIKPRGDQISLL

SEQ ID NO: 21310 - protein, 73 aa, Arabidopsis thaliana
  peptide (1)..(73): Ceres Seq. ID no. 12370554
MEVFRSFDRDGNGSITAAELAGSMAKMGHPLTYRELTEMMTEADSNGDGVISFNEFSHIMAKSAADFLGLTAS

SEQ ID NO: 21311 - protein, 52 aa, Arabidopsis thaliana
  peptide (1)..(52): Ceres Seq. ID no. 12370555
MASTKPTDQIKQLKDIFARFDMDKDGSLTQLELAALLRSLGIKPRGDQISLL

SEQ ID NO: 21312 - DNA, 1900 bp, Arabidopsis thaliana
  misc_feature (1)..(1900): Ceres Seq. ID no. 13494031
  misc_feature (1)..(1900): Ortholog of  Ceres SEQ ID NO 14307964 as cited in SEQ ID NO 66191
  misc_feature (1)..(1900): Ortholog of  Ceres SEQ ID NO 13502874 as cited in SEQ ID NO 66298
  misc_feature (1)..(1900): Ortholog of  Ceres SEQ ID NO 12614124 as cited in SEQ ID NO 68392
cctttcgtcttaaaccccacagcaaaaagccactctcctttctctctctctcttgttcctctgcatccatggccaccaagctcgacaccagtagcttacttttggccctcttgtccaaatgtagcctccttactcaaaccaatcttgctctctctctcctcgtagcctccctagcttctctcgctctttctctcttcttctggtctcatcccggaggacccgcatggggaaagtacttcctccaccgccgccgtcaaaccaccgtgatacccgggccaagaggcttaccttttgtcggaagcatgtctctcatgtcaaacactctggctcaccgttgcatagccgcaaccgcagagaaatttagagccgaacggttaatggcgtttagtttgggagaaactcgcgtgatcgtcacgtgcaatcctgatgtagctaaagagattctaaacagtccggttttcgctgaccgcccggttaaggaatcagcttattccctcatgtttaaccgtgctatcggtttcgctccttacggcgtttactggcgaaccttgagaaaaatcgcgtctaatcatcttttcagcccgaaacagattaaacgttccgaaacgcagagaagcgtgatcgcgaatcaaatcgtgaagtgtctcacaaaacagagtaacaccaaaggtctctgtttcgcacgtgacttgatcaaaacggcatcgcttaataacatgatgtgctctgttttcggaaaagaatacgagcttgaggaagagcatgaagaagtgagtgagctacgtgaattggtggaagaaggttatgatttactcggtacactgaattggaccgatcatctcccatggctctctgaatttgatcctcaaagaatccggtctagatgctctaatctcgtcccaaaagtaaaccggtttgtgaaccggattatctctgaccaccgtgaacaaactcgtgactcaccgagtgacttcgttgacgtattgctctctctcgatggtcctgataaattatccgaccctgatatcatcgccgttctatgggaaatgatattcagaggaactgacacggtggctgttttgatcgagtggattcttgctaggatggtccttcatccagatattcaatcgacggttcacaatgagcttgatcaaatcgtgggacgatcaagggctgtcgaagagtctgacgtggtgtctctagtatatctaacggctgtggtgaaagaagtcttgaggcttcacccgccaggcccactactctcatgggcccgtttagcaatcacagacacgatcatcgacggtcgtcgtgttccggcggggaccaccgcaatggtgaacatgtgggctattgcacacgatccacacgtgtgggagaatccgttggagtttaaacccgaacgttttgtagccaaggaaggtgaggttgagttctcggttcttgggtctgatttgaggcttgcaccgttcgggtccggtcgtcgggtttgccccgggaagaatcttggtttgaccaccgtgacgttttggactgcgacgcttttgcatgagtttgaatggctgacgccgtccgatgagaagaccgttgacttgtccgagaaactgaggctctcgtgtgagatggctaatcctcttgctgctaaattacgccccaggcgcagttttagtgtatgataagggtaaggctatacacagatacagtggtaactaaagcgaaggaaaattagtgtgaatttaaagcaaaagaataaaataaagaacaaagaaagtaaaggaaacaaaaaaaaagaatcatacaaaaaatactaataagaatggtaatgaagcttttatattaaactaacatcttgatacgtgttgtatatatgatgaaaacattaatgtcacaaagaaaagttaat

SEQ ID NO: 21313 - protein, 556 aa, Arabidopsis thaliana
  peptide (1)..(556): Ceres Seq. ID no. 13494032
FRLKPHSKKPLSFLSLSCSSASMATKLDTSSLLLALLSKCSLLTQTNLALSLLVASLASLALSLFFWSHPGGPAWGKYFLHRRRQTTVIPGPRGLPFVGSMSLMSNTLAHRCIAATAEKFRAERLMAFSLGETRVIVTCNPDVAKEILNSPVFADRPVKESAYSLMFNRAIGFAPYGVYWRTLRKIASNHLFSPKQIKRSETQRSVIANQIVKCLTKQSNTKGLCFARDLIKTASLNNMMCSVFGKEYELEEEHEEVSELRELVEEGYDLLGTLNWTDHLPWLSEFDPQRIRSRCSNLVPKVNRFVNRIISDHREQTRDSPSDFVDVLLSLDGPDKLSDPDIIAVLWEMIFRGTDTVAVLIEWILARMVLHPDIQSTVHNELDQIVGRSRAVEESDVVSLVYLTAVVKEVLRLHPPGPLLSWARLAITDTIIDGRRVPAGTTAMVNMWAIAHDPHVWENPLEFKPERFVAKEGEVEFSVLGSDLRLAPFGSGRRVCPGKNLGLTTVTFWTATLLHEFEWLTPSDEKTVDLSEKLRLSCEMANPLAAKLRPRRSFSV

SEQ ID NO: 21314 - protein, 534 aa, Arabidopsis thaliana
  peptide (1)..(534): Ceres Seq. ID no. 13494033
MATKLDTSSLLLALLSKCSLLTQTNLALSLLVASLASLALSLFFWSHPGGPAWGKYFLHRRRQTTVIPGPRGLPFVGSMSLMSNTLAHRCIAATAEKFRAERLMAFSLGETRVIVTCNPDVAKEILNSPVFADRPVKESAYSLMFNRAIGFAPYGVYWRTLRKIASNHLFSPKQIKRSETQRSVIANQIVKCLTKQSNTKGLCFARDLIKTASLNNMMCSVFGKEYELEEEHEEVSELRELVEEGYDLLGTLNWTDHLPWLSEFDPQRIRSRCSNLVPKVNRFVNRIISDHREQTRDSPSDFVDVLLSLDGPDKLSDPDIIAVLWEMIFRGTDTVAVLIEWILARMVLHPDIQSTVHNELDQIVGRSRAVEESDVVSLVYLTAVVKEVLRLHPPGPLLSWARLAITDTIIDGRRVPAGTTAMVNMWAIAHDPHVWENPLEFKPERFVAKEGEVEFSVLGSDLRLAPFGSGRRVCPGKNLGLTTVTFWTATLLHEFEWLTPSDEKTVDLSEKLRLSCEMANPLAAKLRPRRSFSV

SEQ ID NO: 21315 - protein, 456 aa, Arabidopsis thaliana
  peptide (1)..(456): Ceres Seq. ID no. 13494034
MSLMSNTLAHRCIAATAEKFRAERLMAFSLGETRVIVTCNPDVAKEILNSPVFADRPVKESAYSLMFNRAIGFAPYGVYWRTLRKIASNHLFSPKQIKRSETQRSVIANQIVKCLTKQSNTKGLCFARDLIKTASLNNMMCSVFGKEYELEEEHEEVSELRELVEEGYDLLGTLNWTDHLPWLSEFDPQRIRSRCSNLVPKVNRFVNRIISDHREQTRDSPSDFVDVLLSLDGPDKLSDPDIIAVLWEMIFRGTDTVAVLIEWILARMVLHPDIQSTVHNELDQIVGRSRAVEESDVVSLVYLTAVVKEVLRLHPPGPLLSWARLAITDTIIDGRRVPAGTTAMVNMWAIAHDPHVWENPLEFKPERFVAKEGEVEFSVLGSDLRLAPFGSGRRVCPGKNLGLTTVTFWTATLLHEFEWLTPSDEKTVDLSEKLRLSCEMANPLAAKLRPRRSFSV

SEQ ID NO: 21316 - DNA, 1723 bp, Arabidopsis thaliana
  misc_feature (1)..(1723): Ceres Seq. ID no. 13499982
  misc_feature (1)..(1723): Ortholog of  Ceres SEQ ID NO 13597732 as cited in SEQ ID NO 64810
  misc_feature (1)..(1723): Ortholog of  Ceres SEQ ID NO 14301912 as cited in SEQ ID NO 67786
ctcttcccacttctcactctctgatctcagatctctccctccctcttttcacagatccattcaacaatctccaaagaagatggaaccagtctcttcatggggtaacacctctctcgtctccgtagatccagagatccacgacctaatcgagaaggagaaacgtcggcaatgtcgaggaatcgaacttatcgcttccgagaatttcacttccttcgccgtcatcgaagctctcggaagtgccttaaccaacaaatactccgaaggtattcctggtaatcgttattacggaggtaacgaattcatcgatgagatcgagaatctttgccgttcacgtgctctcgaagctttccattgtgatccagcagcgtggggcgttaatgttcagccgtattctggatctccggcgaatttcgctgcttacacggctttgcttcagcctcacgatcgtatcatggggcttgatttgccttcaggtggtcatttgactcatggttactatacatctggtggtaagaagacctctgcgacttcgatctactttgagagtcttccgtataaggtgaatttcaccactggttacattgattacgataagcttgaagagaaggcgttggatttcaggcctaagttgcttatctgtggtggtagtgcgtatcctagggattgggattacgctagatttagagctattgctgataaggttggagctcttttgctttgtgacatggctcacatcagtggtctcgttgctgctcaggaagctgcaaacccatttgagtactgtgacgttgtgacaaccacaacccacaagagtttgaggggtccaagggctggtatgattttctacaggaagggtccaaaaccaccaaagaagggtcaacccgagggtgcagtctatgattttgaggacaaaatcaactttgctgtattccctgcgcttcaaggtggtcctcacaatcaccagattggtgctttagctgttgcgttgaagcaggctaatactcctgggttcaaggtctacgcaaaacaagtgaaagccaatgctgttgcccttggaaactacctaatgagcaagggttaccagattgtgaccaatggaactgagaaccaccttgttctctgggatcttcgccctcttggattgaccggaaacaaggttgagaagctctgcgatctgtgcagcattacattgaacaagaacgcagtatttggagacagtagtgctcttgctcctggaggtgtaagaatcggtgcacccgcgatgacatcgagaggattggtggagaaggactttgagcagataggagaattcctgagccgtgcagtgacactgacgttggacatccaaaagacatacggtaagttgttgaaggacttcaacaagggtttggtgaacaacaaagatctcgaccagctcaaggctgacgtcgagaagttctctgcgtcttatgaaatgcctggattcctcatgtctgagatgaagtaccaggattagagatctttctctatatgcaagagtaatcttctattatctaccatatatataaaatatgcttttgtaggatcgccttaaaggcgaagagatgaagatgcaaacagtaaaaaagggttttcttttcagctatttcttcttgaatgtttttttttctttttattttggtttcttattgaaattgttgtatttttgttggctttttttctaataatatcagcgagttttttc

SEQ ID NO: 21317 - protein, 497 aa, Arabidopsis thaliana
  peptide (1)..(497): Ceres Seq. ID no. 13499983
SSHFSLSDLRSLPPSFHRSIQQSPKKMEPVSSWGNTSLVSVDPEIHDLIEKEKRRQCRGIELIASENFTSFAVIEALGSALTNKYSEGIPGNRYYGGNEFIDEIENLCRSRALEAFHCDPAAWGVNVQPYSGSPANFAAYTALLQPHDRIMGLDLPSGGHLTHGYYTSGGKKTSATSIYFESLPYKVNFTTGYIDYDKLEEKALDFRPKLLICGGSAYPRDWDYARFRAIADKVGALLLCDMAHISGLVAAQEAANPFEYCDVVTTTTHKSLRGPRAGMIFYRKGPKPPKKGQPEGAVYDFEDKINFAVFPALQGGPHNHQIGALAVALKQANTPGFKVYAKQVKANAVALGNYLMSKGYQIVTNGTENHLVLWDLRPLGLTGNKVEKLCDLCSITLNKNAVFGDSSALAPGGVRIGAPAMTSRGLVEKDFEQIGEFLSRAVTLTLDIQKTYGKLLKDFNKGLVNNKDLDQLKADVEKFSASYEMPGFLMSEMKYQD

SEQ ID NO: 21318 - protein, 471 aa, Arabidopsis thaliana
  peptide (1)..(471): Ceres Seq. ID no. 13499984
MEPVSSWGNTSLVSVDPEIHDLIEKEKRRQCRGIELIASENFTSFAVIEALGSALTNKYSEGIPGNRYYGGNEFIDEIENLCRSRALEAFHCDPAAWGVNVQPYSGSPANFAAYTALLQPHDRIMGLDLPSGGHLTHGYYTSGGKKTSATSIYFESLPYKVNFTTGYIDYDKLEEKALDFRPKLLICGGSAYPRDWDYARFRAIADKVGALLLCDMAHISGLVAAQEAANPFEYCDVVTTTTHKSLRGPRAGMIFYRKGPKPPKKGQPEGAVYDFEDKINFAVFPALQGGPHNHQIGALAVALKQANTPGFKVYAKQVKANAVALGNYLMSKGYQIVTNGTENHLVLWDLRPLGLTGNKVEKLCDLCSITLNKNAVFGDSSALAPGGVRIGAPAMTSRGLVEKDFEQIGEFLSRAVTLTLDIQKTYGKLLKDFNKGLVNNKDLDQLKADVEKFSASYEMPGFLMSEMKYQD

SEQ ID NO: 21319 - protein, 347 aa, Arabidopsis thaliana
  peptide (1)..(347): Ceres Seq. ID no. 13499985
MGLDLPSGGHLTHGYYTSGGKKTSATSIYFESLPYKVNFTTGYIDYDKLEEKALDFRPKLLICGGSAYPRDWDYARFRAIADKVGALLLCDMAHISGLVAAQEAANPFEYCDVVTTTTHKSLRGPRAGMIFYRKGPKPPKKGQPEGAVYDFEDKINFAVFPALQGGPHNHQIGALAVALKQANTPGFKVYAKQVKANAVALGNYLMSKGYQIVTNGTENHLVLWDLRPLGLTGNKVEKLCDLCSITLNKNAVFGDSSALAPGGVRIGAPAMTSRGLVEKDFEQIGEFLSRAVTLTLDIQKTYGKLLKDFNKGLVNNKDLDQLKADVEKFSASYEMPGFLMSEMKYQD

SEQ ID NO: 21320 - DNA, 1118 bp, Arabidopsis thaliana
  misc_feature (1)..(1118): Ceres Seq. ID no. 12334090
  misc_feature (1)..(1118): Ortholog of  Ceres SEQ ID NO 13657872 as cited in SEQ ID NO 66357
aaaactatctcgtctcttcgaacacttcaaaaaacatagcaacttcacttcttcctcctccttcctagtttctcgtttggtctcattctaattacctcctcctctgttctgctcatcccctgtttttatagttttatataaaatggtgagccaaaacgtcgtcgtatcagacgccaagaccgggatcataacggtctctacagtctctaactcctctgtctttactcctaccgctcaaaaaccaccgactgctcctggttacatctcagtttccaagaaaaaactcctcaaaaaccttgaaatcaatggagctgatcaaagtcaaagacttaactcttgggttgactccatgagagcttcttctcctacccatctcaaatcactttcctctttctcttccgaagaagaacacaattcttggatcaaacgacatccatcagcacttaacatgttcgaacgaatcatcgaagaagcaagaggaaaacaaatcgtcatgtttcttgattatgacggtactctttctccgatcgtggatgatccagacagagctttcatgactagcaagatgagaagaacagtgaaaaaaatggccaagtgttttccaacttctatagttactggtagatgcatagacaaggtttatagctttgtgaagctagcagaactgtattatgctggaagccatgggatggatattaaaggcccaactaaaggtttctcaagatacaataaggataaaccatccgttctttaccaaccagccggcgactttcttcccatgatcgatgaggtttataaacaattagtggagaaaaccaaatctacaccaggagccaaagtggagaacaacaagttctgtctttctgtgcacttccgttgtgttgacgagaagaaatggagcgagctggcttcaaaagttcggtcggtggtaaagaactatccgacgttgaaactgtctcaaggtcgaaaggtttttgaaatccgacctataattaaatggaacaaaggcaaggctcttgagtttttgttagagtcactcggtgagactctctttggtcgtttgttgaattttatttttgcttatttaaactctttcatcaacaataatattagctcgg

SEQ ID NO: 21321 - protein, 325 aa, Arabidopsis thaliana
  peptide (1)..(325): Ceres Seq. ID no. 12334091
MVSQNVVVSDAKTGIITVSTVSNSSVFTPTAQKPPTAPGYISVSKKKLLKNLEINGADQSQRLNSWVDSMRASSPTHLKSLSSFSSEEEHNSWIKRHPSALNMFERIIEEARGKQIVMFLDYDGTLSPIVDDPDRAFMTSKMRRTVKKMAKCFPTSIVTGRCIDKVYSFVKLAELYYAGSHGMDIKGPTKGFSRYNKDKPSVLYQPAGDFLPMIDEVYKQLVEKTKSTPGAKVENNKFCLSVHFRCVDEKKWSELASKVRSVVKNYPTLKLSQGRKVFEIRPIIKWNKGKALEFLLESLGETLFGRLLNFIFAYLNSFINNNISS

SEQ ID NO: 21322 - protein, 256 aa, Arabidopsis thaliana
  peptide (1)..(256): Ceres Seq. ID no. 12334092
MRASSPTHLKSLSSFSSEEEHNSWIKRHPSALNMFERIIEEARGKQIVMFLDYDGTLSPIVDDPDRAFMTSKMRRTVKKMAKCFPTSIVTGRCIDKVYSFVKLAELYYAGSHGMDIKGPTKGFSRYNKDKPSVLYQPAGDFLPMIDEVYKQLVEKTKSTPGAKVENNKFCLSVHFRCVDEKKWSELASKVRSVVKNYPTLKLSQGRKVFEIRPIIKWNKGKALEFLLESLGETLFGRLLNFIFAYLNSFINNNISS

SEQ ID NO: 21323 - protein, 223 aa, Arabidopsis thaliana
  peptide (1)..(223): Ceres Seq. ID no. 12334093
MFERIIEEARGKQIVMFLDYDGTLSPIVDDPDRAFMTSKMRRTVKKMAKCFPTSIVTGRCIDKVYSFVKLAELYYAGSHGMDIKGPTKGFSRYNKDKPSVLYQPAGDFLPMIDEVYKQLVEKTKSTPGAKVENNKFCLSVHFRCVDEKKWSELASKVRSVVKNYPTLKLSQGRKVFEIRPIIKWNKGKALEFLLESLGETLFGRLLNFIFAYLNSFINNNISS

SEQ ID NO: 21324 - DNA, 1391 bp, Arabidopsis thaliana
  misc_feature (1)..(1391): Ceres Seq. ID no. 13488285
  misc_feature (1)..(1391): Ortholog of  Ceres SEQ ID NO 13495628 as cited in SEQ ID NO 60727
gcactctatatcaaacatttcttttaaaaatgagaaagttgttggcatcgccgtttagttcattactcgccgtcgttttcatttccgtcatctccgtcgtcagatgctgctctcctaaagatcagacggctctcaatgctttcaagtcgtcactgagcgaaccaaacctcggtatcttcaacacttggtctgaaaacactgattgttgcaaggaatggtacggtatcagctgcgatcctgattcgggtcgggtcactgatatttctctccggggagaatctgaagacgccattttccaaaaggcaggccggtccggttatatgtccggttcgattgatccagcagtttgtgacttaaccgcactcacttccctcgttctcgccgactggaaaggaatcaccggagagattcctccgtgcattacttccctagcttcgctccgtatcctcgatctcgccggcaacaagatcaccggggagattcccgcggaaatcggcaaactctcgaaactcgctgttttaaacctcgccgagaatcaaatgtccggcgagattccggcgtcactgacgtcactcatcgagttgaagcatcttgaattgacggaaaatggaatcaccggcgtgatcccggccgatttcggatcgttgaagatgttgagcagagttttactgggccgtaacgaactaaccgggtcaattccagagtcgatctcgggtatggaacggttagcggatctggatctatccaaaaaccatatcgaaggtccgatacccgaatggatgggtaacatgaaggtactctcacttttgaatctcgattgcaattcgttaaccggtccaatccccggttcgcttcttagcaattccggtttagatgttgccaatttgagccgaaatgcgttggaaggaactatacccgacgttttcgggtcaaaaacgtatttagtttcgcttgatctgtcacacaatagtctatcgggtcggatcccggattcgttgtcgtcagctaagtttgtgggacatttggatattagccataacaagctttgtgggcgtattccaacgggttttccttttgatcaccttgaagctacgtcgtttagtgacaaccaatgtctctgcggtggccctttgacgacgtcatgttaataacaaggatatggtttctggttttactgaaccgggttattctttttgctgttgctcttgttcgttgtatcaaacttgtgatattttgcttttcatttcttcgtctttcagattttagtttctaaagctaagatatgttactggcaacggacaggtacaccgatccaatatggtttgcggtctatgtacaatgaatccggatgtaaaatcaaaagcaatgttatagaatttaatttcaagatc

SEQ ID NO: 21325 - protein, 381 aa, Arabidopsis thaliana
  peptide (1)..(381): Ceres Seq. ID no. 13488286
TLYQTFLLKMRKLLASPFSSLLAVVFISVISVVRCCSPKDQTALNAFKSSLSEPNLGIFNTWSENTDCCKEWYGISCDPDSGRVTDISLRGESEDAIFQKAGRSGYMSGSIDPAVCDLTALTSLVLADWKGITGEIPPCITSLASLRILDLAGNKITGEIPAEIGKLSKLAVLNLAENQMSGEIPASLTSLIELKHLELTENGITGVIPADFGSLKMLSRVLLGRNELTGSIPESISGMERLADLDLSKNHIEGPIPEWMGNMKVLSLLNLDCNSLTGPIPGSLLSNSGLDVANLSRNALEGTIPDVFGSKTYLVSLDLSHNSLSGRIPDSLSSAKFVGHLDISHNKLCGRIPTGFPFDHLEATSFSDNQCLCGGPLTTSC

SEQ ID NO: 21326 - protein, 372 aa, Arabidopsis thaliana
  peptide (1)..(372): Ceres Seq. ID no. 13488287
MRKLLASPFSSLLAVVFISVISVVRCCSPKDQTALNAFKSSLSEPNLGIFNTWSENTDCCKEWYGISCDPDSGRVTDISLRGESEDAIFQKAGRSGYMSGSIDPAVCDLTALTSLVLADWKGITGEIPPCITSLASLRILDLAGNKITGEIPAEIGKLSKLAVLNLAENQMSGEIPASLTSLIELKHLELTENGITGVIPADFGSLKMLSRVLLGRNELTGSIPESISGMERLADLDLSKNHIEGPIPEWMGNMKVLSLLNLDCNSLTGPIPGSLLSNSGLDVANLSRNALEGTIPDVFGSKTYLVSLDLSHNSLSGRIPDSLSSAKFVGHLDISHNKLCGRIPTGFPFDHLEATSFSDNQCLCGGPLTTSC

SEQ ID NO: 21327 - protein, 275 aa, Arabidopsis thaliana
  peptide (1)..(275): Ceres Seq. ID no. 13488288
MSGSIDPAVCDLTALTSLVLADWKGITGEIPPCITSLASLRILDLAGNKITGEIPAEIGKLSKLAVLNLAENQMSGEIPASLTSLIELKHLELTENGITGVIPADFGSLKMLSRVLLGRNELTGSIPESISGMERLADLDLSKNHIEGPIPEWMGNMKVLSLLNLDCNSLTGPIPGSLLSNSGLDVANLSRNALEGTIPDVFGSKTYLVSLDLSHNSLSGRIPDSLSSAKFVGHLDISHNKLCGRIPTGFPFDHLEATSFSDNQCLCGGPLTTSC

SEQ ID NO: 21328 - DNA, 1776 bp, Arabidopsis thaliana
  misc_feature (1)..(1776): Ceres Seq. ID no. 12334196
  misc_feature (1)..(1776): Ortholog of  Ceres SEQ ID NO 14311942 as cited in SEQ ID NO 51516
gttaaaagctctcacacaaccaccgttctccgtcacggtggcgctttattctctcatcggagcgcctcaccggtggcagacggtgtcgttgttcctctcctaaaacctccatcaatcaccatctctttacacagagctctaaccaaaatcttcgagagatggggcagagtatgagctgtggaagtcgaccggagcacggaatattcgcctctgtacagtgcggcgatatcatcactatccgtcgtgtgatggcgacggagcctagtctgttgaatcaaactactccttatgatcgtcactctgttcttcatgtcgctgctgctaatggtcagatcgagattttgtcattgcttttggaacgatttacgaatccagatttgttgaatcgtcacaagcagactccgttaatgttggctgcgatgtatggaagaatctcttgtgtgaagaagctagctgaagttggagctaatattttgatgtttgattctgtgaatcgaagaacatgtttgcattacgctgcttattatggacatgctaattgtgttcaagctattctctctgctgctcaatcaagtcctgttgctgtccattggggatatgcgagatttgtgaacataagagatgataaaggagcgactccgttgcatttagctgctcgacagagacgacctgaatgtgtgaatgttttgttggatagtggttctcttgtttgtgcatctactagtgtatatggttctccaggaagcacacctcttcatttagcagctagaagtggatctatagattgtgtcagaaagttgcttgcttggggtgctgatcgtcttcaacgagacgcttctgggagaataccttatgtggttgcgatgaagcataagcatggagcatgtggagccttacttaatccgtcctctgcagagccacttgtttggccatcaccattaaagttcatcagtgagcttaatgacgaggcgaaacttctcttagagcaggctttaatggaggctaacagggagagagagaaaaccatcctcaaaggaacagcttattccttaccatcaccctctttctctgacacggatgataacatgtccgaggtgagtgatacggaactgtgctgcatttgctttgagcaagtatgtacaattgaagttaaagactgtggtcaccaaatgtgtgcacaatgcacacttgcactgtgctgtcacaacaaaccaaacccaacgacctcaaccgtgactccaccggtctgtccgttctgtagaagcaccattgcatgtttagtcgtcgcccagaacaacaacaacaacaacgaaaagagcaaaagcctagatgatgttgttgttgttgatcgtgaggcaggtgatgttagctcctccaaattcagaaaacatagaagatcaataaaccttggcgaagaaagcagcagcttcatgggactatcaactattggatcattcggtaggataaccggccgtggctcgggaaggatcgcagccgaaaacgagctgatggacaaaccaatattgtgagggatcgattccgttttaagggacattttggggcatgggggagcaataaaaaagatgaggggatgaaattgtgagaatgtataaaatatagatgaatttatgttagatcttttgttgaagggaggaagattgaaataaggaaaaagatgtggggaggtgtgtaatgcaaggatttgttgtttctttgattaagtttggcccaaaattgtttgttgttacttgatatgaaagggaaacccataatctc

SEQ ID NO: 21329 - protein, 456 aa, Arabidopsis thaliana
  peptide (1)..(456): Ceres Seq. ID no. 12334197
MGQSMSCGSRPEHGIFASVQCGDIITIRRVMATEPSLLNQTTPYDRHSVLHVAAANGQIEILSLLLERFTNPDLLNRHKQTPLMLAAMYGRISCVKKLAEVGANILMFDSVNRRTCLHYAAYYGHANCVQAILSAAQSSPVAVHWGYARFVNIRDDKGATPLHLAARQRRPECVNVLLDSGSLVCASTSVYGSPGSTPLHLAARSGSIDCVRKLLAWGADRLQRDASGRIPYVVAMKHKHGACGALLNPSSAEPLVWPSPLKFISELNDEAKLLLEQALMEANREREKTILKGTAYSLPSPSFSDTDDNMSEVSDTELCCICFEQVCTIEVKDCGHQMCAQCTLALCCHNKPNPTTSTVTPPVCPFCRSTIACLVVAQNNNNNNEKSKSLDDVVVVDREAGDVSSSKFRKHRRSINLGEESSSFMGLSTIGSFGRITGRGSGRIAAENELMDKPIL

SEQ ID NO: 21330 - protein, 452 aa, Arabidopsis thaliana
  peptide (1)..(452): Ceres Seq. ID no. 12334198
MSCGSRPEHGIFASVQCGDIITIRRVMATEPSLLNQTTPYDRHSVLHVAAANGQIEILSLLLERFTNPDLLNRHKQTPLMLAAMYGRISCVKKLAEVGANILMFDSVNRRTCLHYAAYYGHANCVQAILSAAQSSPVAVHWGYARFVNIRDDKGATPLHLAARQRRPECVNVLLDSGSLVCASTSVYGSPGSTPLHLAARSGSIDCVRKLLAWGADRLQRDASGRIPYVVAMKHKHGACGALLNPSSAEPLVWPSPLKFISELNDEAKLLLEQALMEANREREKTILKGTAYSLPSPSFSDTDDNMSEVSDTELCCICFEQVCTIEVKDCGHQMCAQCTLALCCHNKPNPTTSTVTPPVCPFCRSTIACLVVAQNNNNNNEKSKSLDDVVVVDREAGDVSSSKFRKHRRSINLGEESSSFMGLSTIGSFGRITGRGSGRIAAENELMDKPIL

SEQ ID NO: 21331 - protein, 426 aa, Arabidopsis thaliana
  peptide (1)..(426): Ceres Seq. ID no. 12334199
MATEPSLLNQTTPYDRHSVLHVAAANGQIEILSLLLERFTNPDLLNRHKQTPLMLAAMYGRISCVKKLAEVGANILMFDSVNRRTCLHYAAYYGHANCVQAILSAAQSSPVAVHWGYARFVNIRDDKGATPLHLAARQRRPECVNVLLDSGSLVCASTSVYGSPGSTPLHLAARSGSIDCVRKLLAWGADRLQRDASGRIPYVVAMKHKHGACGALLNPSSAEPLVWPSPLKFISELNDEAKLLLEQALMEANREREKTILKGTAYSLPSPSFSDTDDNMSEVSDTELCCICFEQVCTIEVKDCGHQMCAQCTLALCCHNKPNPTTSTVTPPVCPFCRSTIACLVVAQNNNNNNEKSKSLDDVVVVDREAGDVSSSKFRKHRRSINLGEESSSFMGLSTIGSFGRITGRGSGRIAAENELMDKPIL

SEQ ID NO: 21332 - DNA, 1311 bp, Arabidopsis thaliana
  misc_feature (1)..(1311): Ceres Seq. ID no. 13489810
  misc_feature (1)..(1311): Ortholog of  Ceres SEQ ID NO 14308107 as cited in SEQ ID NO 59030
  misc_feature (1)..(1311): Ortholog of  Ceres SEQ ID NO 15226612 as cited in SEQ ID NO 62700
actgcaaattttgatattttgggttttagcagtgaagtttgcgaaaatggcgtcttcggtttttctatccagtttctcgtcatcgtcttctttgcaactctgctcttcctttcacggcgagtacttagctccgtcgagatgctttctcggagctccggtcacttcctcttctttatcactctccggtaagaagaactcatattctccgagacagttccatgtttctgccaagaaagtttctgggttagaggaagccattagaatcagaaaaatgagagagcttgaaactaaatcaaaagttaggagaaatccaccattaagacgtggaagagtatcgcctcgtcttcttgtacctgatcacattccaaggcctccttatgttgagtctggtgtattaccggatatatcaagtgagttccagattcctggtcctgaaggcattgcgaaaatgagagctgcttgcgagcttgctgctcgggttttaaactatgctggaactttggttaagccatctgttacgactaatgaaatcgataaagctgtgcatgatatgattattgaagctggtgcttatccttcacctcttggatatggtggatttcctaaaagtgtgtgtacttcagttaatgagtgtatgtgtcacggaataccagattctcgccagctacagagcggggatataatcaacatcgatgtcacggtttacttggatggttaccatggagatacgtcgagaactttcttctgtggagaagttgacgaaggtttcaaacgacttgtgaaggttacggaagaatgtttggagagaggtattgcagtttgtaaagacggagcaagcttcaagaaaatcgggaaaagaatcagtgagcatgcggaaaagttcggctacaacgttgtggagcggtttgttgggcatggtgttggaccagtattccactccgaacctcttatatatcattaccgaaatgatgagcctggactaatggttgagggacagacattcacaattgaaccgattctcacgattggaaccacagaatgtgtaacatggccagacaactggactactctgacagcagatggtggcgtcgctgctcagtttgagcataccattctgattactagaactggttcagagattcttaccaaatgctaaaactattcacattgatcatttccatttcaccttttatttgctgatcatttaaggtccatagtataaattcattatctttgagaccatagtctaacaatttgtgttagtgccatcttttaagatctcaagattagtttgctattaaaaattttccc

SEQ ID NO: 21333 - protein, 384 aa, Arabidopsis thaliana
  peptide (1)..(384): Ceres Seq. ID no. 13489811
LQILIFWVLAVKFAKMASSVFLSSFSSSSSLQLCSSFHGEYLAPSRCFLGAPVTSSSLSLSGKKNSYSPRQFHVSAKKVSGLEEAIRIRKMRELETKSKVRRNPPLRRGRVSPRLLVPDHIPRPPYVESGVLPDISSEFQIPGPEGIAKMRAACELAARVLNYAGTLVKPSVTTNEIDKAVHDMIIEAGAYPSPLGYGGFPKSVCTSVNECMCHGIPDSRQLQSGDIINIDVTVYLDGYHGDTSRTFFCGEVDEGFKRLVKVTEECLERGIAVCKDGASFKKIGKRISEHAEKFGYNVVERFVGHGVGPVFHSEPLIYHYRNDEPGLMVEGQTFTIEPILTIGTTECVTWPDNWTTLTADGGVAAQFEHTILITRTGSEILTKC

SEQ ID NO: 21334 - protein, 369 aa, Arabidopsis thaliana
  peptide (1)..(369): Ceres Seq. ID no. 13489812
MASSVFLSSFSSSSSLQLCSSFHGEYLAPSRCFLGAPVTSSSLSLSGKKNSYSPRQFHVSAKKVSGLEEAIRIRKMRELETKSKVRRNPPLRRGRVSPRLLVPDHIPRPPYVESGVLPDISSEFQIPGPEGIAKMRAACELAARVLNYAGTLVKPSVTTNEIDKAVHDMIIEAGAYPSPLGYGGFPKSVCTSVNECMCHGIPDSRQLQSGDIINIDVTVYLDGYHGDTSRTFFCGEVDEGFKRLVKVTEECLERGIAVCKDGASFKKIGKRISEHAEKFGYNVVERFVGHGVGPVFHSEPLIYHYRNDEPGLMVEGQTFTIEPILTIGTTECVTWPDNWTTLTADGGVAAQFEHTILITRTGSEILTKC

SEQ ID NO: 21335 - protein, 294 aa, Arabidopsis thaliana
  peptide (1)..(294): Ceres Seq. ID no. 13489813
MRELETKSKVRRNPPLRRGRVSPRLLVPDHIPRPPYVESGVLPDISSEFQIPGPEGIAKMRAACELAARVLNYAGTLVKPSVTTNEIDKAVHDMIIEAGAYPSPLGYGGFPKSVCTSVNECMCHGIPDSRQLQSGDIINIDVTVYLDGYHGDTSRTFFCGEVDEGFKRLVKVTEECLERGIAVCKDGASFKKIGKRISEHAEKFGYNVVERFVGHGVGPVFHSEPLIYHYRNDEPGLMVEGQTFTIEPILTIGTTECVTWPDNWTTLTADGGVAAQFEHTILITRTGSEILTKC

SEQ ID NO: 21336 - DNA, 973 bp, Arabidopsis thaliana
  misc_feature (1)..(973): Ceres Seq. ID no. 12420547
  misc_feature (1)..(973): Ortholog of  Ceres SEQ ID NO 13581804 as cited in SEQ ID NO 51424
  misc_feature (1)..(973): Ortholog of  Ceres SEQ ID NO 13663874 as cited in SEQ ID NO 67003
aatttccatcaaattatttttcttttccttcttatgtaaattattccttatctatccaaattcgtcttcttgagtgaatttttaaagcgaatctcgacaaaactagctctcaaaaggggttttgggagttaccttttgtttctcagattttcccacattttcttggaagtaactgaaatggtgagaggaaagatcgaaatcaagaagattgagaacgtgacaagtagacaagtcacgttttcgaagcgaaggagtggtctctttaagaaggctcatgagctttctgttctatgtgatgctcaagtggcagctatgatcttctctcagaaaggaagattatatgaattcgctagctccgatatcaggaacacgataaagcgatacgctgagtacaagagagagtatttcgttgcagaaactcatcctatagagcaatacgtgcaggggctaaagaaggaaatggtgacaatggtgaaaaagattgaagtgcttgaagtccataaccggaagatgatgggacaaagtttggattcttgttcggtaaaagaactttcagagatagccacacaaatagagaaaagccttcatatggttagattaagaaaggctaagttatatgaagatgagctacagaaactaaaagccaaggagaggcaactcaaggacgagagagtcaggctttctctaaaggttggagaaagaccaatggggatgccgtcgggaagcaaagagaaagaggatgttgaaactgatctatttattggatttctgaagaaccgaccataaaatcgtccttggtcattaaacgtcatttctagctatctatctcaattaatgttatgtatatgagtaatagtgtttcaaaatttcaatcacttgtctttttgtataaactcagaataatgtaatgtgtaagagttctaactatgcttttgtttgtggatgtaatgtaatgtaaactcttaagtttctg

SEQ ID NO: 21337 - protein, 202 aa, Arabidopsis thaliana
  peptide (1)..(202): Ceres Seq. ID no. 12420548
MVRGKIEIKKIENVTSRQVTFSKRRSGLFKKAHELSVLCDAQVAAMIFSQKGRLYEFASSDIRNTIKRYAEYKREYFVAETHPIEQYVQGLKKEMVTMVKKIEVLEVHNRKMMGQSLDSCSVKELSEIATQIEKSLHMVRLRKAKLYEDELQKLKAKERQLKDERVRLSLKVGERPMGMPSGSKEKEDVETDLFIGFLKNRP

SEQ ID NO: 21338 - protein, 157 aa, Arabidopsis thaliana
  peptide (1)..(157): Ceres Seq. ID no. 12420549
MIFSQKGRLYEFASSDIRNTIKRYAEYKREYFVAETHPIEQYVQGLKKEMVTMVKKIEVLEVHNRKMMGQSLDSCSVKELSEIATQIEKSLHMVRLRKAKLYEDELQKLKAKERQLKDERVRLSLKVGERPMGMPSGSKEKEDVETDLFIGFLKNRP

SEQ ID NO: 21339 - protein, 108 aa, Arabidopsis thaliana
  peptide (1)..(108): Ceres Seq. ID no. 12420550
MVTMVKKIEVLEVHNRKMMGQSLDSCSVKELSEIATQIEKSLHMVRLRKAKLYEDELQKLKAKERQLKDERVRLSLKVGERPMGMPSGSKEKEDVETDLFIGFLKNRP

SEQ ID NO: 21340 - DNA, 1440 bp, Arabidopsis thaliana
  misc_feature (1)..(1440): Ceres Seq. ID no. 12337386
  misc_feature (1)..(1440): Ortholog of  Ceres SEQ ID NO 15171297 as cited in SEQ ID NO 51458
aaaacacaacataaaacgtacttcttcttcaaaacgcgaaaccacactgtaagttacgtacaccaccacctatcctcaccattcatcatcgacacgtggctggtttaactcaaatcaacgctgaatccaaatacccatttccatttttaaccgtggttggattgttttgagagttgaaggaagaagatgacgtctgacggagcaacgtcgacgtcagctgcagctgcagcagcagcgatggcgacgaggaggaaaccgtcgtggagagagagggagaacaatcggagaagagagcggcggagaagagctgttgcggcgaagatttatactggtcttagagctcaaggtaactacaatcttccaaaacattgtgacaacaatgaggttcttaaggctctttgttctgaagctggttgggttgttgaagaagacggaactacttatcgcaagggacacaagcctctacctggtgacatggctggatcatcttctcgagcaactccttactcttcccataaccaaagtcctctttcttccacttttgatagccccatcttatcttaccaagtcagtccttcctcttcttcattcccgagtccttctcgagttggtgatccacacaatatctccacaatcttccctttcctcaggaatggtggtattccttcatcgcttcctccacttagaatctcaaacagtgctcctgtcactccaccagtgtcatccccaacttctagaaaccccaaaccattgcctacttgggaatcttttaccaaacaatccatgtccatggctgctaaacagtcaatgacttctttgaactacccgttttatgcggtgtctgcacctgccagtcctactcatcatcgccagttccatgctccggctactatacctgaatgtgatgagtctgactcttccactgttgattctggtcattggataagctttcaaaagtttgcacaacaacagccattctctgcctctatggtgccaacctcgcctaccttcaatctcgtgaaacctgcaccacagcaattgtctccaaacacagcagcaatccaagagattggtcaaagctccgagtttaagtttgagaacagccaagttaagccatgggaaggggagaggatccatgatgtggctatggaggatctagagctcacgcttggaaatggtaaagctcatagttgagatgaagtatacatgaacctgttatgtcatgtcggaaggaaggattggagaatgagaattagtgtgttgttcattcagttcatggttttggttcttgttctagaatcgatattcattgtaccagtgagtttgtttcacaacgcattatttgtagatagaatgtttaagatgtatgtttctattatcattccttttaggtcttgaaaacattacaaatatattacatgattaagtggcttgaaatgc

SEQ ID NO: 21341 - protein, 335 aa, Arabidopsis thaliana
  peptide (1)..(335): Ceres Seq. ID no. 12337387
MTSDGATSTSAAAAAAAMATRRKPSWRERENNRRRERRRRAVAAKIYTGLRAQGNYNLPKHCDNNEVLKALCSEAGWVVEEDGTTYRKGHKPLPGDMAGSSSRATPYSSHNQSPLSSTFDSPILSYQVSPSSSSFPSPSRVGDPHNISTIFPFLRNGGIPSSLPPLRISNSAPVTPPVSSPTSRNPKPLPTWESFTKQSMSMAAKQSMTSLNYPFYAVSAPASPTHHRQFHAPATIPECDESDSSTVDSGHWISFQKFAQQQPFSASMVPTSPTFNLVKPAPQQLSPNTAAIQEIGQSSEFKFENSQVKPWEGERIHDVAMEDLELTLGNGKAHS

SEQ ID NO: 21342 - protein, 318 aa, Arabidopsis thaliana
  peptide (1)..(318): Ceres Seq. ID no. 12337388
MATRRKPSWRERENNRRRERRRRAVAAKIYTGLRAQGNYNLPKHCDNNEVLKALCSEAGWVVEEDGTTYRKGHKPLPGDMAGSSSRATPYSSHNQSPLSSTFDSPILSYQVSPSSSSFPSPSRVGDPHNISTIFPFLRNGGIPSSLPPLRISNSAPVTPPVSSPTSRNPKPLPTWESFTKQSMSMAAKQSMTSLNYPFYAVSAPASPTHHRQFHAPATIPECDESDSSTVDSGHWISFQKFAQQQPFSASMVPTSPTFNLVKPAPQQLSPNTAAIQEIGQSSEFKFENSQVKPWEGERIHDVAMEDLELTLGNGKAHS

SEQ ID NO: 21343 - protein, 239 aa, Arabidopsis thaliana
  peptide (1)..(239): Ceres Seq. ID no. 12337389
MAGSSSRATPYSSHNQSPLSSTFDSPILSYQVSPSSSSFPSPSRVGDPHNISTIFPFLRNGGIPSSLPPLRISNSAPVTPPVSSPTSRNPKPLPTWESFTKQSMSMAAKQSMTSLNYPFYAVSAPASPTHHRQFHAPATIPECDESDSSTVDSGHWISFQKFAQQQPFSASMVPTSPTFNLVKPAPQQLSPNTAAIQEIGQSSEFKFENSQVKPWEGERIHDVAMEDLELTLGNGKAHS

SEQ ID NO: 21344 - DNA, 1105 bp, Arabidopsis thaliana
  misc_feature (1)..(1105): Ceres Seq. ID no. 12332676
  misc_feature (1)..(1105): Ortholog of  Ceres SEQ ID NO 13594740 as cited in SEQ ID NO 51721
  misc_feature (1)..(1105): Ortholog of  Ceres SEQ ID NO 14316497 as cited in SEQ ID NO 58285
  misc_feature (1)..(1105): Ortholog of  Ceres SEQ ID NO 13595944 as cited in SEQ ID NO 68153
gttgtgcaaaagaacagaatgagttctaagtttgatatcggctccttaagcatagtaatgactctgcttatttgcttcttattattatctttggctccaaaacttgaggctgagctcgcaacggtccaacatgctccaaaccccgatggctctatcagttttctggtgattggagattggggtaggcatggactctacaaccaatcccaagttgccctccagatggggagaatcggggaggagatggatatcaattttgtggtatcgacgggtgataacatctacgataacgggatgaaaagtatcgatgatcccgcctttcaactctcctttagtaatatctacacttctcctagcctgcaaaagccttggtaccttgtattggggaatcacgactatagaggagatgttgaggcacaattgagtcctatcctcagatctatggatagccgttggatttgcatgagatccttcatcgttgacgctgagatcgcagagctcttctttgtcgacacaactccttttgtagatgcttatttcctcagtccacaagaccaaacttacgactggagcggcgtatcaccgcgaaaatcctaccttcagaccatcttaacggagttggagatgggtctaagagaatcaagtgcaaaatggaaaattgtggtgggtcaccatgctataaagagtgcttccattcatgggaataccaaagagcttgaatctctcctcttacccatccttgaggcgaataaagttgatctctatatgaacggtcatgatcattgcttgcaacatataagcacatcacaaagcccaattcagtttctaacgagtggtggtgggtcaaaggcatggagaggctattacaattggacaacaccagaggatatgaaatttttctacgatggacaaggtttcatgtcagttaagatcactagatcagaattgagtgtcgttttttatgatgtctccggcaatagtttgcataagtgggacacatcgaaaatgttagactcggatttttatttcccattgtaattcacatgaaaatcagttaaagcacataaattctacatataaataaatatgattactatgagtggtt

SEQ ID NO: 21345 - protein, 345 aa, Arabidopsis thaliana
  peptide (1)..(345): Ceres Seq. ID no. 12332677
VVQKNRMSSKFDIGSLSIVMTLLICFLLLSLAPKLEAELATVQHAPNPDGSISFLVIGDWGRHGLYNQSQVALQMGRIGEEMDINFVVSTGDNIYDNGMKSIDDPAFQLSFSNIYTSPSLQKPWYLVLGNHDYRGDVEAQLSPILRSMDSRWICMRSFIVDAEIAELFFVDTTPFVDAYFLSPQDQTYDWSGVSPRKSYLQTILTELEMGLRESSAKWKIVVGHHAIKSASIHGNTKELESLLLPILEANKVDLYMNGHDHCLQHISTSQSPIQFLTSGGGSKAWRGYYNWTTPEDMKFFYDGQGFMSVKITRSELSVVFYDVSGNSLHKWDTSKMLDSDFYFPL

SEQ ID NO: 21346 - protein, 339 aa, Arabidopsis thaliana
  peptide (1)..(339): Ceres Seq. ID no. 12332678
MSSKFDIGSLSIVMTLLICFLLLSLAPKLEAELATVQHAPNPDGSISFLVIGDWGRHGLYNQSQVALQMGRIGEEMDINFVVSTGDNIYDNGMKSIDDPAFQLSFSNIYTSPSLQKPWYLVLGNHDYRGDVEAQLSPILRSMDSRWICMRSFIVDAEIAELFFVDTTPFVDAYFLSPQDQTYDWSGVSPRKSYLQTILTELEMGLRESSAKWKIVVGHHAIKSASIHGNTKELESLLLPILEANKVDLYMNGHDHCLQHISTSQSPIQFLTSGGGSKAWRGYYNWTTPEDMKFFYDGQGFMSVKITRSELSVVFYDVSGNSLHKWDTSKMLDSDFYFPL

SEQ ID NO: 21347 - protein, 326 aa, Arabidopsis thaliana
  peptide (1)..(326): Ceres Seq. ID no. 12332679
MTLLICFLLLSLAPKLEAELATVQHAPNPDGSISFLVIGDWGRHGLYNQSQVALQMGRIGEEMDINFVVSTGDNIYDNGMKSIDDPAFQLSFSNIYTSPSLQKPWYLVLGNHDYRGDVEAQLSPILRSMDSRWICMRSFIVDAEIAELFFVDTTPFVDAYFLSPQDQTYDWSGVSPRKSYLQTILTELEMGLRESSAKWKIVVGHHAIKSASIHGNTKELESLLLPILEANKVDLYMNGHDHCLQHISTSQSPIQFLTSGGGSKAWRGYYNWTTPEDMKFFYDGQGFMSVKITRSELSVVFYDVSGNSLHKWDTSKMLDSDFYFPL

SEQ ID NO: 21348 - DNA, 2273 bp, Arabidopsis thaliana
  misc_feature (1)..(2273): Ceres Seq. ID no. 13499581
  misc_feature (1)..(2273): Ortholog of  Ceres SEQ ID NO 13590691 as cited in SEQ ID NO 66290
aacactagcaagcaaaaattcttcatcgactcaaattcaaaaactcatctctctctatctctatttctctggttccatagctcaccgtcgcatcgcagatctactccttccgcaataaattttaccggcggaggtatcagatctcgccgatctgttgtagcagctactgtattttgggcttctcatttgatattggggaaacgaggagtagaggacgatggaaaatctgatctctctggttaacaagatacagagagcttgcacggctttaggagaccatggagactccagcgctttacctactctttgggattccttgcctgcgatcgccgtcgttggtggtcagagctcagggaagtcttcagtcctggagagcatcgtgggaaaggactttttaccccgtggatctggcattgttactcgaaggccccttgtcttacagttgcaaaagatcgatgatggaacccgggagtatgcagagtttcttcacctcccgaggaaaaagtttactgattttgctgctgtgaggaaggagattcaagatgagactgacagagagactggacgcagcaaggctatttctagtgttcccattcaccttagcatatactctcccaatgttgtcaacttgacactgatagatcttccagggcttacaaaagttgctgttgatggacaatctgatagtatagtgaaggacattgaaaacatggttcggtcctacattgaaaagcccaactgcatcattttggcaatctcacctgcaaaccaagatcttgctacctcagatgcaattaaaatttcccgtgaggttgatccatcgggggacagaacatttggtgtcttgacaaagattgatcttatggacaaggggacggatgcagtggaaattctggaagggagatcttttaaacttaaatatccgtgggttggtgtcgtcaaccgttcccaagcagatattaacaagaatgtcgacatgattgcggctcggaaaagagagagggagtacttttccaatactactgagtataggcaccttgctaataaaatgggttccgagcatttggcaaagatgctctccaagcatctagaacgtgtgatcaagtcgagaattcctggcattcagtcacttattaacaaaacagtattagagctggaaactgaactaagtcgccttggaaagcctattgcagctgatgcaggggggaagttgtactcaataatggagatatgtcggctttttgatcaaatattcaaagagcatcttgatggagtgcgtgctggtggtgaaaaagtgtacaacgtgtttgataaccagcttcctgcggctctgaagagactccaatttgacaagcagctagcgatggacaacatccggaagctggtcactgaggctgatggttaccagcctcacttgattgctcctgagcaaggttaccgtcgtctcattgagtcttctattgtctccatcagaggccctgctgaagcatctgttgacaccgttcatgctatcttaaaggatctggttcacaagtctgtgaatgaaactgtggaactaaaacaatacccagctctgagagtggaggtgacaaatgcggcgatagagtcgctggataaaatgcgggaaggaagtaagaaagcaacactgcagctggttgacatggagtgcagttacctcactgttgatttcttcaggaaacttccccaggatgttgagaagggtggtaaccccacacactccattttcgaccgctacaacgattcctatctcagacgaatcggatccaatgttttgtcttacgtgaacatggtctgtgctggcctgcggaattcaatccccaagtccatcgtatactgccaagtccgagaagcgaagcgcagtctcctcgaccatttctttgcggagctcggtaccatggatatgaagaggctctctcgtcgctattgaacgaagatccagcaatcatggagagacgcagtgccatctcaaagcggctagaattgtatcgagcagcccaatccgagatcgatgctgttgcttggtccaagtgataccggcatgtcatgtccactgttttgctcggttctggtcggtgtggctcagactcggagcagagatttagggtctgtaatttgtataagatgatcttcccgataccatgcagtatcgttttatataacatccacattgtttgtcctacctctatgttttttgtccatcacccgatatgttacgtatcgttttataacatccacattgtttgtcctgcctc

SEQ ID NO: 21349 - protein, 576 aa, Arabidopsis thaliana
  peptide (1)..(576): Ceres Seq. ID no. 13499582
MENLISLVNKIQRACTALGDHGDSSALPTLWDSLPAIAVVGGQSSGKSSVLESIVGKDFLPRGSGIVTRRPLVLQLQKIDDGTREYAEFLHLPRKKFTDFAAVRKEIQDETDRETGRSKAISSVPIHLSIYSPNVVNLTLIDLPGLTKVAVDGQSDSIVKDIENMVRSYIEKPNCIILAISPANQDLATSDAIKISREVDPSGDRTFGVLTKIDLMDKGTDAVEILEGRSFKLKYPWVGVVNRSQADINKNVDMIAARKREREYFSNTTEYRHLANKMGSEHLAKMLSKHLERVIKSRIPGIQSLINKTVLELETELSRLGKPIAADAGGKLYSIMEICRLFDQIFKEHLDGVRAGGEKVYNVFDNQLPAALKRLQFDKQLAMDNIRKLVTEADGYQPHLIAPEQGYRRLIESSIVSIRGPAEASVDTVHAILKDLVHKSVNETVELKQYPALRVEVTNAAIESLDKMREGSKKATLQLVDMECSYLTVDFFRKLPQDVEKGGNPTHSIFDRYNDSYLRRIGSNVLSYVNMVCAGLRNSIPKSIVYCQVREAKRSLLDHFFAELGTMDMKRLSRRY

SEQ ID NO: 21350 - protein, 412 aa, Arabidopsis thaliana
  peptide (1)..(412): Ceres Seq. ID no. 13499583
MVRSYIEKPNCIILAISPANQDLATSDAIKISREVDPSGDRTFGVLTKIDLMDKGTDAVEILEGRSFKLKYPWVGVVNRSQADINKNVDMIAARKREREYFSNTTEYRHLANKMGSEHLAKMLSKHLERVIKSRIPGIQSLINKTVLELETELSRLGKPIAADAGGKLYSIMEICRLFDQIFKEHLDGVRAGGEKVYNVFDNQLPAALKRLQFDKQLAMDNIRKLVTEADGYQPHLIAPEQGYRRLIESSIVSIRGPAEASVDTVHAILKDLVHKSVNETVELKQYPALRVEVTNAAIESLDKMREGSKKATLQLVDMECSYLTVDFFRKLPQDVEKGGNPTHSIFDRYNDSYLRRIGSNVLSYVNMVCAGLRNSIPKSIVYCQVREAKRSLLDHFFAELGTMDMKRLSRRY

SEQ ID NO: 21351 - protein, 361 aa, Arabidopsis thaliana
  peptide (1)..(361): Ceres Seq. ID no. 13499584
MDKGTDAVEILEGRSFKLKYPWVGVVNRSQADINKNVDMIAARKREREYFSNTTEYRHLANKMGSEHLAKMLSKHLERVIKSRIPGIQSLINKTVLELETELSRLGKPIAADAGGKLYSIMEICRLFDQIFKEHLDGVRAGGEKVYNVFDNQLPAALKRLQFDKQLAMDNIRKLVTEADGYQPHLIAPEQGYRRLIESSIVSIRGPAEASVDTVHAILKDLVHKSVNETVELKQYPALRVEVTNAAIESLDKMREGSKKATLQLVDMECSYLTVDFFRKLPQDVEKGGNPTHSIFDRYNDSYLRRIGSNVLSYVNMVCAGLRNSIPKSIVYCQVREAKRSLLDHFFAELGTMDMKRLSRRY

SEQ ID NO: 21352 - DNA, 646 bp, Arabidopsis thaliana
  misc_feature (1)..(646): Ceres Seq. ID no. 12601909
  misc_feature (1)..(646): Ortholog of  Ceres SEQ ID NO 13583459 as cited in SEQ ID NO 62680
tttgccagaaagaaactgaagaactcttgactgtctctctgcggcgaaaaagagagcgaagcttgaaatctccgattaagccatgaatgctcccgaacgatatgagcgattcgtcgtccctgaaggcaccaagaaggtttcttatgatagggatacgaagatcatcaatgctgcttccttcacggttgagagagaagaccatacgattggaaacattgtccgcatgcaacttcatcgcgacgagaatgtcttgtttgctggataccaacttcctcatcctcttaagtacaaaatcatagtgaggattcacacaacaagccagtcttccccaatgcaagcatacaaccaggccatcaatgacttggacaaggagctcgactacttgaagaaccagtttgaggcagaggtggccaagttttcgaatcagttttaaggaacttggagttctccatcagcacatcggggaaaacgttttacattgtcttttgctaagcaccaatcaagactaataatgagcttgggaaattttccctagttatgctttgtataaatcaaaaacaaatcggcctgtaacttcttttaactctatgtttcaacaccatttcaggatgctatgaagtaatgcttagattacctcttcttttta

SEQ ID NO: 21353 - protein, 116 aa, Arabidopsis thaliana
  peptide (1)..(116): Ceres Seq. ID no. 12601910
MNAPERYERFVVPEGTKKVSYDRDTKIINAASFTVEREDHTIGNIVRMQLHRDENVLFAGYQLPHPLKYKIIVRIHTTSQSSPMQAYNQAINDLDKELDYLKNQFEAEVAKFSNQF

SEQ ID NO: 21354 - protein, 70 aa, Arabidopsis thaliana
  peptide (1)..(70): Ceres Seq. ID no. 12601911
MLPNDMSDSSSLKAPRRFLMIGIRRSSMLLPSRLREKTIRLETLSACNFIATRMSCLLDTNFLILLSTKS

SEQ ID NO: 21355 - protein, 69 aa, Arabidopsis thaliana
  peptide (1)..(69): Ceres Seq. ID no. 12601912
MQLHRDENVLFAGYQLPHPLKYKIIVRIHTTSQSSPMQAYNQAINDLDKELDYLKNQFEAEVAKFSNQF

SEQ ID NO: 21356 - DNA, 1334 bp, Arabidopsis thaliana
  misc_feature (1)..(1334): Ceres Seq. ID no. 12385426
  misc_feature (1)..(1334): Ortholog of  Ceres SEQ ID NO 13662634 as cited in SEQ ID NO 66310
  misc_feature (1)..(1334): Ortholog of  Ceres SEQ ID NO 14305739 as cited in SEQ ID NO 0
aaggcgcttgaattttgcgttttcagaatcttggtttctagggtttcacttaccttccctccgcgcccttgagctctctacctgagcttctccgggattcctaaagctgaaattcaaacacctccattttcatcctcaagggagataaataaaactctattgagtagaaaatgagtgctgcagcacacaggactcctaaatcagggaggcaatctctgctatttcaagatttagcttctcctgtttcagcacgtagagggaaattctcgagtccgggacaggcagctgcggtatctgcactatggcgtgagaatttcggaggatctgatcttccaccacctccaatgtatactttggatgaccggtccgatttctctcctgagtctggtattgcagactactctgcgtctccagatgctaagtctgacagaagaacaccattccagagttctggaaagaatattgtaactcctggtaaaggaaagttggaagcaagcccttctttttctctactgaatgcacaacagagtcagcaagtttcagggagtccgagttggtggtcgcagtcaaaggcaggtagtagtaccgagcaggatgataaagggaagggatctcctgtagaaggggtggttcagccaggtgcattggtcactcttccgccgccaagagaagttgctaggccagaggttcagaggcagattatacctacaggaaaccttgatgaggaagagtgggtcactgtctatggattttctccaggtgatacaaatttagtactacgggagtttgaaaaatgtggtatggtcttgaaacatgttcctggtccaagaaatgccaactggatgcacatcctctaccagaaccggtctgatgcacataaggcgctgaacaaagcagggatgatgataaacggagttgtaatagtaggagtgaagccagtagacccaatacagaagcaagcgttaaacgagagactcaacaaccaaggattcatgcctttacctccaccatcatccactagaaacactgctcgacccctgtctcgtcctcagtacttgcaaaacggcagcgctttctctcctcaaccaagtggtggcgctatggcctctccgtcaaagtcaatggtctcaaagttctttgacttgatgttcggtgtttaaaagctacttcaatggcatttcccgaatgattcttctttacacatagtttgaagtttttgagagcagagtggctaagtaaatcttagagcgtggtcaaaattaaaaattgtaagaggtgtttcaaattgtcttttgtattgacgacggctaaaaatttggtataaatctgattat

SEQ ID NO: 21357 - protein, 329 aa, Arabidopsis thaliana
  peptide (1)..(329): Ceres Seq. ID no. 12385427
MSAAAHRTPKSGRQSLLFQDLASPVSARRGKFSSPGQAAAVSALWRENFGGSDLPPPPMYTLDDRSDFSPESGIADYSASPDAKSDRRTPFQSSGKNIVTPGKGKLEASPSFSLLNAQQSQQVSGSPSWWSQSKAGSSTEQDDKGKGSPVEGVVQPGALVTLPPPREVARPEVQRQIIPTGNLDEEEWVTVYGFSPGDTNLVLREFEKCGMVLKHVPGPRNANWMHILYQNRSDAHKALNKAGMMINGVVIVGVKPVDPIQKQALNERLNNQGFMPLPPPSSTRNTARPLSRPQYLQNGSAFSPQPSGGAMASPSKSMVSKFFDLMFGV

SEQ ID NO: 21358 - protein, 271 aa, Arabidopsis thaliana
  peptide (1)..(271): Ceres Seq. ID no. 12385428
MYTLDDRSDFSPESGIADYSASPDAKSDRRTPFQSSGKNIVTPGKGKLEASPSFSLLNAQQSQQVSGSPSWWSQSKAGSSTEQDDKGKGSPVEGVVQPGALVTLPPPREVARPEVQRQIIPTGNLDEEEWVTVYGFSPGDTNLVLREFEKCGMVLKHVPGPRNANWMHILYQNRSDAHKALNKAGMMINGVVIVGVKPVDPIQKQALNERLNNQGFMPLPPPSSTRNTARPLSRPQYLQNGSAFSPQPSGGAMASPSKSMVSKFFDLMFGV

SEQ ID NO: 21359 - DNA, 861 bp, Arabidopsis thaliana
  misc_feature (1)..(861): Ceres Seq. ID no. 12321270
  misc_feature (1)..(861): Ortholog of  Ceres SEQ ID NO 12474478 as cited in SEQ ID NO 96
  misc_feature (1)..(861): Ortholog of  Ceres SEQ ID NO 14309053 as cited in SEQ ID NO 0
acacactcaaatatctctccaacactaaaataattgtaccgactctctctctctctctctccgtaacaaaaaaatcaccaatggcaaaacaatatctctttgtactcctctcaatctcctatctcttatcactggagctcacggcggccaccgcagcctcacagaccggagcttccaaaaaagccataaacttcatccaatcttcttgcaaaaccaccacataccctgccttatgtgtccactcactctccgtctacgcaaacgacatccaaacaagccctaaacgtttagctgagaccgctatagccgtgacactaagccgagcccaatccacgaagctcttcgtctcgcgtctaacacgtatgaagggtcttaagaagcgcgaggtcgaagccatcaaagattgcgtcgaggagatgaacgataccgttgaccgtttgaccaaatctgttcaagaactgaagttgtgtgggagtgccaaagatcaagaccagtttgcgtaccacatgagtaatgctcagacttggactagtgcggctttgactgacgagaacacttgctccgatgggttctcgggtcgggttatggatgggaggatcaagaactcggttcgggctagaatcatgaacgtgggacatgaaaccagcaacgctttgtccttgattaatgcctttgctaaaacttactaatttaaaactatattttgtcctgtaaaatatatatatagataaatgtaatgtcttgctaagagtttgatgtgatatatttttttcgattttggtagtttctttttgttttgtaacgtggtttataatagtataatgtgtattttgagctataaagttgtttttaagattggat

SEQ ID NO: 21360 - protein, 228 aa, Arabidopsis thaliana
  peptide (1)..(228): Ceres Seq. ID no. 12321271
TLKYLSNTKIIVPTLSLSLSVTKKSPMAKQYLFVLLSISYLLSLELTAATAASQTGASKKAINFIQSSCKTTTYPALCVHSLSVYANDIQTSPKRLAETAIAVTLSRAQSTKLFVSRLTRMKGLKKREVEAIKDCVEEMNDTVDRLTKSVQELKLCGSAKDQDQFAYHMSNAQTWTSAALTDENTCSDGFSGRVMDGRIKNSVRARIMNVGHETSNALSLINAFAKTY

SEQ ID NO: 21361 - protein, 202 aa, Arabidopsis thaliana
  peptide (1)..(202): Ceres Seq. ID no. 12321272
MAKQYLFVLLSISYLLSLELTAATAASQTGASKKAINFIQSSCKTTTYPALCVHSLSVYANDIQTSPKRLAETAIAVTLSRAQSTKLFVSRLTRMKGLKKREVEAIKDCVEEMNDTVDRLTKSVQELKLCGSAKDQDQFAYHMSNAQTWTSAALTDENTCSDGFSGRVMDGRIKNSVRARIMNVGHETSNALSLINAFAKTY

SEQ ID NO: 21362 - DNA, 1173 bp, Arabidopsis thaliana
  misc_feature (1)..(1173): Ceres Seq. ID no. 13486782
  misc_feature (1)..(1173): Ortholog of  Ceres SEQ ID NO 13654989 as cited in SEQ ID NO 63117
gaactctagtgttaagatttagcagagagtatccgaatgggaaattgtctctcagcttcgacacttcccaccgaaccaaatgctcccaaatcagtggaggagggtgtgaaagtcttcacggtggcagatctgaagaaagcgactaatgatttcggaaaccagatggaactaggagagagcttaggatacatcaatcccaaaacgttatctccggccaagaaaggtgttggcatggccgtcgcggtcaagaaaatttacttagccaatgaacaagcttttcaagattggcttgttgacgtagagtttctacgacataactctcatccaagcttggtgaagctaattggctactgttatgatcgtgatatgttgtttattgtttctgaatactttccaaatggaagcttaggaagttacatcagtagagatagtcgtccaaagtcattgccgtgggagacacgacttaagatatccataggagcggctcagtgtcttgccttcttgcactctaggaagcaagccggtctataccgcagatatctcactgcttcgaaaatcctgctcgactcggacttcaacgcaagagtttcctattttggaaagccaaaagtttctctcgatgaattggtatacaccatcgggttttcaaatgtagcacctagatatcaatacccacctcccgaatacatactctcagggatgtcgaacatggcgggcgatgtgtatagctttggtgttatactacttaaaatgttaactggtttaggaaaagacctcacaatctcagcaaagcgagaaataaaaaataaaaagtacaacattgtggagatgatcgatccagatttgaagaatagctatccacttgaagcgggaagacttatgtgcgagcttattaaacaatgcctagaggtagacccgaagatgcgaccaaccatgcaagaagtgctagataatctgaatgctatagctcagatttgaggagaaactatataagggttactaatgctgaaaacattgtttcactataagacagttataacatagtcaatgtatgcatttgtatacaataactcgtatatgacgagaagtattaagaaacaagacctaattctccattcttatccaccactcaagaacagagctatatgctaatcaactttgaacctttacact

SEQ ID NO: 21363 - protein, 313 aa, Arabidopsis thaliana
  peptide (1)..(313): Ceres Seq. ID no. 13486783
MGNCLSASTLPTEPNAPKSVEEGVKVFTVADLKKATNDFGNQMELGESLGYINPKTLSPAKKGVGMAVAVKKIYLANEQAFQDWLVDVEFLRHNSHPSLVKLIGYCYDRDMLFIVSEYFPNGSLGSYISRDSRPKSLPWETRLKISIGAAQCLAFLHSRKQAGLYRRYLTASKILLDSDFNARVSYFGKPKVSLDELVYTIGFSNVAPRYQYPPPEYILSGMSNMAGDVYSFGVILLKMLTGLGKDLTISAKREIKNKKYNIVEMIDPDLKNSYPLEAGRLMCELIKQCLEVDPKMRPTMQEVLDNLNAIAQI

SEQ ID NO: 21364 - protein, 271 aa, Arabidopsis thaliana
  peptide (1)..(271): Ceres Seq. ID no. 13486784
MELGESLGYINPKTLSPAKKGVGMAVAVKKIYLANEQAFQDWLVDVEFLRHNSHPSLVKLIGYCYDRDMLFIVSEYFPNGSLGSYISRDSRPKSLPWETRLKISIGAAQCLAFLHSRKQAGLYRRYLTASKILLDSDFNARVSYFGKPKVSLDELVYTIGFSNVAPRYQYPPPEYILSGMSNMAGDVYSFGVILLKMLTGLGKDLTISAKREIKNKKYNIVEMIDPDLKNSYPLEAGRLMCELIKQCLEVDPKMRPTMQEVLDNLNAIAQI

SEQ ID NO: 21365 - protein, 248 aa, Arabidopsis thaliana
  peptide (1)..(248): Ceres Seq. ID no. 13486785
MAVAVKKIYLANEQAFQDWLVDVEFLRHNSHPSLVKLIGYCYDRDMLFIVSEYFPNGSLGSYISRDSRPKSLPWETRLKISIGAAQCLAFLHSRKQAGLYRRYLTASKILLDSDFNARVSYFGKPKVSLDELVYTIGFSNVAPRYQYPPPEYILSGMSNMAGDVYSFGVILLKMLTGLGKDLTISAKREIKNKKYNIVEMIDPDLKNSYPLEAGRLMCELIKQCLEVDPKMRPTMQEVLDNLNAIAQI

SEQ ID NO: 21366 - DNA, 947 bp, Arabidopsis thaliana
  misc_feature (1)..(947): Ceres Seq. ID no. 12322248
  misc_feature (1)..(947): Ortholog of  Ceres SEQ ID NO 14304536 as cited in SEQ ID NO 53436
  misc_feature (1)..(947): Ortholog of  Ceres SEQ ID NO 14315438 as cited in SEQ ID NO 57205
atcaatatcaaattgtcgaatttacacgaagaacaaaaataaggaatcgagagagagagagagagagataggcgcatatatgggaagaaaatgagagaaaaatggaaactttgaccgccattgaacactcacgagatctcttcttcttgtatttcttctctctcctctctgtctgatgcgtgttcttgattcatcggctcagatcagtcaccaaatagaataaatagcaaacaagatcctctgtggaatttgatacatagagaaactgtctagtgctgtggtgtcttttgagattttcttgtggttctgtggattgtttgttggttggttgcttcttggataaatggcagaagtccataatcaactagagatcaagtttcggttaaccgatggttcggatatcggtcctaaagcattccctgatgctacaactgtttcggctttgaaggaaactgttatttctgaatggccaagagagaaggagaatggaccgaaaacagtgaaagaggtgaagttgataagcgcagggaaggtattggagaacagcaagacggttaaagactaccgaagtcctgtctctaatctcgcaggcgctgtcaccacaatgcacgttatcatccaagctccggttacggaaaaagaaaagaagcctaaaggtgacccgaagatgaacaaatgcgtctgttcagtcatgtaagagagtagcaaaatctcaagagagactcatcagatttctggtccttaagtttggtctttcttgtggttagtatagattgtttactaatacagatacagaattaaagagtattgaaccatttttttttataataaaaaaatagtataaatcaaagctctactctagcttgttgcaagattgaaagagatcatcaataaaatcaaggtactggtgattcagttcctcttaatggagtctctgttttagctct

SEQ ID NO: 21367 - protein, 117 aa, Arabidopsis thaliana
  peptide (1)..(117): Ceres Seq. ID no. 12322249
MAEVHNQLEIKFRLTDGSDIGPKAFPDATTVSALKETVISEWPREKENGPKTVKEVKLISAGKVLENSKTVKDYRSPVSNLAGAVTTMHVIIQAPVTEKEKKPKGDPKMNKCVCSVM

SEQ ID NO: 21368 - DNA, 1766 bp, Arabidopsis thaliana
  misc_feature (1)..(1766): Ceres Seq. ID no. 12321273
  misc_feature (1)..(1766): Ortholog of  Ceres SEQ ID NO 13582285 as cited in SEQ ID NO 59817
ctaacattggattcgagctctctagtgaagaatccgccatggctgttccatttctaagctcttctctacaactcacacccacttctccgattctcttcactaaagtaacaccaacaccaataatccacaaccacagatcaacatgcactatacccacaaagcctcgtctacgtctcctccgccgctccgccgtcgctggaaccgccgtatctgatcaaacagaaggaggtggagatgttcttttaaaccctgaagaagagaaacgtgttgaggtggcggattatgattggacagaggaatggtatccattgtacttaactaaaaacgtccctgaagatgcgcctcttggcctcaccgtctacgatcgtcaaattgttttgtataaagacggtgaaggaacacttcgttgttacgaagatcggtgtcctcatcggttggctaagttgtctgaaggacaattgattgatgggagattggaatgtttgtatcatggttggcaatttgaaggagagggcaaatgtgtcaagattcctcagcttcctgcaagtgctaagattccaaaggctgcttgtgtgaagacgtatgaggtgaaggattcacaaggagttgtgtgggtgtggatgtcaacaaagacacctccaaaccctgagaagcttccttggtttgagaatttcgctagacccggttttttcgacatttcgactactcatgagcttccttatgaccattccattcttttagagaatctgatggatcctgctcatgttcctatctctcatgatagaacggatttcactgctaaaagaaaagatgctcagcctttggttttcgaggtcacagagcgaagtaatcggggtttcgcagggacttggggccgagagagagaaggtgggaaagggagtaatttacttcggtttgatgctccttgtgttctgcagaacaatcgagagttcgaggggaaggatggagtgaagaactatttttcagggctgtttctttgtagacctacagggcaagggaagtctatgcttattgttaggtttggggtcacaaaaagatcgcctttggtttcggtgttacctcaatggttctggcatcagaatgcctgcaaggtttttgaacaagacatggggtttctatcgtctcaaaaacgaggttctgatgaaggagaaagtaccaactaaggacttgtatttgaatctaaagtcatcggacacatgggtcgctgaatagaaagtggatggacaaagttggtcatgggatgccttaccatttcgggcataggaccatatctctccccaaagtccctcctgtcgtggaacatgccccggcagggctcattgcagctctctctgcttcttaccctgcaaaaggcggaattgggactatgcatgctcccaatttggctaaccggtacttcagacatattattcattgtagaagctgcagcaatgtgatcaaatcttttgagctctggaaaaatatcctctctgccacggcagtggctttgacggctttggccattctggtggttagtagacagtggaaggctgtcctgttaggttcagcagcattgtgctcagccgcagcttatacctgcttaagagctataaatctaaacaccaataacttcattagaacacacagaagactatgaaaatgtatagtgtcatgtttcctcttcttccaacaatatgtatttcatgaaataaatttttgcttgtaaacgcaattatataattcagaaggttccaatgtttgccagc

SEQ ID NO: 21369 - protein, 393 aa, Arabidopsis thaliana
  peptide (1)..(393): Ceres Seq. ID no. 12321274
NIGFELSSEESAMAVPFLSSSLQLTPTSPILFTKVTPTPIIHNHRSTCTIPTKPRLRLLRRSAVAGTAVSDQTEGGGDVLLNPEEEKRVEVADYDWTEEWYPLYLTKNVPEDAPLGLTVYDRQIVLYKDGEGTLRCYEDRCPHRLAKLSEGQLIDGRLECLYHGWQFEGEGKCVKIPQLPASAKIPKAACVKTYEVKDSQGVVWVWMSTKTPPNPEKLPWFENFARPGFFDISTTHELPYDHSILLENLMDPAHVPISHDRTDFTAKRKDAQPLVFEVTERSNRGFAGTWGREREGGKGSNLLRFDAPCVLQNNREFEGKDGVKNYFSGLFLCRPTGQGKSMLIVRFGVTKRSPLVSVLPQWFWHQNACKVFEQDMGFLSSQKRGSDEGESTN

SEQ ID NO: 21370 - protein, 381 aa, Arabidopsis thaliana
  peptide (1)..(381): Ceres Seq. ID no. 12321275
MAVPFLSSSLQLTPTSPILFTKVTPTPIIHNHRSTCTIPTKPRLRLLRRSAVAGTAVSDQTEGGGDVLLNPEEEKRVEVADYDWTEEWYPLYLTKNVPEDAPLGLTVYDRQIVLYKDGEGTLRCYEDRCPHRLAKLSEGQLIDGRLECLYHGWQFEGEGKCVKIPQLPASAKIPKAACVKTYEVKDSQGVVWVWMSTKTPPNPEKLPWFENFARPGFFDISTTHELPYDHSILLENLMDPAHVPISHDRTDFTAKRKDAQPLVFEVTERSNRGFAGTWGREREGGKGSNLLRFDAPCVLQNNREFEGKDGVKNYFSGLFLCRPTGQGKSMLIVRFGVTKRSPLVSVLPQWFWHQNACKVFEQDMGFLSSQKRGSDEGESTN

SEQ ID NO: 21371 - DNA, 860 bp, Arabidopsis thaliana
  misc_feature (1)..(860): Ceres Seq. ID no. 12421947
  misc_feature (1)..(860): Ortholog of  Ceres SEQ ID NO 13504237 as cited in SEQ ID NO 100
  misc_feature (1)..(860): Ortholog of  Ceres SEQ ID NO 15176643 as cited in SEQ ID NO 57825
  misc_feature (1)..(860): Ortholog of  Ceres SEQ ID NO 12598265 as cited in SEQ ID NO 65873
  misc_feature (1)..(860): Ortholog of  Ceres SEQ ID NO 15180736 as cited in SEQ ID NO 0
attcgcgcgacgcaaacgatcttcaggtgatcttctttctccaaatcctctctcataactctgatttcgtacttgtgtatttgagctcacgctctgtttctctcaccacagccatggccaccgccgcagatgttgacgctgagattcagcaggcgctcactaacgaagtcaagctcttcaaccgctggacctatgacgacgttacggtcacagacatcagtcttgttgactacattggagttcaggcagctaaacatgctacctttgttccccacaccgctggaagatactctgtgaagagattcaggaaggctcagtgccccattgttgagaggctcaccaactctctcatgatgcacgggaggaacaacggtaagaaattgatggctgtcaggatcgtcaagcacgccatggagattatccacctcttgtctgacttgaacccaattcaggtcatcattgacgccattgtcaacagtggtccacgtgaagatgctaccagaattggatctgctggtgttgttaggagacaagctgttgatatctctcctctaagacgtgttaaccaggctatcttcttgattaccactggtgctcgtgaagctgctttcagaaacatcaagactatagctgagtgccttgctgatgaattgatcaacgcagccaagggctcttccaacagctatgccatcaagaagaaggatgagattgaaagagttgccaaggctaatcgttaaggattttccttttgccctgtgcgttacaatctcgtatcaatgagtttaatgttttatcttcatttagattgaaatatgtatctcagatgtttgctcttttgttttatgaagtttatttcgtct

SEQ ID NO: 21372 - protein, 244 aa, Arabidopsis thaliana
  peptide (1)..(244): Ceres Seq. ID no. 12421948
SRDANDLQVIFFLQILSHNSDFVLVYLSSRSVSLTTAMATAADVDAEIQQALTNEVKLFNRWTYDDVTVTDISLVDYIGVQAAKHATFVPHTAGRYSVKRFRKAQCPIVERLTNSLMMHGRNNGKKLMAVRIVKHAMEIIHLLSDLNPIQVIIDAIVNSGPREDATRIGSAGVVRRQAVDISPLRRVNQAIFLITTGAREAAFRNIKTIAECLADELINAAKGSSNSYAIKKKDEIERVAKANR

SEQ ID NO: 21373 - protein, 207 aa, Arabidopsis thaliana [sequence omitted]

SEQ ID NO: 21374 - protein, 128 aa, Arabidopsis thaliana
  peptide (1)..(128): Ceres Seq. ID no. 12421950
MMHGRNNGKKLMAVRIVKHAMEIIHLLSDLNPIQVIIDAIVNSGPREDATRIGSAGVVRRQAVDISPLRRVNQAIFLITTGAREAAFRNIKTIAECLADELINAAKGSSNSYAIKKKDEIERVAKANR

SEQ ID NO: 21375 - DNA, 1556 bp, Arabidopsis thaliana
  misc_feature (1)..(1556): Ceres Seq. ID no. 12371385
  misc_feature (1)..(1556): Ortholog of  Ceres SEQ ID NO 13597574 as cited in SEQ ID NO 64677
  misc_feature (1)..(1556): Ortholog of  Ceres SEQ ID NO 13597843 as cited in SEQ ID NO 64850
  misc_feature (1)..(1556): Ortholog of  Ceres SEQ ID NO 13597678 as cited in SEQ ID NO 65375
  misc_feature (1)..(1556): Ortholog of  Ceres SEQ ID NO 13662880 as cited in SEQ ID NO 65422
  misc_feature (1)..(1556): Ortholog of  Ceres SEQ ID NO 13596180 as cited in SEQ ID NO 67941
  misc_feature (1)..(1556): Ortholog of  Ceres SEQ ID NO 13591190 as cited in SEQ ID NO 68044
  misc_feature (1)..(1556): Ortholog of  Ceres SEQ ID NO 13595961 as cited in SEQ ID NO 68223
aaggtagctaattctcttctttgaatgtagattgaggaagagaaaatcaaaagctatctcttgttgttagagatgcggaatgtagagctcatcttcatccccacaccaaccgttggtcatcttgttccgtttcttgaatttgctaggcgtctcattgagcaagatgataggatccgtatcacaatcctcttgatgaaactacaaggtcagtctcatctagacacttatgttaaatcaattgcctcctctcaaccgtttgttagattcattgatgtccctgagttagaggagaaacctacacttggtagtacacaatctgtggaagcttatgtgtatgatgttattgagagaaatatccctcttgtgaggaatatagtcatggatattttaacttctcttgcattggatggagttaaggtcaagggattagttgttgactttttctgtctccctatgattgacgttgctaaagatataagtctccctttctatgtgttcttgactacaaattccgggttcttagctatgatgcagtatctagcagatcgacatagtagagatacatcggtttttgtaagaaactcggaagaaatgttgtcgatacctggatttgtaaaccctgtcccagccaatgttctgccgtcagctctgtttgttgaagatggttatgatgcttacgttaagctggccatattgtttacaaaggccaatggaatcctagtgaatagctcctttgatattgagccttactctgtgaatcattttcttcaagaacagaattatccttctgtttatgctgttggccccatatttgacttgaaagcccagcctcatccagagcaggacctaacccgtcgtgacgagttgatgaaatggcttgatgatcaacccgaggcatcggttgtattcctttgttttgggagtatggcaaggttaagaggttctctagtgaaggaaatagctcatggacttgagctatgtcaatatagattcctctggtcactccgtaaagaagaggtgacaaaggatgatttgccagaggggttccttgaccgtgtcgatggacgtggaatgatatgtggttggtctcctcaggtagaaatactggcccataaggcagtgggaggctttgtttctcactgtggatggaactcaatagtagagagtttgtggtttggcgtgccaattgtgacatggccaatgtatgcagagcaacaactcaatgcgtttctgatggtgaaggaactgaagctagctgtggagctgaagcttgattacagggtacatagtgatgagatagtaaacgcaaacgagatagagaccgctattcgttatgtaatggacacggataataatgttgtgaggaaacgagtgatggatatctcgcagatgatccagagagctacgaagaatggtggatcttcgtttgccgcaattgagaaattcatatatgacgtgataggaattaagccctagccttttcttgtccaataagctataaccttgttactttgtactaaaacttgtttttgaaagagctacgaatgaattttgct

SEQ ID NO: 21376 - protein, 467 aa, Arabidopsis thaliana
  peptide (1)..(467): Ceres Seq. ID no. 12371386
MRNVELIFIPTPTVGHLVPFLEFARRLIEQDDRIRITILLMKLQGQSHLDTYVKSIASSQPFVRFIDVPELEEKPTLGSTQSVEAYVYDVIERNIPLVRNIVMDILTSLALDGVKVKGLVVDFFCLPMIDVAKDISLPFYVFLTTNSGFLAMMQYLADRHSRDTSVFVRNSEEMLSIPGFVNPVPANVLPSALFVEDGYDAYVKLAILFTKANGILVNSSFDIEPYSVNHFLQEQNYPSVYAVGPIFDLKAQPHPEQDLTRRDELMKWLDDQPEASVVFLCFGSMARLRGSLVKEIAHGLELCQYRFLWSLRKEEVTKDDLPEGFLDRVDGRGMICGWSPQVEILAHKAVGGFVSHCGWNSIVESLWFGVPIVTWPMYAEQQLNAFLMVKELKLAVELKLDYRVHSDEIVNANEIETAIRYVMDTDNNVVRKRVMDISQMIQRATKNGGSSFAAIEKFIYDVIGIKP

SEQ ID NO: 21377 - protein, 427 aa, Arabidopsis thaliana
  peptide (1)..(427): Ceres Seq. ID no. 12371387
MKLQGQSHLDTYVKSIASSQPFVRFIDVPELEEKPTLGSTQSVEAYVYDVIERNIPLVRNIVMDILTSLALDGVKVKGLVVDFFCLPMIDVAKDISLPFYVFLTTNSGFLAMMQYLADRHSRDTSVFVRNSEEMLSIPGFVNPVPANVLPSALFVEDGYDAYVKLAILFTKANGILVNSSFDIEPYSVNHFLQEQNYPSVYAVGPIFDLKAQPHPEQDLTRRDELMKWLDDQPEASVVFLCFGSMARLRGSLVKEIAHGLELCQYRFLWSLRKEEVTKDDLPEGFLDRVDGRGMICGWSPQVEILAHKAVGGFVSHCGWNSIVESLWFGVPIVTWPMYAEQQLNAFLMVKELKLAVELKLDYRVHSDEIVNANEIETAIRYVMDTDNNVVRKRVMDISQMIQRATKNGGSSFAAIEKFIYDVIGIKP

SEQ ID NO: 21378 - protein, 365 aa, Arabidopsis thaliana
  peptide (1)..(365): Ceres Seq. ID no. 12371388
MDILTSLALDGVKVKGLVVDFFCLPMIDVAKDISLPFYVFLTTNSGFLAMMQYLADRHSRDTSVFVRNSEEMLSIPGFVNPVPANVLPSALFVEDGYDAYVKLAILFTKANGILVNSSFDIEPYSVNHFLQEQNYPSVYAVGPIFDLKAQPHPEQDLTRRDELMKWLDDQPEASVVFLCFGSMARLRGSLVKEIAHGLELCQYRFLWSLRKEEVTKDDLPEGFLDRVDGRGMICGWSPQVEILAHKAVGGFVSHCGWNSIVESLWFGVPIVTWPMYAEQQLNAFLMVKELKLAVELKLDYRVHSDEIVNANEIETAIRYVMDTDNNVVRKRVMDISQMIQRATKNGGSSFAAIEKFIYDVIGIKP

SEQ ID NO: 21379 - DNA, 755 bp, Arabidopsis thaliana
  misc_feature (1)..(755): Ceres Seq. ID no. 12348712
  misc_feature (1)..(755): Ortholog of  Ceres SEQ ID NO 12586195 as cited in SEQ ID NO 63768
  misc_feature (1)..(755): Ortholog of  Ceres SEQ ID NO 13599518 as cited in SEQ ID NO 0
agaactcagatttgaagcaaaacatcaatcggagaaggaaggaagaaagaaaagatgggagctttagggaagctaatcgacgtagctctcttcgtatactttgtttcaatggcgataattgcgccgctcatcgacgggcaaacctcacttccttcaggaatatatccagcgtttctcaccgatctgaaaagcaagtacattgccgattttggagattacttgctcatggagaagccgcatttcctagttggactcgtttggcatgagcttctgttcttatggccgctctccattgctaacgtctacgccattcttgccggaaagtcgtggtttggtaccacctgcttgttgtatggagcttccctcgtcacttccatggctgcaatcctaggagatatgataggttcagggaaggcatctgatcgattgctaatgatgtatgtgcctttcatgggttttgggattctggctgttcttcgtggcttagtttatcgatccaccaaaaacactggatcttctggcaagagatccactatcatgcccagaagaaagctggcctgagattcaaaaaaaaaaaaagcagttgatttttctctctggaagacttactcatcctttttctgtatatgcctagaaagaggtgtttatttttccttgtgaaaactttattgctttctgatttatgtggaattcttgtttgttgactcagcaacaatgaaatgtttacttggttgatataaaattcattcttgact

SEQ ID NO: 21380 - protein, 168 aa, Arabidopsis thaliana
  peptide (1)..(168): Ceres Seq. ID no. 12348713
MGALGKLIDVALFVYFVSMAIIAPLIDGQTSLPSGIYPAFLTDLKSKYIADFGDYLLMEKPHFLVGLVWHELLFLWPLSIANVYAILAGKSWFGTTCLLYGASLVTSMAAILGDMIGSGKASDRLLMMYVPFMGFGILAVLRGLVYRSTKNTGSSGKRSTIMPRRKLA

SEQ ID NO: 21381 - protein, 150 aa, Arabidopsis thaliana
  peptide (1)..(150): Ceres Seq. ID no. 12348714
MAIIAPLIDGQTSLPSGIYPAFLTDLKSKYIADFGDYLLMEKPHFLVGLVWHELLFLWPLSIANVYAILAGKSWFGTTCLLYGASLVTSMAAILGDMIGSGKASDRLLMMYVPFMGFGILAVLRGLVYRSTKNTGSSGKRSTIMPRRKLA

SEQ ID NO: 21382 - protein, 111 aa, Arabidopsis thaliana
  peptide (1)..(111): Ceres Seq. ID no. 12348715
MEKPHFLVGLVWHELLFLWPLSIANVYAILAGKSWFGTTCLLYGASLVTSMAAILGDMIGSGKASDRLLMMYVPFMGFGILAVLRGLVYRSTKNTGSSGKRSTIMPRRKLA

SEQ ID NO: 21383 - DNA, 910 bp, Arabidopsis thaliana
  misc_feature (1)..(910): Ceres Seq. ID no. 12393253
  misc_feature (1)..(910): Ortholog of  Ceres SEQ ID NO 12611392 as cited in SEQ ID NO 56826
aatataggtagctacaactaattagagtgtttcttgttgttaaaaatatcgtacaaaaatggccgatgaggtcacaatcgggtttcgcttctatcccacggaagaagaactggtttcgttctacctacgaaaccagctcgaaggaaggagtgatgactcaatgcatcgtgtcattcccgtacttgacgtctttgaggtcgagcctagtcatcttccaaatgttgctggagtgagatgtcgaggagacgctgagcaatggttcttcttcgtgccacgacaagaacgcgaagcaagaggaggcagaccgagtagaactactggttcaggatactggaaagcaactggatcacctggtccagtcttttccaaagacaacaaaatgattggagcaaagaaaactatggttttctacactggaaaagcacccacaggaagaaaaactaaatggaaaatgaatgagtaccacgccgttgacgaaacagtcaacgcttccacaatccctaagctgagacgtgagttcagtttatgtcgagtctacataacaacaggaagctccagagcttttgatagacgtcctgagggagttttgcagacagagagaatgctaacaagtgatgttgcagtagctgagacatcgttccgtgtggaaagctcactggaaacttcgatttcaggaggagaacatattgatgtctctatgaacacagagtttgttgatggactatcagaaccgatgtgggactgggaacagctgacttggccttgaagctatatagattttataatcaagcaaatttaaacttgtttcaattgcttattgttagtttgaattttatgacccgaaagattctttttctttctttaccttgtaacgtgagaatttgagaaataataaatgacctagacagtg

SEQ ID NO: 21384 - protein, 235 aa, Arabidopsis thaliana
  peptide (1)..(235): Ceres Seq. ID no. 12393254
MADEVTIGFRFYPTEEELVSFYLRNQLEGRSDDSMHRVIPVLDVFEVEPSHLPNVAGVRCRGDAEQWFFFVPRQEREARGGRPSRTTGSGYWKATGSPGPVFSKDNKMIGAKKTMVFYTGKAPTGRKTKWKMNEYHAVDETVNASTIPKLRREFSLCRVYITTGSSRAFDRRPEGVLQTERMLTSDVAVAETSFRVESSLETSISGGEHIDVSMNTEFVDGLSEPMWDWEQLTWP

SEQ ID NO: 21385 - protein, 201 aa, Arabidopsis thaliana
  peptide (1)..(201): Ceres Seq. ID no. 12393255
MHRVIPVLDVFEVEPSHLPNVAGVRCRGDAEQWFFFVPRQEREARGGRPSRTTGSGYWKATGSPGPVFSKDNKMIGAKKTMVFYTGKAPTGRKTKWKMNEYHAVDETVNASTIPKLRREFSLCRVYITTGSSRAFDRRPEGVLQTERMLTSDVAVAETSFRVESSLETSISGGEHIDVSMNTEFVDGLSEPMWDWEQLTWP

SEQ ID NO: 21386 - protein, 128 aa, Arabidopsis thaliana
  peptide (1)..(128): Ceres Seq. ID no. 12393256
MIGAKKTMVFYTGKAPTGRKTKWKMNEYHAVDETVNASTIPKLRREFSLCRVYITTGSSRAFDRRPEGVLQTERMLTSDVAVAETSFRVESSLETSISGGEHIDVSMNTEFVDGLSEPMWDWEQLTWP

SEQ ID NO: 21387 - DNA, 737 bp, Arabidopsis thaliana
  misc_feature (1)..(737): Ceres Seq. ID no. 12370084
  misc_feature (1)..(737): Ortholog of  Ceres SEQ ID NO 15178291 as cited in SEQ ID NO 0
attttgctctcaaatcgcgactcctctctgggctctctccttctgtatctctctaaggggaacaacgaaatcatcaccttctcttttatcgtcaccggcgatcattcaagactcgatctccggtaatcagaacattttcattcgccgacatggcgatgaccatcgaagtacttgctggacttgctttcatgttttcatctagtatcctcctacagatcctggcatgcgcgatatatggtaactggtggccaatgctatcagcactcatgtatgtagtggtgcctatgccttgtatgttctttggaggaggctcaacccaattccttattagtcgggacggtggagggtggatagacgcagcgaagttcttgaccggagcatcgaccgtgggaagccttgctatcccaatcatcttaaggcacgcacagatgatcgagacaggtgcaatgctcatagagttcacatcattcttcatattcatttgcactgtcatgtgttttcaccgggctagtctcgatgatgactggtaacgtagatgttgctgctcgtgaattactaattggattcgtatgagaaagagagtgtgaagaaaagatgaggttactatgagtggttaagaaagttgtgttcttctccctctttttgtaaagctttgtatcactcaatgtttgtaaaaagttttattcatcactgtgaatcttttcctgaaactaagtgccaaaatattttgtttcgcc

SEQ ID NO: 21388 - protein, 126 aa, Arabidopsis thaliana
  peptide (1)..(126): Ceres Seq. ID no. 12370085
MAMTIEVLAGLAFMFSSSILLQILACAIYGNWWPMLSALMYVVVPMPCMFFGGGSTQFLISRDGGGWIDAAKFLTGASTVGSLAIPIILRHAQMIETGAMLIEFTSFFIFICTVMCFHRASLDDDW

SEQ ID NO: 21389 - protein, 124 aa, Arabidopsis thaliana
  peptide (1)..(124): Ceres Seq. ID no. 12370086
MTIEVLAGLAFMFSSSILLQILACAIYGNWWPMLSALMYVVVPMPCMFFGGGSTQFLISRDGGGWIDAAKFLTGASTVGSLAIPIILRHAQMIETGAMLIEFTSFFIFICTVMCFHRASLDDDW

SEQ ID NO: 21390 - protein, 113 aa, Arabidopsis thaliana
  peptide (1)..(113): Ceres Seq. ID no. 12370087
MFSSSILLQILACAIYGNWWPMLSALMYVVVPMPCMFFGGGSTQFLISRDGGGWIDAAKFLTGASTVGSLAIPIILRHAQMIETGAMLIEFTSFFIFICTVMCFHRASLDDDW

SEQ ID NO: 21391 - protein, 87 aa, Arabidopsis thaliana
  peptide (1)..(87): Ceres Seq. ID no. 12370088
MYVVVPMPCMFFGGGSTQFLISRDGGGWIDAAKFLTGASTVGSLAIPIILRHAQMIETGAMLIEFTSFFIFICTVMCFHRASLDDDW

SEQ ID NO: 21392 - DNA, 784 bp, Arabidopsis thaliana
  misc_feature (1)..(784): Ceres Seq. ID no. 12738720
  misc_feature (1)..(784): Ortholog of  Ceres SEQ ID NO 13595164 as cited in SEQ ID NO 56222
  misc_feature (1)..(784): Ortholog of  Ceres SEQ ID NO 13591068 as cited in SEQ ID NO 69043
  misc_feature (1)..(784): Ortholog of  Ceres SEQ ID NO 13623041 as cited in SEQ ID NO 0
caaagaacgcatatatgtttcagcaattcgacaatacagcaaatacaaagatccactttgaaactacaggaccagaaatctgggaagatacaatgggtaatgtcgatatattcgttgccggaataggaactggtggtactgtaactggtactggaggtttcttgaaaatgatgaacaaggatattaaggtagttggcgttgaaccatcagaaagaagtgtgatttctggagacaaccctggttacttaccgggaatcttggatgttaaattacttgatgaagtgtttaaggttagcaacggggaagcgattgagatggcgaggagactagctttagaggaaggattgctggttgggatttcatctggagctgctgcagtagcagcagtcagcttggctaaaagagcagagaatgccggtaaactaatcacggttctgtttccaagccatggcgagcggtatatcacaacggctctgtttagttccatcaacagagaagtccaagagatgagatattagtagcagccattagaaaagcccccaaagtttggtccttttggagagtgtaaacaacaaatctctttgcaatacagaaaagagaggtttcagaagactgtgaggttagagctcacacgagaactgaaagataaacatgtctcgagcccaaccagttttattcaaagatttgtgaatgtatagaagatcatagaccttgttgcattattcttcttcttctcactcatatgtcagggaagtatgctgaacaaataaaagtttgatcatcc

SEQ ID NO: 21393 - protein, 171 aa, Arabidopsis thaliana
  peptide (1)..(171): Ceres Seq. ID no. 12738721
KNAYMFQQFDNTANTKIHFETTGPEIWEDTMGNVDIFVAGIGTGGTVTGTGGFLKMMNKDIKVVGVEPSERSVISGDNPGYLPGILDVKLLDEVFKVSNGEAIEMARRLALEEGLLVGISSGAAAVAAVSLAKRAENAGKLITVLFPSHGERYITTALFSSINREVQEMRY

SEQ ID NO: 21394 - protein, 167 aa, Arabidopsis thaliana
  peptide (1)..(167): Ceres Seq. ID no. 12738722
MFQQFDNTANTKIHFETTGPEIWEDTMGNVDIFVAGIGTGGTVTGTGGFLKMMNKDIKVVGVEPSERSVISGDNPGYLPGILDVKLLDEVFKVSNGEAIEMARRLALEEGLLVGISSGAAAVAAVSLAKRAENAGKLITVLFPSHGERYITTALFSSINREVQEMRY

SEQ ID NO: 21395 - protein, 141 aa, Arabidopsis thaliana
  peptide (1)..(141): Ceres Seq. ID no. 12738723
MGNVDIFVAGIGTGGTVTGTGGFLKMMNKDIKVVGVEPSERSVISGDNPGYLPGILDVKLLDEVFKVSNGEAIEMARRLALEEGLLVGISSGAAAVAAVSLAKRAENAGKLITVLFPSHGERYITTALFSSINREVQEMRY

SEQ ID NO: 21396 - DNA, 1239 bp, Arabidopsis thaliana
  misc_feature (1)..(1239): Ceres Seq. ID no. 12333892
  misc_feature (1)..(1239): Ortholog of  Ceres SEQ ID NO 14306439 as cited in SEQ ID NO 53628
  misc_feature (1)..(1239): Ortholog of  Ceres SEQ ID NO 12611235 as cited in SEQ ID NO 56101
acatttttccctctcttctctctctttcgctctttcttcttccccgcagttcccggagacgacgccggaggaaaatcgtacggaaactttgcttcgacttcacgtggccgctccacgaagcgcctttgggtttcgtcttccccgtttctctttctctctcttcttttgcctttgttaccacgaatagaacgagaggagagagataggaggagagttttgggatattggtggagagcgattatcgggagagccagagaaaaaaataagcagcttcttcctccctcatcgttgggaccgtgacttttgttttcttcagctttaagcaaacaaaaaaaaaagatgaccggcgttggcgagaatcagcttatctccattcaacctgatgaactcaaatttctctttgaacttgagaagcaaagctactgtgatcttaaagttgccaataaaacagagaactatgttgctttcaaggtgaaaacaacatctccaaagaagtattttgtaagacctaacactggtgtcattcagccatgggactcttgcatcattagagttactctacaagcgcaacgagagtatcctccagatatgcagtgcaaagacaaatttctcctgcaaagtaccattgtacctccacacactgatgtggatgaacttcctcaagacactttcaccaaggacagtggaaagacattaacagaatgtaagctcaaagtctcttatattaccccgtctacaacccaaagatcctctgaatccggagcaacaaatggtgatggacaaagctcggaaaccatctctactatacagcggctgaaggaagagcgagatgcagccgttaagcaaacacaacagctgcaacatgaattggaaacggtaaggaggcggagaaaccagaggaacagcggaaatgggctatccttgaagttggcagctatggttggactcatcggactcatcatcggtttcatcctaaaacttaccttagcttctcccacataacaactcttgagcttcaacacatcgcctatcatctcaatatatgtaacagccgaatcaaaacagattcacatattttcgggtattttaaatcttctaaatttgggttatttatatccctctctttctttctcctaatgttccacacgtttcttccatcaaattttcttctttttttcagttataaattatgtacatttttgacccaagagaccctttcatcattggttttacttgtcc

SEQ ID NO: 21397 - protein, 220 aa, Arabidopsis thaliana
  peptide (1)..(220): Ceres Seq. ID no. 12333893
MTGVGENQLISIQPDELKFLFELEKQSYCDLKVANKTENYVAFKVKTTSPKKYFVRPNTGVIQPWDSCIIRVTLQAQREYPPDMQCKDKFLLQSTIVPPHTDVDELPQDTFTKDSGKTLTECKLKVSYITPSTTQRSSESGATNGDGQSSETISTIQRLKEERDAAVKQTQQLQHELETVRRRRNQRNSGNGLSLKLAAMVGLIGLIIGFILKLTLASPT

SEQ ID NO: 21398 - protein, 137 aa, Arabidopsis thaliana
  peptide (1)..(137): Ceres Seq. ID no. 12333894
MQCKDKFLLQSTIVPPHTDVDELPQDTFTKDSGKTLTECKLKVSYITPSTTQRSSESGATNGDGQSSETISTIQRLKEERDAAVKQTQQLQHELETVRRRRNQRNSGNGLSLKLAAMVGLIGLIIGFILKLTLASPT

SEQ ID NO: 21399 - DNA, 465 bp, Arabidopsis thaliana
  misc_feature (1)..(465): Ceres Seq. ID no. 12421653
  misc_feature (1)..(465): Ortholog of  Ceres SEQ ID NO 14308991 as cited in SEQ ID NO 0
gagatcgagagaagaatagtttgatcatcttgtgagaaaaataatggctgcttcagtgatgctatcttcggtgacattgaaaccagctggtttcacggtggagaagacggcgtcgacgcttccggcagaaagggcaagggatacggtgtttacaagtacgtcgacaagtatggagctaacgtcgatggatacagtcctatttacaacgagaacgagtggtcagcgagtggtgacgtgtacaagggaggagtcaccggattggcaatttgggcggtaactctcgccggaattcttgccggaggtgctcttcttgtgtacaacacaagtgctttggctcagtaaatcttaaagttgttagcgcatgtgtaatcatgtttctataaatgtttctgtgttgttctctttctctctaatgttgtaaaactcagacatactttgaatttataagacttctagtgtttgtac

SEQ ID NO: 21400 - protein, 77 aa, Arabidopsis thaliana
  peptide (1)..(77): Ceres Seq. ID no. 12421654
MAASVMLSSVTLKPAGFTVEKTASTLPAERARDTVFTSTSTSMELTSMDTVLFTTRTSGQRVVTCTREESPDWQFGR

SEQ ID NO: 21401 - protein, 72 aa, Arabidopsis thaliana
  peptide (1)..(72): Ceres Seq. ID no. 12421655
MLSSVTLKPAGFTVEKTASTLPAERARDTVFTSTSTSMELTSMDTVLFTTRTSGQRVVTCTREESPDWQFGR

SEQ ID NO: 21402 - DNA, 1116 bp, Arabidopsis thaliana
  misc_feature (1)..(1116): Ceres Seq. ID no. 12322174
  misc_feature (1)..(1116): Ortholog of  Ceres SEQ ID NO 15178317 as cited in SEQ ID NO 52489
  misc_feature (1)..(1116): Ortholog of  Ceres SEQ ID NO 14314415 as cited in SEQ ID NO 57442
attgaaaggcgtttcaaagtcaccatgttttacgacgcgtgtctctttttcagccggttttcttctcgctggttacatcagagcttcggagatattatataactcaacgacgtagctgttgcattttttgtttttgcaatgatcttcatcttcatgaccggataaactcttagagaaagattcaaagtgattatctttgtggatccctccattgctatgtggaatttagcttcaaaatcgatcagagaaggttttatatcgaagggagaagaagctgctacaaaaccaagaagagctactttagatagatcaggagatggaagaaagacaacaaaggaagaaaaattggagtgtcccatttgctgggaatcattcaacgttgttgagaatgtaccttatgtcttatggtgtggtcatacaatctgcaagtactgtctcttagggcttcaacgtgccattgtcatcaaatcctctgctttaccattccagcttcccttcttcgttgcttgcccttggtgcaatattctctctttaaggctggtttgcaatggaaccatcagatttccttccaagaacttttaccttctgtggatggtagaaagcatgaatggctccagatcggaggcacccagcgacaacaaaagggttgcttcagggcagagagacttgagaaataggtgtgatggaatgagtaataccgccttgggtgatgaagggttgctggacaatcgcagctggtggaatggtgtgaccagaggattcttcagaactgggaggctccatgactcggtacgtaagtcaatggctcttgttgctcatttgttggctaagtttcctctggtagtcatattcctgttgatggctttatatgcaatccctgtgagtgctgcagttctcggggtttatttctttgttacgtttgctttggctgtcccgtcgtttctcgtcctttattttgccttcccgagcttaaactggctgatcagagagattgcaacctgactcattgtactgtttctttcttcctgtatgtttcctgacttgtaagaaacacgagatagagccaacgttgtttacactcaatatagacaagaagaagagaagatctttatttcc

SEQ ID NO: 21403 - protein, 261 aa, Arabidopsis thaliana
  peptide (1)..(261): Ceres Seq. ID no. 12322175
MWNLASKSIREGFISKGEEAATKPRRATLDRSGDGRKTTKEEKLECPICWESFNVVENVPYVLWCGHTICKYCLLGLQRAIVIKSSALPFQLPFFVACPWCNILSLRLVCNGTIRFPSKNFYLLWMVESMNGSRSEAPSDNKRVASGQRDLRNRCDGMSNTALGDEGLLDNRSWWNGVTRGFFRTGRLHDSVRKSMALVAHLLAKFPLVVIFLLMALYAIPVSAAVLGVYFFVTFALAVPSFLVLYFAFPSLNWLIREIAT

SEQ ID NO: 21404 - protein, 136 aa, Arabidopsis thaliana
  peptide (1)..(136): Ceres Seq. ID no. 12322176
MVESMNGSRSEAPSDNKRVASGQRDLRNRCDGMSNTALGDEGLLDNRSWWNGVTRGFFRTGRLHDSVRKSMALVAHLLAKFPLVVIFLLMALYAIPVSAAVLGVYFFVTFALAVPSFLVLYFAFPSLNWLIREIAT

SEQ ID NO: 21405 - protein, 132 aa, Arabidopsis thaliana
  peptide (1)..(132): Ceres Seq. ID no. 12322177
MNGSRSEAPSDNKRVASGQRDLRNRCDGMSNTALGDEGLLDNRSWWNGVTRGFFRTGRLHDSVRKSMALVAHLLAKFPLVVIFLLMALYAIPVSAAVLGVYFFVTFALAVPSFLVLYFAFPSLNWLIREIAT

SEQ ID NO: 21406 - DNA, 1222 bp, Arabidopsis thaliana
  misc_feature (1)..(1222): Ceres Seq. ID no. 12327400
  misc_feature (1)..(1222): Ortholog of  Ceres SEQ ID NO 13597590 as cited in SEQ ID NO 60707
  misc_feature (1)..(1222): Ortholog of  Ceres SEQ ID NO 14309283 as cited in SEQ ID NO 0
aatttaggcttgttgagccaccgtgtgggcaaaaatatccaaaaacacaacacaagtgttgtcttctcgcgtctctcatcaacgagaaccagtttttttgttgatcctatcaacaatgacgaaaatagagcttcgagctttggggaacacagggcttaaggttagcgccgttggttttggtgcctctccgctcggaagtgtcttcggtccagtcgccgaagatgatgccgtcgccaccgtgcgcgaggctttccgtctcggtatcaacttcttcgacacctccccgtattatggaggaacactgtctgagaaaatgcttggtaagggactaaaggctttgcaagtccctagaagtgactacattgtggctactaagtgtggtagatataaagaaggttttgatttcagtgctgagagagtaagaaagagtattgacgagagcttggagaggcttcagcttgattatgttgacatacttcattgccatgacattgagttcgggtctcttgatcagattgtgagtgaaacaattcctgctcttcagaaactgaaacaagaggggaagacccggttcattggtatcactggtcttccgttagatattttcacttatgttcttgatcgagtgcctccagggactgtcgatgtgatattgtcatactgtcattacggcgttaatgattcgacgttgctggatttactaccttacttgaagagcaaaggtgtgggtgtgataagtgcttctccattagcaatgggcctccttacagaacaaggtcctcctgaatggcaccctgcttcccctgagctcaagtctgcaagcaaagccgcagttgctcactgcaaatcaaagggcaagaagatcacaaagttagctctgcaatacagtttagcaaacaaggagatttcgtcggtgttggttgggatgagctctgtctcacaggtagaagaaaatgttgcagcagttacagagcttgaaagtctggggatggatcaagaaactctgtctgaggttgaagctattctcgagcctgtaaagaatctgacatggccaagtggaatccatcagaactaaaagaagctctttgtgtttctggtaaactcttgtcttgcttcttgtaatgcttatgcattcgttgttgtgtcattgtgttaataagagtgtaagtttggttggtatgattaataaagtttcttagatatcaaaatcagtcggaacacc

SEQ ID NO: 21407 - protein, 319 aa, Arabidopsis thaliana
  peptide (1)..(319): Ceres Seq. ID no. 12327401
MTKIELRALGNTGLKVSAVGFGASPLGSVFGPVAEDDAVATVREAFRLGINFFDTSPYYGGTLSEKMLGKGLKALQVPRSDYIVATKCGRYKEGFDFSAERVRKSIDESLERLQLDYVDILHCHDIEFGSLDQIVSETIPALQKLKQEGKTRFIGITGLPLDIFTYVLDRVPPGTVDVILSYCHYGVNDSTLLDLLPYLKSKGVGVISASPLAMGLLTEQGPPEWHPASPELKSASKAAVAHCKSKGKKITKLALQYSLANKEISSVLVGMSSVSQVEENVAAVTELESLGMDQETLSEVEAILEPVKNLTWPSGIHQN

SEQ ID NO: 21408 - protein, 253 aa, Arabidopsis thaliana
  peptide (1)..(253): Ceres Seq. ID no. 12327402
MLGKGLKALQVPRSDYIVATKCGRYKEGFDFSAERVRKSIDESLERLQLDYVDILHCHDIEFGSLDQIVSETIPALQKLKQEGKTRFIGITGLPLDIFTYVLDRVPPGTVDVILSYCHYGVNDSTLLDLLPYLKSKGVGVISASPLAMGLLTEQGPPEWHPASPELKSASKAAVAHCKSKGKKITKLALQYSLANKEISSVLVGMSSVSQVEENVAAVTELESLGMDQETLSEVEAILEPVKNLTWPSGIHQN

SEQ ID NO: 21409 - DNA, 1264 bp, Arabidopsis thaliana
  misc_feature (1)..(1264): Ceres Seq. ID no. 12422384
  misc_feature (1)..(1264): Ortholog of  Ceres SEQ ID NO 15171708 as cited in SEQ ID NO 60063
gcaattgcaaaaagaaaaccaaaacaaagctcaatcatggctagtcggagagaagtacggtgccggtgcggcagacggatgtgggttcaaccagacgcccgtaccgtccaatgctcaacctgccacaccgtcacgcagctctactcgctagtggacatagctcgcggtgcaaaccgcataattcatgggtttcaacagctacttagacaacaccaaccgcaacatcatgaacaacaacaacaacaaatgatggctcaaccgccaccacggctgcttgagcctcttccctcgccgtttgggaagaagagagcagttttatgcggcgtgaactataagggaaaaagttatagcttgaaaggttgcatcagtgatgctaagtccatgagatctttattggttcaacaaatgggtttccctattgactctattctcatgctcacagaagatgaagccagcccgcagagaataccgacgaagagaaacattaggaaggcgatgagatggttagttgaagggaacagagcaagggactcactagtgttccatttctctggtcatggatctcagcagaatgactacaacggagacgagatcgatggtcaagatgaagccttgtgccctttagaccatgaaacagaaggaaaaatcattgatgacgagattaaccggatactcgtgaggcctctcgtccatggagctaagcttcacgctgtcatcgacgcctgtaacagcgggactgtccttgatttacccttcatttgcaggatggagaggaatggttcttatgaatgggaagaccatagatcagtcagagcttacaaaggaacagatggtggagcagctttctgtttcagtgcttgtgacgatgatgaatccagtggttacactcctgtgttcacggggaagaacacaggagccatgacttatagcttcataaaggcggtgaagacagctggaccagcacccacgtatggccacctgcttaaccttatgtgttctgcaatacgagaggcccagtctcgcctcgcctttaacggggactacacaagctctgatgcatccgcggagccactgctaacatcatctgaggaatttgacgtgtacgcgacaaagtttgtactctgaatgctgtacatatgatgctgcaaatagctcggaaacgtttctatgtgtatgtatcatgtaatgattatgttgcatagcctctctcttcttacgagcaataaagctatgaaataattgattcgctaagaaatttaaaatg

SEQ ID NO: 21410 - protein, 374 aa, Arabidopsis thaliana
  peptide (1)..(374): Ceres Seq. ID no. 12422385
AIAKRKPKQSSIMASRREVRCRCGRRMWVQPDARTVQCSTCHTVTQLYSLVDIARGANRIIHGFQQLLRQHQPQHHEQQQQQMMAQPPPRLLEPLPSPFGKKRAVLCGVNYKGKSYSLKGCISDAKSMRSLLVQQMGFPIDSILMLTEDEASPQRIPTKRNIRKAMRWLVEGNRARDSLVFHFSGHGSQQNDYNGDEIDGQDEALCPLDHETEGKIIDDEINRILVRPLVHGAKLHAVIDACNSGTVLDLPFICRMERNGSYEWEDHRSVRAYKGTDGGAAFCFSACDDDESSGYTPVFTGKNTGAMTYSFIKAVKTAGPAPTYGHLLNLMCSAIREAQSRLAFNGDYTSSDASAEPLLTSSEEFDVYATKFVL

SEQ ID NO: 21411 - protein, 362 aa, Arabidopsis thaliana
  peptide (1)..(362): Ceres Seq. ID no. 12422386
MASRREVRCRCGRRMWVQPDARTVQCSTCHTVTQLYSLVDIARGANRIIHGFQQLLRQHQPQHHEQQQQQMMAQPPPRLLEPLPSPFGKKRAVLCGVNYKGKSYSLKGCISDAKSMRSLLVQQMGFPIDSILMLTEDEASPQRIPTKRNIRKAMRWLVEGNRARDSLVFHFSGHGSQQNDYNGDEIDGQDEALCPLDHETEGKIIDDEINRILVRPLVHGAKLHAVIDACNSGTVLDLPFICRMERNGSYEWEDHRSVRAYKGTDGGAAFCFSACDDDESSGYTPVFTGKNTGAMTYSFIKAVKTAGPAPTYGHLLNLMCSAIREAQSRLAFNGDYTSSDASAEPLLTSSEEFDVYATKFVL

SEQ ID NO: 21412 - protein, 348 aa, Arabidopsis thaliana
  peptide (1)..(348): Ceres Seq. ID no. 12422387
MWVQPDARTVQCSTCHTVTQLYSLVDIARGANRIIHGFQQLLRQHQPQHHEQQQQQMMAQPPPRLLEPLPSPFGKKRAVLCGVNYKGKSYSLKGCISDAKSMRSLLVQQMGFPIDSILMLTEDEASPQRIPTKRNIRKAMRWLVEGNRARDSLVFHFSGHGSQQNDYNGDEIDGQDEALCPLDHETEGKIIDDEINRILVRPLVHGAKLHAVIDACNSGTVLDLPFICRMERNGSYEWEDHRSVRAYKGTDGGAAFCFSACDDDESSGYTPVFTGKNTGAMTYSFIKAVKTAGPAPTYGHLLNLMCSAIREAQSRLAFNGDYTSSDASAEPLLTSSEEFDVYATKFVL

SEQ ID NO: 21413 - DNA, 825 bp, Arabidopsis thaliana
  misc_feature (1)..(825): Ceres Seq. ID no. 12343466
  misc_feature (1)..(825): Ortholog of  Ceres SEQ ID NO 12609177 as cited in SEQ ID NO 55753
  misc_feature (1)..(825): Ortholog of  Ceres SEQ ID NO 12609935 as cited in SEQ ID NO 55757
  misc_feature (1)..(825): Ortholog of  Ceres SEQ ID NO 13594206 as cited in SEQ ID NO 59075
  misc_feature (1)..(825): Ortholog of  Ceres SEQ ID NO 13654038 as cited in SEQ ID NO 69261
  misc_feature (1)..(825): Ortholog of  Ceres SEQ ID NO 14309346 as cited in SEQ ID NO 0
attcaattcatttccgtttgaaggaggtagtcggagactgagaatcatctgagatcggaaacgacaaacctaattttcccgaagaatcgagaccattatgtggaggagaatcgtttcatcgcatcttaaatccatctccgccgtcgggtcctgcgcggctccgtcgtgcaggcacgccgtcgtagagtccactcacctttctctctcgactcgtgcatcctccattcccgcatattcctccatattctctcgtcaaatcggctccgctgcagcggatactgctgtgaagaagcgtgttgaagatgtgatgcctattgcaaccggtcacgagaaagaggaactacaagccgaattggaggggaggaagctggacgatatagactttcctgaagggccttttggaacaaaggaagctcctgctgtagtcaaatcctactacgacatgagaatagttggttgccctggaggtgaaggagaggatgagcatgatgttgtctggttttggctggagaaaggcaagtcttttgaatgccctgtgtgtacacagtacttcaagcttgaagtggtcggccctggaggacctcctgacggacatggtgatgaccatcactgatccaaggaaaacaatctattgtaataagaaatagtgtggcttctgctaaatgtgaagcagcctcgtcttgtttttttttttggttttaattctaccctcagttctctaccaattgcttcagtgattgccttaaaccgccgaaaatagatggtccatcttcaggctctcgtcgccattttttgccaaataattgagatgctacctttgttctc

SEQ ID NO: 21414 - protein, 171 aa, Arabidopsis thaliana
  peptide (1)..(171): Ceres Seq. ID no. 12343467
MWRRIVSSHLKSISAVGSCAAPSCRHAVVESTHLSLSTRASSIPAYSSIFSRQIGSAAADTAVKKRVEDVMPIATGHEKEELQAELEGRKLDDIDFPEGPFGTKEAPAVVKSYYDMRIVGCPGGEGEDEHDVVWFWLEKGKSFECPVCTQYFKLEVVGPGGPPDGHGDDHH

SEQ ID NO: 21415 - protein, 101 aa, Arabidopsis thaliana
  peptide (1)..(101): Ceres Seq. ID no. 12343468
MPIATGHEKEELQAELEGRKLDDIDFPEGPFGTKEAPAVVKSYYDMRIVGCPGGEGEDEHDVVWFWLEKGKSFECPVCTQYFKLEVVGPGGPPDGHGDDHH

SEQ ID NO: 21416 - DNA, 911 bp, Arabidopsis thaliana
  misc_feature (1)..(911): Ceres Seq. ID no. 12329320
  misc_feature (1)..(911): Ortholog of  Ceres SEQ ID NO 13583691 as cited in SEQ ID NO 68890
aactctagactggaccgagttcgctaccttcgtctcgccttcggcctttttctggttcttcacttctgacgagattcgcttttaccagagagagagagagatgagaatgacatttttgagttatctgaagcaatggcgtggaacagcgaaagaagcattcgagaatgtatcaatcgtcgccaagtttctctgtttgcttcatgtcaccgatcgatacataatctccacgacccacgttcacgggccgagcatgcttccgacgcttaatctaaccggcgatgtaatattggcggaacatttatcacaccggtttggtaagattggactcggtgacgttgtattggttcgatctcctagagacccaaaaaggatggtgacaaagcgaatcttgggtttagaaggcgatagactcactttttctgctgacccattggtcggtgatgcttcagtgagcgttttggttccgaaaggtcatgtttggattcagggagataacttgtatgcttcaactgattcacgtcattttgggcctgtaccttacagtctcattgaaggaaaagctcttctacgggtctggccaccagaatactttgggtcattgagatgacgattatatacacatacacattcaggtaatcaggttgtctgcctactgtatacgtcaagcgatcacttcaacgattttgttgcactgtaactcatgcgagtaatgtatcattcatgtgggataagcattttcgtctactctcctttttggcagtaatagaagaaaagccatggtcctgatattgtttctgaaacccgaacttcaatatcaaatgttaagattcatattgttggtatcgaaaaagctggtgcgttatgggatgataattgtgtccttgatacaaagttttatagatgttttgatt

SEQ ID NO: 21417 - protein, 201 aa, Arabidopsis thaliana
  peptide (1)..(201): Ceres Seq. ID no. 12329321
TLDWTEFATFVSPSAFFWFFTSDEIRFYQREREMRMTFLSYLKQWRGTAKEAFENVSIVAKFLCLLHVTDRYIISTTHVHGPSMLPTLNLTGDVILAEHLSHRFGKIGLGDVVLVRSPRDPKRMVTKRILGLEGDRLTFSADPLVGDASVSVLVPKGHVWIQGDNLYASTDSRHFGPVPYSLIEGKALLRVWPPEYFGSLR

SEQ ID NO: 21418 - protein, 168 aa, Arabidopsis thaliana
  peptide (1)..(168): Ceres Seq. ID no. 12329322
MRMTFLSYLKQWRGTAKEAFENVSIVAKFLCLLHVTDRYIISTTHVHGPSMLPTLNLTGDVILAEHLSHRFGKIGLGDVVLVRSPRDPKRMVTKRILGLEGDRLTFSADPLVGDASVSVLVPKGHVWIQGDNLYASTDSRHFGPVPYSLIEGKALLRVWPPEYFGSLR

SEQ ID NO: 21419 - protein, 166 aa, Arabidopsis thaliana
  peptide (1)..(166): Ceres Seq. ID no. 12329323
MTFLSYLKQWRGTAKEAFENVSIVAKFLCLLHVTDRYIISTTHVHGPSMLPTLNLTGDVILAEHLSHRFGKIGLGDVVLVRSPRDPKRMVTKRILGLEGDRLTFSADPLVGDASVSVLVPKGHVWIQGDNLYASTDSRHFGPVPYSLIEGKALLRVWPPEYFGSLR

SEQ ID NO: 21420 - DNA, 812 bp, Arabidopsis thaliana
  misc_feature (1)..(812): Ceres Seq. ID no. 12331932
  misc_feature (1)..(812): Ortholog of  Ceres SEQ ID NO 15170072 as cited in SEQ ID NO 55533
  misc_feature (1)..(812): Ortholog of  Ceres SEQ ID NO 15173959 as cited in SEQ ID NO 63398
  misc_feature (1)..(812): Ortholog of  Ceres SEQ ID NO 13663564 as cited in SEQ ID NO 66903
accaatagagtaattcaactgccccaaattgctctcgactttttattctcggattagcgtttgtgctttcgcatcagagaatctctcagttcttctcaatttaggtcatcagatctcacaatcaatcgactcgaactcaaatctcacttcatcaatcaaatcatgactcttggctcaggatcgagtgttgtcgttccgaggaatttccggttgctggaggagcttgaacgtggagagaaaggtattggagatggaactgtgagctatggaatggatgatggagatgacatttatatgcgctcttggactggcactatcatcggtcctcacaacactgtacatgagggtcggatttatcagttgaagctcttctgtgacaaagattaccctgagaaacctccgactgttcggttccattcgcgtatcaacatgacttgtgtcaaccatgataccggcgtggtggattcaaagaagtttggggttcttgcaaactggcaaagacagtacacaatggaggacatactgactcaattgaagaaggagatggctgcatcgcataaccggaagcttgttcaacctcccgaaggaactttcttctaatactctcaaagcctacctttgaggggcttctccattgttggtcttcaagcttttctttcgtaccttaaagtaaaaacaatggtgtctgtcgatgaatgatgatgttcgattgatcatctggagtttaaatccttgtgtgcaaatatatctagacaacgctgtctcacgacttcatcttctcagtttagatataatatgggaaacaaccttct

SEQ ID NO: 21421 - protein, 145 aa, Arabidopsis thaliana
  peptide (1)..(145): Ceres Seq. ID no. 12331933
MTLGSGSSVVVPRNFRLLEELERGEKGIGDGTVSYGMDDGDDIYMRSWTGTIIGPHNTVHEGRIYQLKLFCDKDYPEKPPTVRFHSRINMTCVNHDTGVVDSKKFGVLANWQRQYTMEDILTQLKKEMAASHNRKLVQPPEGTFF

SEQ ID NO: 21422 - protein, 109 aa, Arabidopsis thaliana
  peptide (1)..(109): Ceres Seq. ID no. 12331934
MDDGDDIYMRSWTGTIIGPHNTVHEGRIYQLKLFCDKDYPEKPPTVRFHSRINMTCVNHDTGVVDSKKFGVLANWQRQYTMEDILTQLKKEMAASHNRKLVQPPEGTFF

SEQ ID NO: 21423 - protein, 101 aa, Arabidopsis thaliana
  peptide (1)..(101): Ceres Seq. ID no. 12331935
MRSWTGTIIGPHNTVHEGRIYQLKLFCDKDYPEKPPTVRFHSRINMTCVNHDTGVVDSKKFGVLANWQRQYTMEDILTQLKKEMAASHNRKLVQPPEGTFF

SEQ ID NO: 21424 - DNA, 784 bp, Arabidopsis thaliana
  misc_feature (1)..(784): Ceres Seq. ID no. 13509916
  misc_feature (1)..(784): Ortholog of  Ceres SEQ ID NO 12585325 as cited in SEQ ID NO 63062
ttttttttcggttttcacggtaaggctcggaggaaaacctaattcgtccggagaatctccacctcactctcgccaaacgcatctctgttgtagcttgtgatggatccaacacagaacacaagtgcagggattggtgggagcaatggtacaatcagatatcaaaccaatgatgggacttcaactgtgaccgttgctgatgattcaaaggagaatctttcccaagtcataaactctattgagaaaactttaggagtccttcatcagttacaccttaccgtcacttctttcacacccgcgtctcaactccatctcctccagcgccttaactctcttgtgatggagctagataacatgactaagttgtctgagaaatgcaacattcaaatccccatggaggttcttaacttgattgatgatgggaagaacccggatgagtttacgaaagatgttcttaatagctgcatagctagaaatcaagttactaagggcaagactgatgcttttaaggatttgagaaaacatattctggaggagcttgaacagacttttcctgatgaagtcgatatgtatagagaaatccgtgctagttctgctgctgaagcgaaacggttggcgcaatcgcaaagtgtgttaccaaatggggatgcaaaggtcaagaatgagctataagagccaagtttcctttttatctttaccttgtagaatataatgactgagtcgatgaatgtgatgtaacacgaacaatcccaagtgtaatttctaataatatctgttggttctcttc

SEQ ID NO: 21425 - protein, 189 aa, Arabidopsis thaliana
  peptide (1)..(189): Ceres Seq. ID no. 13509917
MDPTQNTSAGIGGSNGTIRYQTNDGTSTVTVADDSKENLSQVINSIEKTLGVLHQLHLTVTSFTPASQLHLLQRLNSLVMELDNMTKLSEKCNIQIPMEVLNLIDDGKNPDEFTKDVLNSCIARNQVTKGKTDAFKDLRKHILEELEQTFPDEVDMYREIRASSAAEAKRLAQSQSVLPNGDAKVKNEL

SEQ ID NO: 21426 - protein, 110 aa, Arabidopsis thaliana
  peptide (1)..(110): Ceres Seq. ID no. 13509918
MELDNMTKLSEKCNIQIPMEVLNLIDDGKNPDEFTKDVLNSCIARNQVTKGKTDAFKDLRKHILEELEQTFPDEVDMYREIRASSAAEAKRLAQSQSVLPNGDAKVKNEL

SEQ ID NO: 21427 - protein, 105 aa, Arabidopsis thaliana
  peptide (1)..(105): Ceres Seq. ID no. 13509919
MTKLSEKCNIQIPMEVLNLIDDGKNPDEFTKDVLNSCIARNQVTKGKTDAFKDLRKHILEELEQTFPDEVDMYREIRASSAAEAKRLAQSQSVLPNGDAKVKNEL

SEQ ID NO: 21428 - DNA, 729 bp, Arabidopsis thaliana
  misc_feature (1)..(729): Ceres Seq. ID no. 12393366
  misc_feature (1)..(729): Ortholog of  Ceres SEQ ID NO 15178260 as cited in SEQ ID NO 59907
aactctaagtttttctttcttctttctctgctctcaaagctcaagagaactctatccttattaacttacaaggataactaaaaccggtgtaatcacgatcatagtagaagatgggcggtcccggatcatcaccatgtgcttcgtgtaagcttcttcgacgacgatgtgcaaaagattgcatcttagcaccttattttcctcctgacgatcctcacaaattcgccattgttcataaggtctttggtgccagcaacgtcagcaaaatgttgcaggagctaccagttcatcaaagagctgacgcggtgaatagtctggtttttgaagcaaacgcaagagtaagagatccggtctacggctgcgtaggagcaatctcctacttacaaaaccaagtctcgcagcttcagatgcaactagcagtggctcaagccgagattctttgcattcagatgcaaaatgagccaaccttacagtctcatcatcaagtacttgaactagaccaagaccacaaagctctcttactaaacaacaacaacatcaataactgcaacaccaacaacaacaataacaactttggttatgccatgtcttctggacagttcaactctaactttgcctcaccaagcagcataatgcaaatgcagatgcaaatgcaaatgcaagaccctcttaagcaagaatctctttggacttaatgtaataataataataattaatgttcgacaagtttgc

SEQ ID NO: 21429 - protein, 193 aa, Arabidopsis thaliana
  peptide (1)..(193): Ceres Seq. ID no. 12393367
MGGPGSSPCASCKLLRRRCAKDCILAPYFPPDDPHKFAIVHKVFGASNVSKMLQELPVHQRADAVNSLVFEANARVRDPVYGCVGAISYLQNQVSQLQMQLAVAQAEILCIQMQNEPTLQSHHQVLELDQDHKALLLNNNNINNCNTNNNNNNFGYAMSSGQFNSNFASPSSIMQMQMQMQMQDPLKQESLWT

SEQ ID NO: 21430 - protein, 142 aa, Arabidopsis thaliana
  peptide (1)..(142): Ceres Seq. ID no. 12393368
MLQELPVHQRADAVNSLVFEANARVRDPVYGCVGAISYLQNQVSQLQMQLAVAQAEILCIQMQNEPTLQSHHQVLELDQDHKALLLNNNNINNCNTNNNNNNFGYAMSSGQFNSNFASPSSIMQMQMQMQMQDPLKQESLWT

SEQ ID NO: 21431 - DNA, 1161 bp, Arabidopsis thaliana
  misc_feature (1)..(1161): Ceres Seq. ID no. 12333859
  misc_feature (1)..(1161): Ortholog of  Ceres SEQ ID NO 14305461 as cited in SEQ ID NO 57996
  misc_feature (1)..(1161): Ortholog of  Ceres SEQ ID NO 15174376 as cited in SEQ ID NO 0
  misc_feature (1)..(1161): Ortholog of  Ceres SEQ ID NO 15178108 as cited in SEQ ID NO 0
aaaaaaggataagcttggtgttactttatcgccttctttcgtttggcctttgatcctatcataagctttttttcgtttatcaatcttctcgattcagccacaattcttgtttctcagataattcatctcctttctttgattcgtttccttctcttctgtcactcagatctagatctagatctaggtttttttctttctcatcggaaatttgacttagaggcttgttttgatctagggtttggtctttgggaattttgaaaaaaaaaacaaaattaggaatgaatctatgagctactcaatcctgtttcgtcggattcgtattctacactctttctccgtcgtttacctctactacacctacgttttctcatgaagtaatcgttctcgatctcagttttcgtttttgatctaacttattctttgatagatttagaaatcggggattttcagattgtgtctttgagaggtttttataggaaaatatctctagaagaagaagaagaatattatattgattttaattttggtgagaagaagtcaaaaagtcaacgagaaatggggtcgttgcaaatgcaaacaagtcctgaatccgataatgatccgaggtacgccacggtgacggatgagaggaagaggaagagaatgatctctaacagagaatctgctcggaggtcaaggatgaggaaacagaagcaacttggtgatttgatcaacgaagtcactcttctcaagaatgataacgctaaaatcaccgaacaggttgatgaagcttcaaagaaatacattgaaatggagtctaagaacaatgtcttgagggcacaggcttcggagttgacggataggttaagatcattgaactctgtgcttgagatggttgaagagattagtggtcaggctttggatattcctgagattcctgaatctatgcagaacccttggcagatgccttgtccaatgcaaccaatcagagcttctgctgacatgtttgattgctgaagatggatgattcatatctgaaggatcaaaaatgaagcattgagatcgagtctttggtctgttttacttactgtccttgttgtaacaattagtgtgtcattggtgaattgagtcttgtgttgtcaatggacaacgcaatctttatgcaatttcaatttgttcgtg

SEQ ID NO: 21432 - protein, 146 aa, Arabidopsis thaliana
  peptide (1)..(146): Ceres Seq. ID no. 12333860
MGSLQMQTSPESDNDPRYATVTDERKRKRMISNRESARRSRMRKQKQLGDLINEVTLLKNDNAKITEQVDEASKKYIEMESKNNVLRAQASELTDRLRSLNSVLEMVEEISGQALDIPEIPESMQNPWQMPCPMQPIRASADMFDC

SEQ ID NO: 21433 - protein, 141 aa, Arabidopsis thaliana
  peptide (1)..(141): Ceres Seq. ID no. 12333861
MQTSPESDNDPRYATVTDERKRKRMISNRESARRSRMRKQKQLGDLINEVTLLKNDNAKITEQVDEASKKYIEMESKNNVLRAQASELTDRLRSLNSVLEMVEEISGQALDIPEIPESMQNPWQMPCPMQPIRASADMFDC

SEQ ID NO: 21434 - protein, 117 aa, Arabidopsis thaliana
  peptide (1)..(117): Ceres Seq. ID no. 12333862
MISNRESARRSRMRKQKQLGDLINEVTLLKNDNAKITEQVDEASKKYIEMESKNNVLRAQASELTDRLRSLNSVLEMVEEISGQALDIPEIPESMQNPWQMPCPMQPIRASADMFDC

SEQ ID NO: 21435 - DNA, 1853 bp, Arabidopsis thaliana
  misc_feature (1)..(1853): Ceres Seq. ID no. 12343429
  misc_feature (1)..(1853): Ortholog of  Ceres SEQ ID NO 14314896 as cited in SEQ ID NO 54010
attccttgcttcatttttcgtcaccctagccgctttactctcttgcgatatctctgaggtaattctggagcagcataaacaatcaattgattcattcttcttgataccaagttgtggaaactctaggattgtttgctgtatatctccagaattgctgttttgattgaatttaggtcgcttagctcagttgatagagcaccacattttttgtggtagaaatcgatttgtttgacagtctctaaccatgggtaaagagaattttcacatcaacattgtggtcattggccacgtcgattctggaaagtcgaccaccactggacacttgatctacaagttgggtggtattgacaagcgtgtcattgagaggttcgagaaggaggctgctgagatgaacaagaggtccttcaagtacgcatgggttttggacaaacttaaggctgagcgtgagcgtggtatcaccattgacattgctctctggaagttcgagaccaccaagtactactgcactgtcattgatgctcctggccatcgtgatttcatcaagaacatgatcactggtacctcccaggctgattgtgctgtccttatcatcgactccaccactggtggttttgaggctggtatctccaaggatggtcagacccgtgagcacgctctccttgctttcacccttggtgtcaaacagatgatctgctgttgtaacaagatggatgccactacccccaagtactccaaggccaggtacgatgaaattatcaaggaggtgtcttcctacttgaagaaggttggttacaaccccgacaaaatcccatttgtgcccatctctggattcgagggtgacaacatgattgagaggtccaccaacctagactggtacaagggaccaactcttcttgaggctcttgaccagatcaacgagcccaagaggccatcagacaagccccttcgtctcccacttcaggatgtctacaagattggtggtattggaacggtgccagtgggacgtgttgagactggtatgatcaagcctggtatggttgtgacctttgctcccacagggttgaccactgaggtcaagtctgttgagatgcaccacgagtctcttcttgaggcacttccaggtgacaacgttgggttcaatgttaagaatgttgctgtcaaggatcttaagagagggtacgtcgcatccaactccaaggatgaccctgccaagggtgctgctaacttcacctcccaggtcatcatcatgaaccaccctggtcagattggtaacggttacgccccagtcctggattgccacacctctcacattgcagtcaagttctctgagatcttgaccaagattgacaggcgttctggtaaggagattgagaaggagcccaagttcttgaagaatggtgatgctggtatggtgaagatgactccaaccaagcccatggttgtggagaccttctctgagtacccaccacttggacgtttcgctgtgagggacatgaggcagactgttgcagtcggtgttatcaagagtgttgacaagaaggacccaaccggagccaaggttaccaaggctgccgtcaagaagggtgcgaagtgaaccatcctcaaaactctatctgccgcaggtgaatcaaaggacagtgttagttttattacaatagtttggtatttggtcgcgtgtctgtgttcttgtttcgttttctccccgtcagagcgttgttctcgtaattgggttcttgatcggaggtggcggatctacacacacattcttcctgttttttgctttttatttgttttctcattttgaactgtttaaaatttctgttatatgaatgaatgttttccctgcggttatt

SEQ ID NO: 21436 - protein, 449 aa, Arabidopsis thaliana
  peptide (1)..(449): Ceres Seq. ID no. 12343430
MGKENFHINIVVIGHVDSGKSTTTGHLIYKLGGIDKRVIERFEKEAAEMNKRSFKYAWVLDKLKAERERGITIDIALWKFETTKYYCTVIDAPGHRDFIKNMITGTSQADCAVLIIDSTTGGFEAGISKDGQTREHALLAFTLGVKQMICCCNKMDATTPKYSKARYDEIIKEVSSYLKKVGYNPDKIPFVPISGFEGDNMIERSTNLDWYKGPTLLEALDQINEPKRPSDKPLRLPLQDVYKIGGIGTVPVGRVETGMIKPGMVVTFAPTGLTTEVKSVEMHHESLLEALPGDNVGFNVKNVAVKDLKRGYVASNSKDDPAKGAANFTSQVIIMNHPGQIGNGYAPVLDCHTSHIAVKFSEILTKIDRRSGKEIEKEPKFLKNGDAGMVKMTPTKPMVVETFSEYPPLGRFAVRDMRQTVAVGVIKSVDKKDPTGAKVTKAAVKKGAK

SEQ ID NO: 21437 - protein, 401 aa, Arabidopsis thaliana
  peptide (1)..(401): Ceres Seq. ID no. 12343431
MNKRSFKYAWVLDKLKAERERGITIDIALWKFETTKYYCTVIDAPGHRDFIKNMITGTSQADCAVLIIDSTTGGFEAGISKDGQTREHALLAFTLGVKQMICCCNKMDATTPKYSKARYDEIIKEVSSYLKKVGYNPDKIPFVPISGFEGDNMIERSTNLDWYKGPTLLEALDQINEPKRPSDKPLRLPLQDVYKIGGIGTVPVGRVETGMIKPGMVVTFAPTGLTTEVKSVEMHHESLLEALPGDNVGFNVKNVAVKDLKRGYVASNSKDDPAKGAANFTSQVIIMNHPGQIGNGYAPVLDCHTSHIAVKFSEILTKIDRRSGKEIEKEPKFLKNGDAGMVKMTPTKPMVVETFSEYPPLGRFAVRDMRQTVAVGVIKSVDKKDPTGAKVTKAAVKKGAK

SEQ ID NO: 21438 - protein, 348 aa, Arabidopsis thaliana
  peptide (1)..(348): Ceres Seq. ID no. 12343432
MITGTSQADCAVLIIDSTTGGFEAGISKDGQTREHALLAFTLGVKQMICCCNKMDATTPKYSKARYDEIIKEVSSYLKKVGYNPDKIPFVPISGFEGDNMIERSTNLDWYKGPTLLEALDQINEPKRPSDKPLRLPLQDVYKIGGIGTVPVGRVETGMIKPGMVVTFAPTGLTTEVKSVEMHHESLLEALPGDNVGFNVKNVAVKDLKRGYVASNSKDDPAKGAANFTSQVIIMNHPGQIGNGYAPVLDCHTSHIAVKFSEILTKIDRRSGKEIEKEPKFLKNGDAGMVKMTPTKPMVVETFSEYPPLGRFAVRDMRQTVAVGVIKSVDKKDPTGAKVTKAAVKKGAK

SEQ ID NO: 21439 - DNA, 851 bp, Arabidopsis thaliana
  misc_feature (1)..(851): Ceres Seq. ID no. 12385791
  misc_feature (1)..(851): Ortholog of  Ceres SEQ ID NO 12610554 as cited in SEQ ID NO 59805
  misc_feature (1)..(851): Ortholog of  Ceres SEQ ID NO 12614051 as cited in SEQ ID NO 67827
aaagaagtaagctacctagataaaaccgccatggccaccggtttaggcttctttaagctctccttcctccttagcctcctctccggtggatcagacctattaggtcccgatgccgaatccggagtcgcccaaattgggaagttcccgccgtcgtgtaacagaatcgaatgcccgagctacgagctggttcactccggaaatggatacgaaattcgccggtacaacaacaccgtctgggtttccactgaaccgattccagatatctctctcgttgatgctaccagaaccgctttcttccaattgtttgcatacattcaggggaagaacgagtatcatcagaagatagaaatgactgctccggttatctctcaagtctcaccaagcgacggtccattctgtgaatcttccttcactgtatcattctacgttcctaaaaagaaccagcctgatccagctccgtcggagaatctccacattcagaaatggaactctaggtacgtggccgtgagacaattcagtggattcgtgtctgatgatagcataggagaacaagcggcggcgctagactcgagcctcaaaggtacggcttgggctaatgcaatagcgaaaagcaaagaagacggtggtgttgggtcggattcagcttacacggtcgctcagtataactcacccttcgagttctccggtcgggtcaatgagatttggttaccgttcgagctcgatgtttaagctctgcttagtgaaccctttttctatacatttgaataaaataagaggttaatctgtaaagtgcaaaccttttttctgatacaaattttgcagaaacaggggaatttgatgaaatgagattg

SEQ ID NO: 21440 - protein, 242 aa, Arabidopsis thaliana
  peptide (1)..(242): Ceres Seq. ID no. 12385792
KEVSYLDKTAMATGLGFFKLSFLLSLLSGGSDLLGPDAESGVAQIGKFPPSCNRIECPSYELVHSGNGYEIRRYNNTVWVSTEPIPDISLVDATRTAFFQLFAYIQGKNEYHQKIEMTAPVISQVSPSDGPFCESSFTVSFYVPKKNQPDPAPSENLHIQKWNSRYVAVRQFSGFVSDDSIGEQAAALDSSLKGTAWANAIAKSKEDGGVGSDSAYTVAQYNSPFEFSGRVNEIWLPFELDV

SEQ ID NO: 21441 - protein, 232 aa, Arabidopsis thaliana
  peptide (1)..(232): Ceres Seq. ID no. 12385793
MATGLGFFKLSFLLSLLSGGSDLLGPDAESGVAQIGKFPPSCNRIECPSYELVHSGNGYEIRRYNNTVWVSTEPIPDISLVDATRTAFFQLFAYIQGKNEYHQKIEMTAPVISQVSPSDGPFCESSFTVSFYVPKKNQPDPAPSENLHIQKWNSRYVAVRQFSGFVSDDSIGEQAAALDSSLKGTAWANAIAKSKEDGGVGSDSAYTVAQYNSPFEFSGRVNEIWLPFELDV

SEQ ID NO: 21442 - protein, 126 aa, Arabidopsis thaliana
  peptide (1)..(126): Ceres Seq. ID no. 12385794
MTAPVISQVSPSDGPFCESSFTVSFYVPKKNQPDPAPSENLHIQKWNSRYVAVRQFSGFVSDDSIGEQAAALDSSLKGTAWANAIAKSKEDGGVGSDSAYTVAQYNSPFEFSGRVNEIWLPFELDV

SEQ ID NO: 21443 - DNA, 810 bp, Arabidopsis thaliana
  misc_feature (1)..(810): Ceres Seq. ID no. 12561474
  misc_feature (1)..(810): Ortholog of  Ceres SEQ ID NO 13599328 as cited in SEQ ID NO 1002
  misc_feature (1)..(810): Ortholog of  Ceres SEQ ID NO 14302544 as cited in SEQ ID NO 56628
  misc_feature (1)..(810): Ortholog of  Ceres SEQ ID NO 14312239 as cited in SEQ ID NO 59176
  misc_feature (1)..(810): Ortholog of  Ceres SEQ ID NO 14302529 as cited in SEQ ID NO 59789
  misc_feature (1)..(810): Ortholog of  Ceres SEQ ID NO 13584819 as cited in SEQ ID NO 64536
  misc_feature (1)..(810): Ortholog of  Ceres SEQ ID NO 13663748 as cited in SEQ ID NO 67516
  misc_feature (1)..(810): Ortholog of  Ceres SEQ ID NO 12635897 as cited in SEQ ID NO 0
ctcttctgcctcctccttcactcttcatcttcaaagactgcgccttttagctcagtgaaaaaggttcgagcttcggaaactatggcagcattccctaaccttaactctgatgctggattgaagaagctcgacgagcatcttctcactcgcagttacattactggataccaggcttcaaaggatgatatcaccgtctttgcagctcttgcaaagcccccaacttcacagtatgtgaacgcttctcgttggtacaatcacattgatgccctcttgaggatctctggtgtctctgctgaaggaagcggtgtcattgttgagggatcagctcctatcactgaggaggctgttgctactccccctgcagctgattctaaggatgctgcggctgatgaagaagatgatgatgatgttgaccttttcggagaggagaccgaagaggaaaagaaagctgctgaagagagagcagcttctgtcaaggcatctacaaagaagaaggaatctggaaagtcctcagttttgattgatatcaaaccgtgggatgatgagactgacatgaagaagcttgaggaagctgtgaagtccattcagatggaaggtttgttttggggagcatcaaagcttgtcccagttggttatggtatcaagaagttgcagattttgtgcaccattgttgacgaccttgtctctattgacaccatgatcgaagagcaactcactgttgaaccgatcaatgaatatgtccagagctgtgacattgttgccttcaacaagatatgtaagtttcatgaacctattcgtaattctttttaa

SEQ ID NO: 21444 - protein, 269 aa, Arabidopsis thaliana
  peptide (1)..(269): Ceres Seq. ID no. 12561475
LFCLLLHSSSSKTAPFSSVKKVRASETMAAFPNLNSDAGLKKLDEHLLTRSYITGYQASKDDITVFAALAKPPTSQYVNASRWYNHIDALLRISGVSAEGSGVIVEGSAPITEEAVATPPAADSKDAAADEEDDDDVDLFGEETEEEKKAAEERAASVKASTKKKESGKSSVLIDIKPWDDETDMKKLEEAVKSIQMEGLFWGASKLVPVGYGIKKLQILCTIVDDLVSIDTMIEEQLTVEPINEYVQSCDIVAFNKICKFHEPIRNSF

SEQ ID NO: 21445 - protein, 242 aa, Arabidopsis thaliana
  peptide (1)..(242): Ceres Seq. ID no. 12561476
MAAFPNLNSDAGLKKLDEHLLTRSYITGYQASKDDITVFAALAKPPTSQYVNASRWYNHIDALLRISGVSAEGSGVIVEGSAPITEEAVATPPAADSKDAAADEEDDDDVDLFGEETEEEKKAAEERAASVKASTKKKESGKSSVLIDIKPWDDETDMKKLEEAVKSIQMEGLFWGASKLVPVGYGIKKLQILCTIVDDLVSIDTMIEEQLTVEPINEYVQSCDIVAFNKICKFHEPIRNSF

SEQ ID NO: 21446 - DNA, 1037 bp, Arabidopsis thaliana
  misc_feature (1)..(1037): Ceres Seq. ID no. 12421608
  misc_feature (1)..(1037): Ortholog of  Ceres SEQ ID NO 13594482 as cited in SEQ ID NO 51285
  misc_feature (1)..(1037): Ortholog of  Ceres SEQ ID NO 13655381 as cited in SEQ ID NO 63359
aatcgaaccatccaagacccgaattggatggattgggatcgggataatgggatcagcgatggtttctcatatcctcgccgcaggctattcagtcaccgtttatgctcgcgatcttcgtaaaacaaaggatctgcaaaccaaaggaggtcgtaccgccaatagccccaaagagttagcggagatgagcgacgttgtgtacgatcgttggaaactctaacgatgttagattgttgcttcttggggatgatggtgtactctctggtcttaaacccggtggagtaacagtggacatgactagtagcaagccaggattggcgcgtgagatatacgcggaggcgaggcggagggattgctgggcggtggatgcgcctgtatcgggtggagacgctggagcacgtgaggggaagctaacgatattcgccggcggagattccgagattgtggagtggttggctccggtgatgaaaacgatgggaattgtgaggtttatgggaggagctgggagtggacagagctgtaaaattgggaatcagatttgtgttggaagcaacatgattggattagctgaagggattgtgtttgctgagaaggcgggtttagatccggtgaaatggcttgaggcggttaaggatggtgcagctggatcggcggttatgcggcttttcggggagatgatggcgaagagggactataaggcgacggggtttgcggagtatatggtgaaagatttgggaatggcagcggaagcggcaacggcgatgcctggaactgctttgaacaagcagttgttcactggaatggtggcaaatggagatgggaagttaggatttcaaggcgtcgtcgatgttattaggagacttaacggcttatcctgataaaactagtgttaactaggcaagcttgttttccatttggttagaagttgctaataagaacatggagtctcaccaatctcgagaactatagttacaagagtgtgtaacattagtttccaattggattatcaacttctacctcctataactatttctctgttg

SEQ ID NO: 21447 - protein, 194 aa, Arabidopsis thaliana
  peptide (1)..(194): Ceres Seq. ID no. 12421609
MTSSKPGLAREIYAEARRRDCWAVDAPVSGGDAGAREGKLTIFAGGDSEIVEWLAPVMKTMGIVRFMGGAGSGQSCKIGNQICVGSNMIGLAEGIVFAEKAGLDPVKWLEAVKDGAAGSAVMRLFGEMMAKRDYKATGFAEYMVKDLGMAAEAATAMPGTALNKQLFTGMVANGDGKLGFQGVVDVIRRLNGLS

SEQ ID NO: 21448 - protein, 137 aa, Arabidopsis thaliana
  peptide (1)..(137): Ceres Seq. ID no. 12421610
MKTMGIVRFMGGAGSGQSCKIGNQICVGSNMIGLAEGIVFAEKAGLDPVKWLEAVKDGAAGSAVMRLFGEMMAKRDYKATGFAEYMVKDLGMAAEAATAMPGTALNKQLFTGMVANGDGKLGFQGVVDVIRRLNGLS

SEQ ID NO: 21449 - protein, 134 aa, Arabidopsis thaliana
  peptide (1)..(134): Ceres Seq. ID no. 12421611
MGIVRFMGGAGSGQSCKIGNQICVGSNMIGLAEGIVFAEKAGLDPVKWLEAVKDGAAGSAVMRLFGEMMAKRDYKATGFAEYMVKDLGMAAEAATAMPGTALNKQLFTGMVANGDGKLGFQGVVDVIRRLNGLS

SEQ ID NO: 21450 - DNA, 1314 bp, Arabidopsis thaliana
  misc_feature (1)..(1314): Ceres Seq. ID no. 12325966
  misc_feature (1)..(1314): Ortholog of  Ceres SEQ ID NO 12364737 as cited in SEQ ID NO 51089
  misc_feature (1)..(1314): Ortholog of  Ceres SEQ ID NO 13595567 as cited in SEQ ID NO 56760
  misc_feature (1)..(1314): Ortholog of  Ceres SEQ ID NO 13655302 as cited in SEQ ID NO 63307
  misc_feature (1)..(1314): Ortholog of  Ceres SEQ ID NO 13597380 as cited in SEQ ID NO 64054
  misc_feature (1)..(1314): Ortholog of  Ceres SEQ ID NO 12625474 as cited in SEQ ID NO 64169
  misc_feature (1)..(1314): Ortholog of  Ceres SEQ ID NO 13597502 as cited in SEQ ID NO 64681
aaacacacattcaaatttggcgacatgaagttctgcgcgatattcgtgttattcatcgttcttgcaatcaacggctacgattgcaagatagtccaatttatatttggagattcattgtctgatgtaggcaacaataagaatctacctaggagtttagcgacggcgaatctgcccttttacggtattgattttggcaatggtttgcctaatggaaggttcactaatggccgcactgtttcagacattataggtgataaaattggattgccaagaccagtagccttcttggatccatcaatgaatgaagatgtaatacttgaaaatggagtgaactatgcttcaggaggtggtggaatcttgaacgaaactggtggttatttcatccaaagattttcgctgtggaagcaaatagaattattccaagggacacaagatgtagttgtggcaaagatagggaaaaaagaagcagacaagttctttcaagatgctcgatacgttgtcgctttaggcagcaatgacttcattaacaactatttgatgcctgtctatagcgactcttggaaatacaatgatcaaaccttcgtcgactacttaatggaaacacttgaatctcaactcaaggtgttacatagtttaggagcgaggaagctaatggtgtttggtttaggaccaatgggttgtatcccactgcaaagagctctaagcctggatggaaattgtcaaaacaaagcgagtaatcttgctaagagattcaacaaagctgccaccacaatgctcctagatctcgagaccaagctccctaacgcaagctacaggtttggtgaagcctatgacctcgtcaacgacgtcatcactaacccaaaaaaatacgggtttgataactcggattcgccgtgttgctcgttctacagaatccggcctgcgctaacgtgtattccagcgtcgacattgtgtaaagacagaagtaagtatgtgttttgggatgagtatcatcccaccgataaggctaacgaactcgtcgctaatatactcatcaaaagatttgacttcatgcgtgccgatgacggtatctcccatgctccatctcccgcgccggatatttctccttcttccgacaataactgatcggaattacagtcttaattatatataataattccggtttctgtaaattgtgatcatgttgtggagagtttcgtttgtctttcattttgatcatgtcaaataatgtttgattttctgtaattgttcttcttttgttgtatctgttaattcgagaatttgtcttataatagtaaagatattatcatgttt

SEQ ID NO: 21451 - protein, 374 aa, Arabidopsis thaliana
  peptide (1)..(374): Ceres Seq. ID no. 12325967
KHTFKFGDMKFCAIFVLFIVLAINGYDCKIVQFIFGDSLSDVGNNKNLPRSLATANLPFYGIDFGNGLPNGRFTNGRTVSDIIGDKIGLPRPVAFLDPSMNEDVILENGVNYASGGGGILNETGGYFIQRFSLWKQIELFQGTQDVVVAKIGKKEADKFFQDARYVVALGSNDFINNYLMPVYSDSWKYNDQTFVDYLMETLESQLKVLHSLGARKLMVFGLGPMGCIPLQRALSLDGNCQNKASNLAKRFNKAATTMLLDLETKLPNASYRFGEAYDLVNDVITNPKKYGFDNSDSPCCSFYRIRPALTCIPASTLCKDRSKYVFWDEYHPTDKANELVANILIKRFDFMRADDGISHAPSPAPDISPSSDNN

SEQ ID NO: 21452 - protein, 366 aa, Arabidopsis thaliana
  peptide (1)..(366): Ceres Seq. ID no. 12325968
MKFCAIFVLFIVLAINGYDCKIVQFIFGDSLSDVGNNKNLPRSLATANLPFYGIDFGNGLPNGRFTNGRTVSDIIGDKIGLPRPVAFLDPSMNEDVILENGVNYASGGGGILNETGGYFIQRFSLWKQIELFQGTQDVVVAKIGKKEADKFFQDARYVVALGSNDFINNYLMPVYSDSWKYNDQTFVDYLMETLESQLKVLHSLGARKLMVFGLGPMGCIPLQRALSLDGNCQNKASNLAKRFNKAATTMLLDLETKLPNASYRFGEAYDLVNDVITNPKKYGFDNSDSPCCSFYRIRPALTCIPASTLCKDRSKYVFWDEYHPTDKANELVANILIKRFDFMRADDGISHAPSPAPDISPSSDNN

SEQ ID NO: 21453 - protein, 275 aa, Arabidopsis thaliana
  peptide (1)..(275): Ceres Seq. ID no. 12325969
MNEDVILENGVNYASGGGGILNETGGYFIQRFSLWKQIELFQGTQDVVVAKIGKKEADKFFQDARYVVALGSNDFINNYLMPVYSDSWKYNDQTFVDYLMETLESQLKVLHSLGARKLMVFGLGPMGCIPLQRALSLDGNCQNKASNLAKRFNKAATTMLLDLETKLPNASYRFGEAYDLVNDVITNPKKYGFDNSDSPCCSFYRIRPALTCIPASTLCKDRSKYVFWDEYHPTDKANELVANILIKRFDFMRADDGISHAPSPAPDISPSSDNN

SEQ ID NO: 21454 - DNA, 1258 bp, Arabidopsis thaliana
  misc_feature (1)..(1258): Ceres Seq. ID no. 12481988
  misc_feature (1)..(1258): Ortholog of  Ceres SEQ ID NO 12593170 as cited in SEQ ID NO 63263
  misc_feature (1)..(1258): Ortholog of  Ceres SEQ ID NO 14301882 as cited in SEQ ID NO 64381
  misc_feature (1)..(1258): Ortholog of  Ceres SEQ ID NO 13597851 as cited in SEQ ID NO 64869
  misc_feature (1)..(1258): Ortholog of  Ceres SEQ ID NO 13662420 as cited in SEQ ID NO 68680
taaaatgccttcgatttctctggcgccattgatttagttttctctctctgactacaaagtatccattcgttcaaaccagtttcttcccattttcgatttctgtcaaaattcaccaaccaactccaaaaactctgttattgaataagtttcttgatcttaaaacaaacgatctcaaagaatggcacgacacgatcctaatccatttgctgatgaagagatcaatccttttgcgaatcatacaagtgttcctcctgcgagcaactcttatctcaagccacttccaccggaaccttatgatcgtggtgcaaccgttgatatccctttggattctggcaatgatcttcgagctaaagagatggaactccaggccaaggagaacgaattgaagcggaaagagcaggagcttaaaagaagagaggacgcaatagcacgaactggagttgtcattgaagagaagaattggccggagttttttcctttaattcatcatgacattccaaatgagattccaattcatttacagaagatccaatacgtcgcattcaccacattgttagggttagtaggatgtctcttgtggaatattgtggcagtaactgtagcttggatcaaaggagaaggtcccactatatggcttctctcaataatttacttccttgctggggtacctggagcgtacgtcttatggtaccgtcctctttaccgagctacaagaactgatagtgccctgaagtttggagcttttttctttttttacgtgttccacatcgcgttctgcggctttgctgcagttgctccaccagtcatcttccaaggaaagtctctcacaggtttcttgccagcaatcgagcttctaactactaatgctgcagtcgggataatgtatttcattggtgctgggttcttctgcatcgaaacacttctcaatatctgggtcattcagcaagtatatgcatacttccgagggagtggcaaagctgcagagatgaagcgtgaagctacaaaatcgaccttgatgcgtgcactatgaagaaatcactcttcaccagaaaagtatcagtggctgcttgaggttaaaatcttgaatcatacacaaaatatttgacacaaccctttcctctgcaaagtctaggctgccaactctcttttgtttgaattactttgtaatggagacctcaaggaaactttgtgtggtttaaagttgtcaacaccatttcttcatgtatactagagcaaggtccttagagggatacgaatc

SEQ ID NO: 21455 - protein, 283 aa, Arabidopsis thaliana
  peptide (1)..(283): Ceres Seq. ID no. 12481989
MARHDPNPFADEEINPFANHTSVPPASNSYLKPLPPEPYDRGATVDIPLDSGNDLRAKEMELQAKENELKRKEQELKRREDAIARTGVVIEEKNWPEFFPLIHHDIPNEIPIHLQKIQYVAFTTLLGLVGCLLWNIVAVTVAWIKGEGPTIWLLSIIYFLAGVPGAYVLWYRPLYRATRTDSALKFGAFFFFYVFHIAFCGFAAVAPPVIFQGKSLTGFLPAIELLTTNAAVGIMYFIGAGFFCIETLLNIWVIQQVYAYFRGSGKAAEMKREATKSTLMRAL

SEQ ID NO: 21456 - protein, 224 aa, Arabidopsis thaliana
  peptide (1)..(224): Ceres Seq. ID no. 12481990
MELQAKENELKRKEQELKRREDAIARTGVVIEEKNWPEFFPLIHHDIPNEIPIHLQKIQYVAFTTLLGLVGCLLWNIVAVTVAWIKGEGPTIWLLSIIYFLAGVPGAYVLWYRPLYRATRTDSALKFGAFFFFYVFHIAFCGFAAVAPPVIFQGKSLTGFLPAIELLTTNAAVGIMYFIGAGFFCIETLLNIWVIQQVYAYFRGSGKAAEMKREATKSTLMRAL

SEQ ID NO: 21457 - DNA, 1369 bp, Arabidopsis thaliana
  misc_feature (1)..(1369): Ceres Seq. ID no. 13491211
  misc_feature (1)..(1369): Ortholog of  Ceres SEQ ID NO 13648488 as cited in SEQ ID NO 20419
agcaaaccgaagtgggaacgaaaccccatgctccaagtccaattaaataacatatgtccacagaaatgttttcaaaattcgaataagccacagcaacgtgtcttgttcatatatccactataacccaaagctgcttcaatggtcggatatggacacgtgtcagttaatcagaccatctccaagaaaaaatatcccaaatctttcttccctattcagtcccccaatcaacaatcctcttcacatttctattttctcctccgaggtcgtctctcgaccaaaccacaaaaaccagaacaaaaataactaaaaaacaatcagatctgagatcgaacaaaacaacatgaacacgttaatcccatcggagaaaagatggatcatcaccggcgttttactagccggtttagttggcggtgctttgcttttcacaagcttcatacgagccgctgacgaaacgctcttcctctgttccacagcaagcgccaaaagcagagcggtggctgcggcagctgattacgaagcgactccgattcagcttcaagcgatcgtccactacgcgacatctaacgttgtcccacaacagaatcttgctgagatctcgatctctttcaacatcttgaaaaagctagctccggctaactttctcgtgttcggtctcggtcgtgactcgctcatgtgggcttctttaaatccacgtggcaaaaccttgttcttggaagaagatcttgaatggtttcagaaagtgaccaaagactctcctttcttacgtgcgcatcacgtgcgttacaggacgcagcttcaacaagccgattcgcttctacgttcgtacaaaacggagcctaagtgttttccggcgaaatcttatctccggggaaacgagaagtgtaagctagctctcacgggactgcccgatgagttctacgatacagagtgggatctgctgatggtcgatgctcctaaaggttacttcgcagaagctccgggaagaatggcggcgattttctcggcggctgttatggctaggaaccggaagaaaccgggagttacgcacgtgttcttgcacgatgttaatcggagggtggagaagacttttgccgaggagtttttatgccggaagtatagagtcaacgccgccgggaggttatggcattttgctattcctccggcggctgcgaacgctacgattgactctggtgattataggttttgctaagattgcgacacgatttatcttcttatttcctcttttgcccttttattttacttttttgaggaattttattacagcattgggttcacttactatctgatttagtgccgacagttttggatctgcatctcgtgtttcgttatttttagttacaggctttcc

SEQ ID NO: 21458 - protein, 289 aa, Arabidopsis thaliana
  peptide (1)..(289): Ceres Seq. ID no. 13491212
MNTLIPSEKRWIITGVLLAGLVGGALLFTSFIRAADETLFLCSTASAKSRAVAAAADYEATPIQLQAIVHYATSNVVPQQNLAEISISFNILKKLAPANFLVFGLGRDSLMWASLNPRGKTLFLEEDLEWFQKVTKDSPFLRAHHVRYRTQLQQADSLLRSYKTEPKCFPAKSYLRGNEKCKLALTGLPDEFYDTEWDLLMVDAPKGYFAEAPGRMAAIFSAAVMARNRKKPGVTHVFLHDVNRRVEKTFAEEFLCRKYRVNAAGRLWHFAIPPAAANATIDSGDYRFC

SEQ ID NO: 21459 - protein, 179 aa, Arabidopsis thaliana
  peptide (1)..(179): Ceres Seq. ID no. 13491213
MWASLNPRGKTLFLEEDLEWFQKVTKDSPFLRAHHVRYRTQLQQADSLLRSYKTEPKCFPAKSYLRGNEKCKLALTGLPDEFYDTEWDLLMVDAPKGYFAEAPGRMAAIFSAAVMARNRKKPGVTHVFLHDVNRRVEKTFAEEFLCRKYRVNAAGRLWHFAIPPAAANATIDSGDYRFC

SEQ ID NO: 21460 - DNA, 1211 bp, Arabidopsis thaliana
  misc_feature (1)..(1211): Ceres Seq. ID no. 12339150
  misc_feature (1)..(1211): Ortholog of  Ceres SEQ ID NO 14303263 as cited in SEQ ID NO 1224
  misc_feature (1)..(1211): Ortholog of  Ceres SEQ ID NO 13593955 as cited in SEQ ID NO 54278
  misc_feature (1)..(1211): Ortholog of  Ceres SEQ ID NO 13597380 as cited in SEQ ID NO 64054
  misc_feature (1)..(1211): Ortholog of  Ceres SEQ ID NO 12625474 as cited in SEQ ID NO 64169
  misc_feature (1)..(1211): Ortholog of  Ceres SEQ ID NO 13597502 as cited in SEQ ID NO 64681
aaaagcaacatgaaagacaattcaagctggtcttgttcttgttcttggtcttcgtggaaaatatgtttgttgtctgttctctttctcaccgagacgatcaccgccgtgaagcctgccgccaaaattgattattccggctgtaatcgctttcggagactccatcgtcgacacaggaatgaacaacaatgtcaaaaccgtggttaagtgtgattttcttccttatggtatcaatttccaaagcggagttgccacggggagattctgcgatggacgagtccctgccgatttgctagccgaagaactgggaataaaatcaattgtaccagcatacctagatccgaatctaaaatcgaaagatcttttaaccggtgtatcgtttgcgtccggaggttctggttatgatcctataacaccgaaacttgtggcagtaatatcattagaagatcaattgagttatttcgaggagtacatagagaaagtgaagaatatagttggggaagcaagaaaagacttcatagtagccaacagcttattcttattggtcgcaggcagcgacgacatagccaatacatactatactctacgtgcaagacctgaatacgacgtcgattcatacactactcttatgtctgactctgcctcagaatttgtgactaaactatatggatatggagtgagaagagtagctgtgtttggtgcaccaccaattgggtgtgtaccatcacagagaacgttaggaggaggtatcttgagagattgtgctgataattacaacgaagcagcaaaactttttaattcaaagctctccccaaaattggattcgttgcgtaaaaccctaccgggcatcaaaccgatctacattaatatctatgatcctctttttgacatcatccagaatcctgcaaattatgggtttgaagtgtctaataaaggatgctgtggaacaggagccatagaagttgctgtgttgtgcaataaaatcacatcttctgtatgtcccgacgtgtctactcatgtgttttgggacagttatcatcctacagagaaaacttacaaagtattagtctcactgttgattaacaaatttgttaatcagttcgtctgaattaaaaactattttcacggcataatgattgattatattttatctcatcttgtttgtattatttgataattgtattcgatttaaataaaattaatattttcttgtt

SEQ ID NO: 21461 - protein, 309 aa, Arabidopsis thaliana
  peptide (1)..(309): Ceres Seq. ID no. 12339151
MNNNVKTVVKCDFLPYGINFQSGVATGRFCDGRVPADLLAEELGIKSIVPAYLDPNLKSKDLLTGVSFASGGSGYDPITPKLVAVISLEDQLSYFEEYIEKVKNIVGEARKDFIVANSLFLLVAGSDDIANTYYTLRARPEYDVDSYTTLMSDSASEFVTKLYGYGVRRVAVFGAPPIGCVPSQRTLGGGILRDCADNYNEAAKLFNSKLSPKLDSLRKTLPGIKPIYINIYDPLFDIIQNPANYGFEVSNKGCCGTGAIEVAVLCNKITSSVCPDVSTHVFWDSYHPTEKTYKVLVSLLINKFVNQFV

SEQ ID NO: 21462 - protein, 159 aa, Arabidopsis thaliana
  peptide (1)..(159): Ceres Seq. ID no. 12339153
MSDSASEFVTKLYGYGVRRVAVFGAPPIGCVPSQRTLGGGILRDCADNYNEAAKLFNSKLSPKLDSLRKTLPGIKPIYINIYDPLFDIIQNPANYGFEVSNKGCCGTGAIEVAVLCNKITSSVCPDVSTHVFWDSYHPTEKTYKVLVSLLINKFVNQFV

SEQ ID NO: 21463 - DNA, 1529 bp, Arabidopsis thaliana
  misc_feature (1)..(1529): Ceres Seq. ID no. 13591513
  misc_feature (1)..(1529): Ortholog of  Ceres SEQ ID NO 14315626 as cited in SEQ ID NO 52943
  misc_feature (1)..(1529): Ortholog of  Ceres SEQ ID NO 14302742 as cited in SEQ ID NO 66899
  misc_feature (1)..(1529): Ortholog of  Ceres SEQ ID NO 14313536 as cited in SEQ ID NO 67925
gaacaatctctcatctttagcatagttgtgttatcttcttcttcatcacaatttttctacggtcagagattcaaaagagttctttctctctatcttattctccgatcatcatgatgcagcagccaccacccggaggtatccttccacatcacgctcctcctccttctgcgcaacaacagtacggttaccaacaaccttacgggattgctggagctgctccaccaccaccacagatgtggaatcctcaagcggcggcgccgccatcagttcagcctacgaccgctgacgagatccggactctttggatcggggacttacagtattggatggatgagaatttcctctacggttgctttgctcataccggagagatggtttctgctaaagtgattcgtaacaagcaaaccggtcaagttgaaggatacggtttcattgaattcgcatctcatgctgctgctgaaagagttctacaaacattcaacaacgctcctatcccgagctttcctgatcagctctttagactgaactgggcatcattgagttcaggagataaacgagacgattcaccggactacacgatatttgtcggtgatctggctgctgatgttacggattatatcttacttgagacgttcagagcctcttatccgtcagtgaagggtgcaaaggttgttattgacagagtcactggacgtacaaaaggatatgggtttgttaggttttctgatgaaagtgaacagatccgtgctatgacggagatgaatggcgttccttgttctactagacctatgagaattggtcccgctgctagcaagaaaggtgtaactggtcaaagagattcataccagagctctgctgcaggggtaacaactgataatgatccaaataacacaactgtttttgttggtggattagatgcatctgtcacggatgatcatctgaagaatgtctttagccaatatggtgagattgtgcatgtgaaaatacccgctggaaagcgctgtggattcgttcagttttccgagaagagctgtgcagaggaagctcttagaatgctgaatggagtgcaattaggcggaacaaccgtcaggctctcatggggccgaagtccttcgaacaaacagtcgggggatccgagccagttttactacggtgggtatggacaaggacaggagcagtatgggtacacgatgcctcaagaccctaatgcatattacggaggctactctggtggaggatacagcggtggttaccagcagacaccacaggcaggacagcaaccaccacaacagccaccacagcagcaacaagtcgggtttagctactaaccccgagagtattgcttgagttaatgtcactctgcttgttgtttgcgtactttgttatgaacttgtttctgcgtgccttgttatgaatattttcccaaacacagtttatttgtctttgcttttctctaggtgtgtgttgagtttttaactcttaataatgtttctgcgatgcttctgtttttaatgttttcatcacctttt

SEQ ID NO: 21464 - protein, 405 aa, Arabidopsis thaliana
  peptide (1)..(405): Ceres Seq. ID no. 13591514
MMQQPPPGGILPHHAPPPSAQQQYGYQQPYGIAGAAPPPPQMWNPQAAAPPSVQPTTADEIRTLWIGDLQYWMDENFLYGCFAHTGEMVSAKVIRNKQTGQVEGYGFIEFASHAAAERVLQTFNNAPIPSFPDQLFRLNWASLSSGDKRDDSPDYTIFVGDLAADVTDYILLETFRASYPSVKGAKVVIDRVTGRTKGYGFVRFSDESEQIRAMTEMNGVPCSTRPMRIGPAASKKGVTGQRDSYQSSAAGVTTDNDPNNTTVFVGGLDASVTDDHLKNVFSQYGEIVHVKIPAGKRCGFVQFSEKSCAEEALRMLNGVQLGGTTVRLSWGRSPSNKQSGDPSQFYYGGYGQGQEQYGYTMPQDPNAYYGGYSGGGYSGGYQQTPQAGQQPPQQPPQQQQVGFSY

SEQ ID NO: 21465 - protein, 404 aa, Arabidopsis thaliana
  peptide (1)..(404): Ceres Seq. ID no. 13591515
MQQPPPGGILPHHAPPPSAQQQYGYQQPYGIAGAAPPPPQMWNPQAAAPPSVQPTTADEIRTLWIGDLQYWMDENFLYGCFAHTGEMVSAKVIRNKQTGQVEGYGFIEFASHAAAERVLQTFNNAPIPSFPDQLFRLNWASLSSGDKRDDSPDYTIFVGDLAADVTDYILLETFRASYPSVKGAKVVIDRVTGRTKGYGFVRFSDESEQIRAMTEMNGVPCSTRPMRIGPAASKKGVTGQRDSYQSSAAGVTTDNDPNNTTVFVGGLDASVTDDHLKNVFSQYGEIVHVKIPAGKRCGFVQFSEKSCAEEALRMLNGVQLGGTTVRLSWGRSPSNKQSGDPSQFYYGGYGQGQEQYGYTMPQDPNAYYGGYSGGGYSGGYQQTPQAGQQPPQQPPQQQQVGFSY

SEQ ID NO: 21466 - protein, 364 aa, Arabidopsis thaliana
  peptide (1)..(364): Ceres Seq. ID no. 13591516
MWNPQAAAPPSVQPTTADEIRTLWIGDLQYWMDENFLYGCFAHTGEMVSAKVIRNKQTGQVEGYGFIEFASHAAAERVLQTFNNAPIPSFPDQLFRLNWASLSSGDKRDDSPDYTIFVGDLAADVTDYILLETFRASYPSVKGAKVVIDRVTGRTKGYGFVRFSDESEQIRAMTEMNGVPCSTRPMRIGPAASKKGVTGQRDSYQSSAAGVTTDNDPNNTTVFVGGLDASVTDDHLKNVFSQYGEIVHVKIPAGKRCGFVQFSEKSCAEEALRMLNGVQLGGTTVRLSWGRSPSNKQSGDPSQFYYGGYGQGQEQYGYTMPQDPNAYYGGYSGGGYSGGYQQTPQAGQQPPQQPPQQQQVGFSY

SEQ ID NO: 21467 - DNA, 917 bp, Arabidopsis thaliana
  misc_feature (1)..(917): Ceres Seq. ID no. 12334109
  misc_feature (1)..(917): Ortholog of  Ceres SEQ ID NO 13594992 as cited in SEQ ID NO 55798
  misc_feature (1)..(917): Ortholog of  Ceres SEQ ID NO 14308171 as cited in SEQ ID NO 58912
aggctcttctttactctggtttcgagtttgggttgtgcaaacatggcgacgagctctcatcttcttcctcaggcattgcatatgataccgagaaccccttctttctcgtcgaagaatttaggggtttcttcaattctaccacgagcatcatcagtgaactcaagactatcagtttctagggtttttctcaatcattcgagctccaattttggtttcgccatcgattccaagaagagaaaagagtttatcgctaaagctgaagagagtactgaaggtgaaactgaggctgttgtggagaatgctgttgaaactgaagcggaaggagaaggagaagccactgttgcggcggaggaagctaaacctccgtggaagacgagagtcaagctcggagatatcatggggctactgaacaagaaagctattgaggttgcagagactgtaagaccggttcctggacttaggactggggatattgtagaaatcaaactggaagttcctgagaacaaacgtaggctatctatctacaaaggtattgtgatgtctagacaaaatgcaggcatccacactactatccgtatccggaggattattgcaggcattggtgttgaaatcgtctttcccatatactctcccaacataaaggagataaaagtggtaagtcacaggaaagtgagaagagcaagactttactatctgagggacaaacttcctcgtctctcaacttttaaatgatcaccaaacccaacaccagtcttgtcttgtgttgtcttcaatctccaaaggtagctagctactctcttttctcttgtaataattgtttgtttgtttcgtcttttggatttcatttcttttcatgtaatttacagtaacagtaatttaagaaaagtaaatcaatgttgattgttttgatcttgagc

SEQ ID NO: 21468 - protein, 243 aa, Arabidopsis thaliana
  peptide (1)..(243): Ceres Seq. ID no. 12334110
RLFFTLVSSLGCANMATSSHLLPQALHMIPRTPSFSSKNLGVSSILPRASSVNSRLSVSRVFLNHSSSNFGFAIDSKKRKEFIAKAEESTEGETEAVVENAVETEAEGEGEATVAAEEAKPPWKTRVKLGDIMGLLNKKAIEVAETVRPVPGLRTGDIVEIKLEVPENKRRLSIYKGIVMSRQNAGIHTTIRIRRIIAGIGVEIVFPIYSPNIKEIKVVSHRKVRRARLYYLRDKLPRLSTFK

SEQ ID NO: 21469 - protein, 229 aa, Arabidopsis thaliana
  peptide (1)..(229): Ceres Seq. ID no. 12334111
MATSSHLLPQALHMIPRTPSFSSKNLGVSSILPRASSVNSRLSVSRVFLNHSSSNFGFAIDSKKRKEFIAKAEESTEGETEAVVENAVETEAEGEGEATVAAEEAKPPWKTRVKLGDIMGLLNKKAIEVAETVRPVPGLRTGDIVEIKLEVPENKRRLSIYKGIVMSRQNAGIHTTIRIRRIIAGIGVEIVFPIYSPNIKEIKVVSHRKVRRARLYYLRDKLPRLSTFK

SEQ ID NO: 21470 - protein, 216 aa, Arabidopsis thaliana
  peptide (1)..(216): Ceres Seq. ID no. 12334112
MIPRTPSFSSKNLGVSSILPRASSVNSRLSVSRVFLNHSSSNFGFAIDSKKRKEFIAKAEESTEGETEAVVENAVETEAEGEGEATVAAEEAKPPWKTRVKLGDIMGLLNKKAIEVAETVRPVPGLRTGDIVEIKLEVPENKRRLSIYKGIVMSRQNAGIHTTIRIRRIIAGIGVEIVFPIYSPNIKEIKVVSHRKVRRARLYYLRDKLPRLSTFK

SEQ ID NO: 21471 - DNA, 758 bp, Arabidopsis thaliana
  misc_feature (1)..(758): Ceres Seq. ID no. 12385795
  misc_feature (1)..(758): Ortholog of  Ceres SEQ ID NO 12610934 as cited in SEQ ID NO 55904
  misc_feature (1)..(758): Ortholog of  Ceres SEQ ID NO 13661786 as cited in SEQ ID NO 61478
  misc_feature (1)..(758): Ortholog of  Ceres SEQ ID NO 15177467 as cited in SEQ ID NO 0
acatcttcacaaccaactaaagatagaaagaacataatacaaagagatatttaacgttttgaaatggaggctgttagattcgccgtcgccgtcgttcttgtattttgctacgttacgtcgtctaatgctcagatgacttcaccaccgagcggcggtgcaggaggagacgcacactcactgccgtgtattcagaaactgatgccgtgtcagccgtatcttcacttggcgactccgccgccggcgacgtgttgcatgccgttgaatgagatcgtagccaaagacgccacgtgtctctgcgctgtctttaacaacgttgatatgctcaaatcgcttaacctcactaaagaaaacgctctcgatctccccaaggcttgtggcgccaaagctgacgtgtcactatgcaaaaccagcgccggtactaattcgtcttcaacaccgccggcaaccccgaaaactcctccggcatcttccaccagtaccggaacaggaagcggatcaaccggaaatgcagctccttcgacggccaagccaacaagctcagccccggccatcaacttcggtggacttagctttgcatcggctgtcgtggcaacactcttcttctgatgatctactatatttatttcacgtctttatcagctaggttttcatttgttggaaattaatcagaccatgttcggtaacgtttttatttcaactaaaggttataactgatctatatgtactatgaaatccaaataatagtactaataacttcc

SEQ ID NO: 21472 - protein, 180 aa, Arabidopsis thaliana
  peptide (1)..(180): Ceres Seq. ID no. 12385796
MEAVRFAVAVVLVFCYVTSSNAQMTSPPSGGAGGDAHSLPCIQKLMPCQPYLHLATPPPATCCMPLNEIVAKDATCLCAVFNNVDMLKSLNLTKENALDLPKACGAKADVSLCKTSAGTNSSSTPPATPKTPPASSTSTGTGSGSTGNAAPSTAKPTSSAPAINFGGLSFASAVVATLFF

SEQ ID NO: 21473 - protein, 157 aa, Arabidopsis thaliana
  peptide (1)..(157): Ceres Seq. ID no. 12385797
MTSPPSGGAGGDAHSLPCIQKLMPCQPYLHLATPPPATCCMPLNEIVAKDATCLCAVFNNVDMLKSLNLTKENALDLPKACGAKADVSLCKTSAGTNSSSTPPATPKTPPASSTSTGTGSGSTGNAAPSTAKPTSSAPAINFGGLSFASAVVATLFF

SEQ ID NO: 21474 - protein, 135 aa, Arabidopsis thaliana
  peptide (1)..(135): Ceres Seq. ID no. 12385798
MPCQPYLHLATPPPATCCMPLNEIVAKDATCLCAVFNNVDMLKSLNLTKENALDLPKACGAKADVSLCKTSAGTNSSSTPPATPKTPPASSTSTGTGSGSTGNAAPSTAKPTSSAPAINFGGLSFASAVVATLFF

SEQ ID NO: 21475 - DNA, 1152 bp, Arabidopsis thaliana
  misc_feature (1)..(1152): Ceres Seq. ID no. 12385429
  misc_feature (1)..(1152): Ortholog of  Ceres SEQ ID NO 14312711 as cited in SEQ ID NO 1401
  misc_feature (1)..(1152): Ortholog of  Ceres SEQ ID NO 13586635 as cited in SEQ ID NO 14217
  misc_feature (1)..(1152): Ortholog of  Ceres SEQ ID NO 15170220 as cited in SEQ ID NO 55383
  misc_feature (1)..(1152): Ortholog of  Ceres SEQ ID NO 14304198 as cited in SEQ ID NO 56479
  misc_feature (1)..(1152): Ortholog of  Ceres SEQ ID NO 14316543 as cited in SEQ ID NO 57118
  misc_feature (1)..(1152): Ortholog of  Ceres SEQ ID NO 12616285 as cited in SEQ ID NO 63483
acacatcttaaaaagtaaaaacacattcatctatccaacaaaaaaaaaaaaaaaaaggagaaatggaaggaatcgatcatagaatggtgagtgtcaatggcataactatgcacattgccgagaaaggtcccaaagaaggacctgtggtgcttctcctccatggattccctgatctctggtacacgtggcgtcaccagattagtgggttatcatctctaggttaccgcgctgtagctccagacctccgaggctacggagactctgattcgccagagtctttctccgagtacacgtgtcttaacgtcgttggggacctcgtagctcttctggacagtgttgctggaaatcaagagaaggtgtttctggtcggtcatgattggggagccattatcggatggtttctctgtttgtttcgacctgaaaagattaacggctttgtgtgtttgagtgtgccgtatagatcaagaaaccctaaagtcaagcccgttcaagggttcaaggctgtatttggagatgattactacatttgtagatttcaggaaccggggaagattgaaggagagattgcaagtgcagatccaagaatatttctgaggaacctcttcacagggaggacactcggtccgccgattttacctaaggataatccctttggggaaaaacctaaccctaatagcgaaaacattgaattgcctgaatggttttctaagaaagatctcgatttctatgtctccaaattcgagaaggcaggatttaccggtggattgaactactacagagccatggatctgaattgggagctcactgcaccatggaccggagctaagattcaagttccagtgaagttcatgacaggtgacttcgacatggtttacaccacaccagggatgaaagagtacattcacggtggtggatttgctgcagatgttccaactcttcaagagatagtggtgattgaagatgctggtcacttcgttaaccaagagaaacctcaagaggtcactgctcacatcaatgacttcttcaccaagcttcgggacaacaacaaaagcttttagagttctcgtttggttctattatgttggctctcaaaacaagttggttcttgcatgtgttgtttcgacaagattttgaataagacttggcattatg

SEQ ID NO: 21476 - protein, 331 aa, Arabidopsis thaliana
  peptide (1)..(331): Ceres Seq. ID no. 12385430
MEGIDHRMVSVNGITMHIAEKGPKEGPVVLLLHGFPDLWYTWRHQISGLSSLGYRAVAPDLRGYGDSDSPESFSEYTCLNVVGDLVALLDSVAGNQEKVFLVGHDWGAIIGWFLCLFRPEKINGFVCLSVPYRSRNPKVKPVQGFKAVFGDDYYICRFQEPGKIEGEIASADPRIFLRNLFTGRTLGPPILPKDNPFGEKPNPNSENIELPEWFSKKDLDFYVSKFEKAGFTGGLNYYRAMDLNWELTAPWTGAKIQVPVKFMTGDFDMVYTTPGMKEYIHGGGFAADVPTLQEIVVIEDAGHFVNQEKPQEVTAHINDFFTKLRDNNKSF

SEQ ID NO: 21477 - protein, 324 aa, Arabidopsis thaliana
  peptide (1)..(324): Ceres Seq. ID no. 12385431
MVSVNGITMHIAEKGPKEGPVVLLLHGFPDLWYTWRHQISGLSSLGYRAVAPDLRGYGDSDSPESFSEYTCLNVVGDLVALLDSVAGNQEKVFLVGHDWGAIIGWFLCLFRPEKINGFVCLSVPYRSRNPKVKPVQGFKAVFGDDYYICRFQEPGKIEGEIASADPRIFLRNLFTGRTLGPPILPKDNPFGEKPNPNSENIELPEWFSKKDLDFYVSKFEKAGFTGGLNYYRAMDLNWELTAPWTGAKIQVPVKFMTGDFDMVYTTPGMKEYIHGGGFAADVPTLQEIVVIEDAGHFVNQEKPQEVTAHINDFFTKLRDNNKSF

SEQ ID NO: 21478 - protein, 316 aa, Arabidopsis thaliana
  peptide (1)..(316): Ceres Seq. ID no. 12385432
MHIAEKGPKEGPVVLLLHGFPDLWYTWRHQISGLSSLGYRAVAPDLRGYGDSDSPESFSEYTCLNVVGDLVALLDSVAGNQEKVFLVGHDWGAIIGWFLCLFRPEKINGFVCLSVPYRSRNPKVKPVQGFKAVFGDDYYICRFQEPGKIEGEIASADPRIFLRNLFTGRTLGPPILPKDNPFGEKPNPNSENIELPEWFSKKDLDFYVSKFEKAGFTGGLNYYRAMDLNWELTAPWTGAKIQVPVKFMTGDFDMVYTTPGMKEYIHGGGFAADVPTLQEIVVIEDAGHFVNQEKPQEVTAHINDFFTKLRDNNKSF

SEQ ID NO: 21479 - DNA, 1295 bp, Arabidopsis thaliana
  misc_feature (1)..(1295): Ceres Seq. ID no. 13622035
  misc_feature (1)..(1295): Ortholog of  Ceres SEQ ID NO 13595688 as cited in SEQ ID NO 54342
  misc_feature (1)..(1295): Ortholog of  Ceres SEQ ID NO 13595240 as cited in SEQ ID NO 56316
  misc_feature (1)..(1295): Ortholog of  Ceres SEQ ID NO 15168425 as cited in SEQ ID NO 57370
atccggagacatccattttctctggtagctgtttacttcttcttcttcttcttcctcctcctctgttcgtcaatcgccgatctcgttgcttcattttccttgagatcgattggtacaagtgttcatccaatggttggaggaggagttatccggcagcttcttagaaggaaacttcattcccaatcagtcgcaactccggtattgtcatggttgtcttcgaagaaagcgaatgaagatgctgggtctgctggtttaagagcatttgctctcatgggtgctggtattaccggattattgagtttttctactgttgcatctgctgatgaggctgaacatggtctggagtgtcctaactacccttggccacatgagggcattctcagctcatatgaccatgcttcgatccgtcgtggtcaccaagtttatcagcaagtttgtgcgtcttgccattcgatgtctctgatctcataccgagacttggtgggtgttgcctacacagaggaagaggcgaaggccatggcagctgaaatcgaggttgttgatggaccaaatgatgagtgtgagatgttcacccgacctggtaaactcagtgatcggcttcctgaaccatacttaaatgaatcggctgctaggttcgccaatggaggagcgtatccaccggatctaagtcttgtaactaaggcacgtcacaatggccaaaattatgtctttgctctgttgactggttatcgtgatcctcctgctggaatttcgatcagagaggggctacactacaatccttatttccctggtggagcaatcgctatgccaaaaatgctcaacgatgaagctgtggaatatgaagatggaactcctgcaacagaagcacagatgggtaaagatgttgtatccttcttgtcctgggcagctgaaccagagatggaagagaggaaattgatggggttcaaatggatattcttactgtctttggctctgcttcaagctgcgtattacaggagactgaaatggtcagtactcaaatcccgtaagcttgttctcgacgttgttaactaatcccgtgaagatcaccttttctctgggtaataatcattaatcttgaaagggataaatggtgaatcccactttttgtctcaaaagacatgtttctttgtttattgtttagaaagtctaatgaggcaaagaagtaaagcttttttaacctcaagtcacacatgattttgagattatattatttctttttggtttgttgtctcctaaaccggactcggtttgtcttaataaaaatgtggttttac

SEQ ID NO: 21480 - protein, 350 aa, Arabidopsis thaliana
  peptide (1)..(350): Ceres Seq. ID no. 13622036
IRRHPFSLVAVYFFFFFFLLLCSSIADLVASFSLRSIGTSVHPMVGGGVIRQLLRRKLHSQSVATPVLSWLSSKKANEDAGSAGLRAFALMGAGITGLLSFSTVASADEAEHGLECPNYPWPHEGILSSYDHASIRRGHQVYQQVCASCHSMSLISYRDLVGVAYTEEEAKAMAAEIEVVDGPNDECEMFTRPGKLSDRLPEPYLNESAARFANGGAYPPDLSLVTKARHNGQNYVFALLTGYRDPPAGISIREGLHYNPYFPGGAIAMPKMLNDEAVEYEDGTPATEAQMGKDVVSFLSWAAEPEMEERKLMGFKWIFLLSLALLQAAYYRRLKWSVLKSRKLVLDVVN

SEQ ID NO: 21481 - protein, 307 aa, Arabidopsis thaliana
  peptide (1)..(307): Ceres Seq. ID no. 13622037
MVGGGVIRQLLRRKLHSQSVATPVLSWLSSKKANEDAGSAGLRAFALMGAGITGLLSFSTVASADEAEHGLECPNYPWPHEGILSSYDHASIRRGHQVYQQVCASCHSMSLISYRDLVGVAYTEEEAKAMAAEIEVVDGPNDECEMFTRPGKLSDRLPEPYLNESAARFANGGAYPPDLSLVTKARHNGQNYVFALLTGYRDPPAGISIREGLHYNPYFPGGAIAMPKMLNDEAVEYEDGTPATEAQMGKDVVSFLSWAAEPEMEERKLMGFKWIFLLSLALLQAAYYRRLKWSVLKSRKLVLDVVN

SEQ ID NO: 21482 - protein, 260 aa, Arabidopsis thaliana
  peptide (1)..(260): Ceres Seq. ID no. 13622038
MGAGITGLLSFSTVASADEAEHGLECPNYPWPHEGILSSYDHASIRRGHQVYQQVCASCHSMSLISYRDLVGVAYTEEEAKAMAAEIEVVDGPNDECEMFTRPGKLSDRLPEPYLNESAARFANGGAYPPDLSLVTKARHNGQNYVFALLTGYRDPPAGISIREGLHYNPYFPGGAIAMPKMLNDEAVEYEDGTPATEAQMGKDVVSFLSWAAEPEMEERKLMGFKWIFLLSLALLQAAYYRRLKWSVLKSRKLVLDVVN

SEQ ID NO: 21483 - DNA, 1006 bp, Arabidopsis thaliana
  misc_feature (1)..(1006): Ceres Seq. ID no. 12328667
  misc_feature (1)..(1006): Ortholog of  Ceres SEQ ID NO 13574576 as cited in SEQ ID NO 47
  misc_feature (1)..(1006): Ortholog of  Ceres SEQ ID NO 13638673 as cited in SEQ ID NO 51830
  misc_feature (1)..(1006): Ortholog of  Ceres SEQ ID NO 13638785 as cited in SEQ ID NO 51967
gtgattgacagatagataagagtgtttggtagctcagactcagagagtcacaaagtgtgtgtagcagcaatggcgtctgttgcttcttcaactactctcatctcttctccctcttctagggtttttccagcaaagtcttcactttcctctccatctgtttctttccttcgaaccctttcttctccttccgcatctgcttctctccgctccggatttgctcgacgctcttccctcagctccacttctcgtcggagctttgctgtcaaagcccaggccgatgatcttccactggttggaaacaaggcgcctgattttgaggcagaggctgtgtttgatcaagagttcatcaaggttaagctctctgattacattggaaagaagtatgtgattctctttttctacccattggactttactttcgtctgcccaacagagattactgccttcagtgaccggcattcagaatttgagaagttgaacaccgaagtattaggtgtttctgtcgatagtgtgttctctcaccttgcatgggtccaaacagacaggaaatctggagggcttggtgatctgaactatccccttatttcagatgtcactaaatcaatctcaaagtcgttcggagtgctcatccatgatcagggaatagcactgagaggacttttcataatcgacaaggaaggagtgatccaacattccaccatcaacaatcttggtattggccgaagcgttgatgagacaatgagaaccctccaggcattacagtacatccaggaaaacccggatgaagtctgcccagcaggatggaagccgggtgagaagtcaatgaaacccgacccaaaactcagcaaagagtacttctcagctatttagaaactctactatgatagcaaaaaggtacaatctttgttatatgtgagcagagttttttttcttgtacgctaaaacaatcctttgtttgattctcactttgtccccaaaattataataaaaaactttttccgttaag

SEQ ID NO: 21484 - protein, 266 aa, Arabidopsis thaliana
  peptide (1)..(266): Ceres Seq. ID no. 12328668
MASVASSTTLISSPSSRVFPAKSSLSSPSVSFLRTLSSPSASASLRSGFARRSSLSSTSRRSFAVKAQADDLPLVGNKAPDFEAEAVFDQEFIKVKLSDYIGKKYVILFFYPLDFTFVCPTEITAFSDRHSEFEKLNTEVLGVSVDSVFSHLAWVQTDRKSGGLGDLNYPLISDVTKSISKSFGVLIHDQGIALRGLFIIDKEGVIQHSTINNLGIGRSVDETMRTLQALQYIQENPDEVCPAGWKPGEKSMKPDPKLSKEYFSAI

SEQ ID NO: 21485 - DNA, 1164 bp, Arabidopsis thaliana
  misc_feature (1)..(1164): Ceres Seq. ID no. 12325990
  misc_feature (1)..(1164): Ortholog of  Ceres SEQ ID NO 14311596 as cited in SEQ ID NO 51728
  misc_feature (1)..(1164): Ortholog of  Ceres SEQ ID NO 14307004 as cited in SEQ ID NO 59551
  misc_feature (1)..(1164): Ortholog of  Ceres SEQ ID NO 12617197 as cited in SEQ ID NO 63406
  misc_feature (1)..(1164): Ortholog of  Ceres SEQ ID NO 13597804 as cited in SEQ ID NO 64182
  misc_feature (1)..(1164): Ortholog of  Ceres SEQ ID NO 14302768 as cited in SEQ ID NO 64889
  misc_feature (1)..(1164): Ortholog of  Ceres SEQ ID NO 13598565 as cited in SEQ ID NO 65250
  misc_feature (1)..(1164): Ortholog of  Ceres SEQ ID NO 13598597 as cited in SEQ ID NO 65496
  misc_feature (1)..(1164): Ortholog of  Ceres SEQ ID NO 13596284 as cited in SEQ ID NO 68273
  misc_feature (1)..(1164): Ortholog of  Ceres SEQ ID NO 13596227 as cited in SEQ ID NO 68750
  misc_feature (1)..(1164): Ortholog of  Ceres SEQ ID NO 15178902 as cited in SEQ ID NO 0
gaaacttagagagacagagagagagaaagctcaaattcaatcatcaatgttaacggacgagagagaagtagtctgtgtcaccggcgccagtggctgcatcggctcgtggctggtccatcagctcctcctccgcggctactccgtccacgccaccgtgaaaaacctccaggatgagaaagagacgaaacatctagaaggtctcgaaggtgcagccacacgcctccatctattcgagatggatctcctacaatacgacaccgtttccgccgccatcaatggttgctccggcgtattccacctcgcatcaccttgtatcgtcgatgaagtccaagatccccagaagcaactacttgacccggcggttaaaggaaccataaatgttctgacggcggcaaaagaagccagtgttaagagagttgttgtgacgtcttcgatatcggcgattactccaagtcccaactggcctgctgataagatcaagaatgaggaatgttgggctgctgaagactactgcaggcaaaatggattgtggtatccactgtcgaagacgcttgctgagaaggcagcttgggaatttgcagaggagaaaggattggatgtggttgtggtgaatccaggcactgtcatggggcctgtgattcctccgtctcttaacgctagcatgcacatgcttctacgccttcttcaggggtgcacggagacatacgagaacttctttatggggtctgtgcatttcaaggatgtggctttagctcatattcttgtatacgaggatccatattcgaaaggaaggcacttgtgcgttgaggctatctctcactacggtgattttgtagccaaagttgctgagctctatcccaattacaatgtccccaagttaccgagagagactcaaccgggtttacttcgagataagaatgcatcaaagaagctcatagatttggggttaaagttcatttccatggaggaaatcatcaaggaaggtgtggagagtcttaaaagcaaaggatttatctcttaatacctacctctgtaactctgtttgattgagcaattaacacaatctctaggcagcagaaacatttcatatgatatacgattttgcacttttgtaataaataagctggcctatggtatggtatgaacatccaattaatatttatt

SEQ ID NO: 21486 - protein, 339 aa, Arabidopsis thaliana
  peptide (1)..(339): Ceres Seq. ID no. 12325991
KLRETEREKAQIQSSMLTDEREVVCVTGASGCIGSWLVHQLLLRGYSVHATVKNLQDEKETKHLEGLEGAATRLHLFEMDLLQYDTVSAAINGCSGVFHLASPCIVDEVQDPQKQLLDPAVKGTINVLTAAKEASVKRVVVTSSISAITPSPNWPADKIKNEECWAAEDYCRQNGLWYPLSKTLAEKAAWEFAEEKGLDVVVVNPGTVMGPVIPPSLNASMHMLLRLLQGCTETYENFFMGSVHFKDVALAHILVYEDPYSKGRHLCVEAISHYGDFVAKVAELYPNYNVPKLPRETQPGLLRDKNASKKLIDLGLKFISMEEIIKEGVESLKSKGFIS

SEQ ID NO: 21487 - protein, 324 aa, Arabidopsis thaliana
  peptide (1)..(324): Ceres Seq. ID no. 12325992
MLTDEREVVCVTGASGCIGSWLVHQLLLRGYSVHATVKNLQDEKETKHLEGLEGAATRLHLFEMDLLQYDTVSAAINGCSGVFHLASPCIVDEVQDPQKQLLDPAVKGTINVLTAAKEASVKRVVVTSSISAITPSPNWPADKIKNEECWAAEDYCRQNGLWYPLSKTLAEKAAWEFAEEKGLDVVVVNPGTVMGPVIPPSLNASMHMLLRLLQGCTETYENFFMGSVHFKDVALAHILVYEDPYSKGRHLCVEAISHYGDFVAKVAELYPNYNVPKLPRETQPGLLRDKNASKKLIDLGLKFISMEEIIKEGVESLKSKGFIS

SEQ ID NO: 21488 - protein, 261 aa, Arabidopsis thaliana
  peptide (1)..(261): Ceres Seq. ID no. 12325993
MDLLQYDTVSAAINGCSGVFHLASPCIVDEVQDPQKQLLDPAVKGTINVLTAAKEASVKRVVVTSSISAITPSPNWPADKIKNEECWAAEDYCRQNGLWYPLSKTLAEKAAWEFAEEKGLDVVVVNPGTVMGPVIPPSLNASMHMLLRLLQGCTETYENFFMGSVHFKDVALAHILVYEDPYSKGRHLCVEAISHYGDFVAKVAELYPNYNVPKLPRETQPGLLRDKNASKKLIDLGLKFISMEEIIKEGVESLKSKGFIS

SEQ ID NO: 21489 - DNA, 1257 bp, Arabidopsis thaliana
  misc_feature (1)..(1257): Ceres Seq. ID no. 13490456
  misc_feature (1)..(1257): Ortholog of  Ceres SEQ ID NO 13595616 as cited in SEQ ID NO 59854
gtgatttctttctttgcctttaataaagcttcgtgctcaataggctgccacggaggcgagcctgaaaaatgccgatgacggttgtttccggtcgattctcaacggcgttgctccctacttgcttttccttgtcgcggttgcattccgtcaagtacgccgctcaaagacgggttgttttcgtttccagatcagctcacgcctcttcagcctccgtctccgttgagacaaattcgaattcgaatgtggattttgttatcgagaagaaggataagaacagaggagagaagaagattctagcttgtcccatctgttataactccttagcatggattagtcaacctaatggattaatagaatctgctgcctctggtattcaagtacaatgcaatacatgtaaaaggagttactcgggtaatgagacgcatcttgatttggctgttgctagtggaagcaagagatacagtgaaccgatgcctctttccactgagttatttaggactccactggtctcgtttctctatgagaggggttggcgtcagaatttcatatggggaggttttccaggaccagagaaagagtttgaaatggctaaggcctatctgaagcctgttttgggaggcaatatcattgatgctagttgtggaagtgggatgttctcgaggttattcactagaagtgatctattttctctggttattgctctagattactcagagaatatgctgcgacaatgctatgaactcttaaataaagaagaaaactttcccaacaaagagaaacttgttctagtccgagctgacattgctagactccctttcctttcgggttcagttgacgctgtccatgctggtgctgctctgcattgctggccttcaccatcctcagccgttgctgagataagccgtgttcttagacctggaggagtatttgtggccaccacatttatctatgacggtccattcagttttatccccttcttgaagaatcttcgtcaggaaataatgagatattcaggttctcacattttcctaaatgaacgtgagcttgaagatatctgcaaagcctgtggtctcgttaacttcactcgtgttagaaacgggccatttataatgctatctgcaacaaaacccagctaagctcaccctctttaaagtatatatacttttctgtaaaaaattggtataaagttataaacattataacaacttgagttccatacagtatacctaatttgtaaagctttttgcaaatgttcct

SEQ ID NO: 21490 - protein, 355 aa, Arabidopsis thaliana
  peptide (1)..(355): Ceres Seq. ID no. 13490457
MPMTVVSGRFSTALLPTCFSLSRLHSVKYAAQRRVVFVSRSAHASSASVSVETNSNSNVDFVIEKKDKNRGEKKILACPICYNSLAWISQPNGLIESAASGIQVQCNTCKRSYSGNETHLDLAVASGSKRYSEPMPLSTELFRTPLVSFLYERGWRQNFIWGGFPGPEKEFEMAKAYLKPVLGGNIIDASCGSGMFSRLFTRSDLFSLVIALDYSENMLRQCYELLNKEENFPNKEKLVLVRADIARLPFLSGSVDAVHAGAALHCWPSPSSAVAEISRVLRPGGVFVATTFIYDGPFSFIPFLKNLRQEIMRYSGSHIFLNERELEDICKACGLVNFTRVRNGPFIMLSATKPS

SEQ ID NO: 21491 - protein, 353 aa, Arabidopsis thaliana
  peptide (1)..(353): Ceres Seq. ID no. 13490458
MTVVSGRFSTALLPTCFSLSRLHSVKYAAQRRVVFVSRSAHASSASVSVETNSNSNVDFVIEKKDKNRGEKKILACPICYNSLAWISQPNGLIESAASGIQVQCNTCKRSYSGNETHLDLAVASGSKRYSEPMPLSTELFRTPLVSFLYERGWRQNFIWGGFPGPEKEFEMAKAYLKPVLGGNIIDASCGSGMFSRLFTRSDLFSLVIALDYSENMLRQCYELLNKEENFPNKEKLVLVRADIARLPFLSGSVDAVHAGAALHCWPSPSSAVAEISRVLRPGGVFVATTFIYDGPFSFIPFLKNLRQEIMRYSGSHIFLNERELEDICKACGLVNFTRVRNGPFIMLSATKPS

SEQ ID NO: 21492 - protein, 221 aa, Arabidopsis thaliana
  peptide (1)..(221): Ceres Seq. ID no. 13490459
MPLSTELFRTPLVSFLYERGWRQNFIWGGFPGPEKEFEMAKAYLKPVLGGNIIDASCGSGMFSRLFTRSDLFSLVIALDYSENMLRQCYELLNKEENFPNKEKLVLVRADIARLPFLSGSVDAVHAGAALHCWPSPSSAVAEISRVLRPGGVFVATTFIYDGPFSFIPFLKNLRQEIMRYSGSHIFLNERELEDICKACGLVNFTRVRNGPFIMLSATKPS

SEQ ID NO: 21493 - DNA, 1326 bp, Arabidopsis thaliana
  misc_feature (1)..(1326): Ceres Seq. ID no. 12333873
  misc_feature (1)..(1326): Ortholog of  Ceres SEQ ID NO 15171556 as cited in SEQ ID NO 59687
  misc_feature (1)..(1326): Ortholog of  Ceres SEQ ID NO 15177935 as cited in SEQ ID NO 60258
  misc_feature (1)..(1326): Ortholog of  Ceres SEQ ID NO 13659033 as cited in SEQ ID NO 66372
  misc_feature (1)..(1326): Ortholog of  Ceres SEQ ID NO 12625899 as cited in SEQ ID NO 69079
  misc_feature (1)..(1326): Ortholog of  Ceres SEQ ID NO 15180051 as cited in SEQ ID NO 0
acaaaaacccaaaacctttgatatttgtctaattttacaaagatgggtttcaaactcatctctctcctccttctttttcttccacttctaacagtcacaatcttgtcgggagtcgagcaggcctttgcttccgacaaggcactcctcgtgaccggccgcaacatcacggctgacggtggaaggtcgtcactgagagggaagaagcagaggagagcatcaggatgtaacttgttccaaggccgatgggtgttcgatgcttcttaccctttctatgactcgtccaagtgtcctttcatcgacggcgagtttgactgtctcaagttcggccgaccagacaaacagttcctcaagtactcttggcaacctgaatcttgcaccatcccaaggttcgacggtggggcatttctgaggaaatacagaggaaaacgagtcatgttcgtcggagactcactgagtttaaacatgtgggaatcgttggcctgtatgatccatgcgtcggtaccaaacgccaagaccacttttctcaagcgtaccccactctctactctcactttccaggaatatggagtaacgttatatctatatagaacaccatacatagtagatatatccaaagagagagttgggcgtgtgcttaaccttggagctattgaaggaggtgctgatgcttggaaaaacatggacgttcttgtcttcaactcttggcattggtggactcacaaaggccaatctcaagggtgggattatattagagatgggtcgtctttggtgagagacatgaaccgtcttgacgctttctacaaaggactcagtacttgggctcgatgggttgatcaaaacgtcgatacggccaaaactcgagttttcttccaaggcatttctcccactcattacgagggaagggaatggaacgagccgaggaagacttgtagtgggcaaatgcagccgttgggtggatcaagttacccaagtggtcagcctccatcctcaggagtagtgtcgaaagtgttgagttcgatgaaaaagccagtgaccttgctcgatatcacaactttgtctcagttgagaaaagatgctcatccttcttcttatggtggcgatggaggaacagattgcagccattggtgcctcccagggttgcctgatacatggaaccaacttctctacgcagctcttacgatgtgaagtgttaagatactaaaaagaaagtgcataacacctttattctgtaaatgacattcgtaaatcttctagtgttgtgtgatgctatagaaaacagatttaaacaaaagagacattctcagtataaaataacacattggtttg

SEQ ID NO: 21494 - protein, 380 aa, Arabidopsis thaliana
  peptide (1)..(380): Ceres Seq. ID no. 12333874
MGFKLISLLLLFLPLLTVTILSGVEQAFASDKALLVTGRNITADGGRSSLRGKKQRRASGCNLFQGRWVFDASYPFYDSSKCPFIDGEFDCLKFGRPDKQFLKYSWQPESCTIPRFDGGAFLRKYRGKRVMFVGDSLSLNMWESLACMIHASVPNAKTTFLKRTPLSTLTFQEYGVTLYLYRTPYIVDISKERVGRVLNLGAIEGGADAWKNMDVLVFNSWHWWTHKGQSQGWDYIRDGSSLVRDMNRLDAFYKGLSTWARWVDQNVDTAKTRVFFQGISPTHYEGREWNEPRKTCSGQMQPLGGSSYPSGQPPSSGVVSKVLSSMKKPVTLLDITTLSQLRKDAHPSSYGGDGGTDCSHWCLPGLPDTWNQLLYAALTM

SEQ ID NO: 21495 - protein, 250 aa, Arabidopsis thaliana
  peptide (1)..(250): Ceres Seq. ID no. 12333875
MFVGDSLSLNMWESLACMIHASVPNAKTTFLKRTPLSTLTFQEYGVTLYLYRTPYIVDISKERVGRVLNLGAIEGGADAWKNMDVLVFNSWHWWTHKGQSQGWDYIRDGSSLVRDMNRLDAFYKGLSTWARWVDQNVDTAKTRVFFQGISPTHYEGREWNEPRKTCSGQMQPLGGSSYPSGQPPSSGVVSKVLSSMKKPVTLLDITTLSQLRKDAHPSSYGGDGGTDCSHWCLPGLPDTWNQLLYAALTM

SEQ ID NO: 21496 - protein, 240 aa, Arabidopsis thaliana
  peptide (1)..(240): Ceres Seq. ID no. 12333876
MWESLACMIHASVPNAKTTFLKRTPLSTLTFQEYGVTLYLYRTPYIVDISKERVGRVLNLGAIEGGADAWKNMDVLVFNSWHWWTHKGQSQGWDYIRDGSSLVRDMNRLDAFYKGLSTWARWVDQNVDTAKTRVFFQGISPTHYEGREWNEPRKTCSGQMQPLGGSSYPSGQPPSSGVVSKVLSSMKKPVTLLDITTLSQLRKDAHPSSYGGDGGTDCSHWCLPGLPDTWNQLLYAALTM

SEQ ID NO: 21497 - DNA, 1189 bp, Arabidopsis thaliana
  misc_feature (1)..(1189): Ceres Seq. ID no. 13488110
  misc_feature (1)..(1189): Ortholog of  Ceres SEQ ID NO 14306479 as cited in SEQ ID NO 53033
atgaatttggtcttcgctataatctcacgttacattaaattggctcctgtgaacctaaatttatggactatgatcccaacaccaatccgttcgaccttcatttctccggtaaacttccgaaaagagaagtctcggcttcagcttctaaagttgtagagaagaaatggttagtgaaagatgagaagagaaatatgctacaagatgaaataaaccgggttaattcggagaacaagaagctaaccgaaatgttagcaagggtctgtgagaagtactatgctcttaataatcttatggaggagttgcagagtcgaaagagtcctgaaagtgttaactttcagaacaaacagctaacggggaaacgaaaacaagaacttgatgagtttgttagctccccaattggactcagtctcggaccaatcgagaacatcaccaacgataaagcgacggtttcaaccgcttactttgctgctgagaagtctgacacaagcttgactgtgaaagatggatatcaatggaggaaatacgggcaaaagattacgagagataatccatctcctagagcttacttcagatgctcgttttcaccgtcttgtctagtcaagaagaaggtgcaacgaagtgcagaagatccatctttcttggtagccacttacgaacggacacataaccacaccggaccacatgcaagtgtgtccaggacagtgaaacttgatctagttcaaggtgggcttgaaccagttgaggaaaagaaagagagagggacgattcaagaggttttggtgcaacaaatggcttcttcgttgaccaaagatcctaagttcactgcagctcttgcgactgctatttccgggagattgatagagcattcaagaacatgaaagttctctagaacatgtatatttctgttttgttctattttgttgctcattcctagtaaaaaggtaaagatttgtttgatcttgattaggaggcatagatgtcaattttaatgtgtgtgtatataattacatcaaatctaagtatccaaaaagggtcacccccattttatcttatgttgaaagagttttgttatagctcggtgtaagtatggtagattgacgctgcttcgacagtttatgtatcttccaatgttatcttgttcagttgtttgtattaacttccattagagaagaatgtgatgccattacag

SEQ ID NO: 21498 - protein, 271 aa, Arabidopsis thaliana
  peptide (1)..(271): Ceres Seq. ID no. 13488111
MDYDPNTNPFDLHFSGKLPKREVSASASKVVEKKWLVKDEKRNMLQDEINRVNSENKKLTEMLARVCEKYYALNNLMEELQSRKSPESVNFQNKQLTGKRKQELDEFVSSPIGLSLGPIENITNDKATVSTAYFAAEKSDTSLTVKDGYQWRKYGQKITRDNPSPRAYFRCSFSPSCLVKKKVQRSAEDPSFLVATYERTHNHTGPHASVSRTVKLDLVQGGLEPVEEKKERGTIQEVLVQQMASSLTKDPKFTAALATAISGRLIEHSRT

SEQ ID NO: 21499 - protein, 228 aa, Arabidopsis thaliana
  peptide (1)..(228): Ceres Seq. ID no. 13488112
MLQDEINRVNSENKKLTEMLARVCEKYYALNNLMEELQSRKSPESVNFQNKQLTGKRKQELDEFVSSPIGLSLGPIENITNDKATVSTAYFAAEKSDTSLTVKDGYQWRKYGQKITRDNPSPRAYFRCSFSPSCLVKKKVQRSAEDPSFLVATYERTHNHTGPHASVSRTVKLDLVQGGLEPVEEKKERGTIQEVLVQQMASSLTKDPKFTAALATAISGRLIEHSRT

SEQ ID NO: 21500 - protein, 210 aa, Arabidopsis thaliana
  peptide (1)..(210): Ceres Seq. ID no. 13488113
MLARVCEKYYALNNLMEELQSRKSPESVNFQNKQLTGKRKQELDEFVSSPIGLSLGPIENITNDKATVSTAYFAAEKSDTSLTVKDGYQWRKYGQKITRDNPSPRAYFRCSFSPSCLVKKKVQRSAEDPSFLVATYERTHNHTGPHASVSRTVKLDLVQGGLEPVEEKKERGTIQEVLVQQMASSLTKDPKFTAALATAISGRLIEHSRT

SEQ ID NO: 21501 - DNA, 834 bp, Arabidopsis thaliana
  misc_feature (1)..(834): Ceres Seq. ID no. 13493901
  misc_feature (1)..(834): Ortholog of  Ceres SEQ ID NO 15179506 as cited in SEQ ID NO 0
aagaaccttcacttttctctcccactctttcttttactactctcacacatatctctgtctatatatcactttacataaacgactattccacacacaaacacacatagccatggcctcttctttctcttcacaagccttcttcttgctcacattgtctatggttttaattcctttctctttagctcaagctcccatgatggctccttctggctcaatgtccatgccgcctatgtctagcggcggtggaagctcggttcctcctccagtgatgtctccgatgccaatgatgactccaccacctatgcctatgactccaccacccatgcccatgactccaccacctatgcctatggctccaccaccaatgcccatggcttcaccaccaatgatgccaatgactccatctacaagcccaagcccattaacagttccggatatgccttcgccgccgatgccatccggaatggaatcttcaccttctccaggacccatgccaccggcaatggcggcttcgccggattcaggagctttcaatgttagaaacaacgtcgtaacactttcatgcgttgttggagttgttgcagcccattttctcctcgtttgaaatgattattgaattggtcagcctcgatcgttttcttgtaatttaccttcatttttttccctcaaattattagtggtcatcattttataatatttgagtttgtgtttgatgtacgattcagacatttgtttgcattatgtgcttaataagtttatcgttgactctacttgaagagagactttgtatgtgatgtaaatttcttctatctatggaacattgcattcgtagtc

SEQ ID NO: 21502 - protein, 200 aa, Arabidopsis thaliana
  peptide (1)..(200): Ceres Seq. ID no. 13493902
RTFTFLSHSFFYYSHTYLCLYITLHKRLFHTQTHIAMASSFSSQAFFLLTLSMVLIPFSLAQAPMMAPSGSMSMPPMSSGGGSSVPPPVMSPMPMMTPPPMPMTPPPMPMTPPPMPMAPPPMPMASPPMMPMTPSTSPSPLTVPDMPSPPMPSGMESSPSPGPMPPAMAASPDSGAFNVRNNVVTLSCVVGVVAAHFLLV

SEQ ID NO: 21503 - protein, 164 aa, Arabidopsis thaliana
  peptide (1)..(164): Ceres Seq. ID no. 13493903
MASSFSSQAFFLLTLSMVLIPFSLAQAPMMAPSGSMSMPPMSSGGGSSVPPPVMSPMPMMTPPPMPMTPPPMPMTPPPMPMAPPPMPMASPPMMPMTPSTSPSPLTVPDMPSPPMPSGMESSPSPGPMPPAMAASPDSGAFNVRNNVVTLSCVVGVVAAHFLLV

SEQ ID NO: 21504 - protein, 148 aa, Arabidopsis thaliana
  peptide (1)..(148): Ceres Seq. ID no. 13493904
MVLIPFSLAQAPMMAPSGSMSMPPMSSGGGSSVPPPVMSPMPMMTPPPMPMTPPPMPMTPPPMPMAPPPMPMASPPMMPMTPSTSPSPLTVPDMPSPPMPSGMESSPSPGPMPPAMAASPDSGAFNVRNNVVTLSCVVGVVAAHFLLV

SEQ ID NO: 21505 - DNA, 907 bp, Arabidopsis thaliana
  misc_feature (1)..(907): Ceres Seq. ID no. 13580583
  misc_feature (1)..(907): Ortholog of  Ceres SEQ ID NO 13638849 as cited in SEQ ID NO 52046
  misc_feature (1)..(907): Ortholog of  Ceres SEQ ID NO 13599613 as cited in SEQ ID NO 0
gatgacataccaaaagcaataccaaatgcaaacacaccacatgcagcaacaacaactccatcacttcgtctttgtccacggctcatgtcatggagcatggtgctggttcaaactagctgcaaagctcaagctcgatggtcaccgtgtgacagctatcgaccttggtggctccggtgtcgacacgaggcagctccatgaggttcgtttggtgtcggcgtatctagagcctttgatgagtttcatggagtctctccctgaaaacgagaaagtggttcttgttggtcatagctatggtggcattggaacttctcttgctatggaaaggtttccgaccaaagtctctgtcggaatcttcctctctgcttacatgccgcaccatgactctcctccggcggttttgattcaagagtattttacgagactaccagagggtttcgctatggactgtgagtttacattcgaggaaggattagaacacccaccaagttcagttttgttcggtactagtttcttgaaggagaaggcatatagtaattgccagttagaggatctagaattagccatggcgttgatgaaaccaagctagttatacactaaggaaatgggaggtgaagatctgataacaaaggagaggtatggatctgggaagagagtgtttattgtctgtgaaggcgacaatgtggttccagaggagattcagaagtggatgattagtaactacgagcctcacgaagttaagcggattgaagaagctggtcacatggctatgctcactaagcctcatgaactttctcaactgctacaagaaatagcagcgaaatataactaaatgtaaaatgatgacacctgtgtatgatttgggctcagttacatctatgatatgaataagagagtttcaatatttgtg

SEQ ID NO: 21506 - protein, 194 aa, Arabidopsis thaliana
  peptide (1)..(194): Ceres Seq. ID no. 13580584
MTYQKQYQMQTHHMQQQQLHHFVFVHGSCHGAWCWFKLAAKLKLDGHRVTAIDLGGSGVDTRQLHEVRLVSAYLEPLMSFMESLPENEKVVLVGHSYGGIGTSLAMERFPTKVSVGIFLSAYMPHHDSPPAVLIQEYFTRLPEGFAMDCEFTFEEGLEHPPSSVLFGTSFLKEKAYSNCQLEDLELAMALMKPS

SEQ ID NO: 21507 - protein, 186 aa, Arabidopsis thaliana
  peptide (1)..(186): Ceres Seq. ID no. 13580585
MQTHHMQQQQLHHFVFVHGSCHGAWCWFKLAAKLKLDGHRVTAIDLGGSGVDTRQLHEVRLVSAYLEPLMSFMESLPENEKVVLVGHSYGGIGTSLAMERFPTKVSVGIFLSAYMPHHDSPPAVLIQEYFTRLPEGFAMDCEFTFEEGLEHPPSSVLFGTSFLKEKAYSNCQLEDLELAMALMKPS

SEQ ID NO: 21508 - protein, 181 aa, Arabidopsis thaliana
  peptide (1)..(181): Ceres Seq. ID no. 13580586
MQQQQLHHFVFVHGSCHGAWCWFKLAAKLKLDGHRVTAIDLGGSGVDTRQLHEVRLVSAYLEPLMSFMESLPENEKVVLVGHSYGGIGTSLAMERFPTKVSVGIFLSAYMPHHDSPPAVLIQEYFTRLPEGFAMDCEFTFEEGLEHPPSSVLFGTSFLKEKAYSNCQLEDLELAMALMKPS

SEQ ID NO: 21509 - DNA, 688 bp, Arabidopsis thaliana
  misc_feature (1)..(688): Ceres Seq. ID no. 12420591
  misc_feature (1)..(688): Ortholog of  Ceres SEQ ID NO 13599232 as cited in SEQ ID NO 991
gagactcgctctaagacccagtttgactcgttgatcaacgaaagtgtgagtttgaggtgaaagatgacggcgacgatagatcggaggttatcaacgctgaatccaaacgcgccggtgtttgatccggtggaatttcgtgaggtggaggatttttcaccgaaatggtgggatctagtaacgacttcgaaatggttccgtgacttttggctcagtgctaactctgagaatgagttcctcggcggcgacgatttctcagttatggaagaagagttcgaggagatgatcgcatcgtctgatggtggatccatggctgatacagttacagaagcagatgtggctagttatttgaagatgcttttgaacatagcggagtctacgaaagagaagatttatagatcgaaggtttcgtcttgttcaccaaagtataatcagaagaagtacatgaatccgaactttaattgtcgccggaatcatcatatctatcagccacggtgaagcttctagaaggaacaaagctcttcttcttcttctttcgagatgataatcagagtcgtgtctgtgtttatggctgaatctgatcttttctgctttcttgttttttgtaattctgtgaatattcctactttctataataacatcactttatgttatgagcataaccaaattgaaatcgaaccaggtcgaatcc

SEQ ID NO: 21510 - protein, 143 aa, Arabidopsis thaliana
  peptide (1)..(143): Ceres Seq. ID no. 12420592
MTATIDRRLSTLNPNAPVFDPVEFREVEDFSPKWWDLVTTSKWFRDFWLSANSENEFLGGDDFSVMEEEFEEMIASSDGGSMADTVTEADVASYLKMLLNIAESTKEKIYRSKVSSCSPKYNQKKYMNPNFNCRRNHHIYQPR

SEQ ID NO: 21511 - protein, 78 aa, Arabidopsis thaliana
  peptide (1)..(78): Ceres Seq. ID no. 12420593
MEEEFEEMIASSDGGSMADTVTEADVASYLKMLLNIAESTKEKIYRSKVSSCSPKYNQKKYMNPNFNCRRNHHIYQPR

SEQ ID NO: 21512 - protein, 71 aa, Arabidopsis thaliana
  peptide (1)..(71): Ceres Seq. ID no. 12420594
MIASSDGGSMADTVTEADVASYLKMLLNIAESTKEKIYRSKVSSCSPKYNQKKYMNPNFNCRRNHHIYQPR

SEQ ID NO: 21513 - DNA, 627 bp, Arabidopsis thaliana
  misc_feature (1)..(627): Ceres Seq. ID no. 13496961
  misc_feature (1)..(627): Ortholog of  Ceres SEQ ID NO 14310057 as cited in SEQ ID NO 225
  misc_feature (1)..(627): Ortholog of  Ceres SEQ ID NO 15225572 as cited in SEQ ID NO 61651
attcttcaacagaattagggttacatgagcggactctatataaatctttttttgcctactacgagtcacaagtaagaagaaaaacatggagcaaacttttattatgatcaagcctgacggcgtccagagaggactcatcggtgaagtcatctgcagatttgagaagaagggtttcactttgaaaggtctgaagttgatcagtgtagagagatcttttgctgagaagcactacgaagacttatcttcaaagtctttcttcagtggacttgttgactacattgtatccggccctgttgttgctatgatctgggaaggaaagaatgttgtcttgaccggaagaaagatcattggagctaccaacccagcagcttctgagcctggaactatccgtggggactttgctattgacattggaaggaatgtgatccacggtagtgactctgtcgagagcgccagaaaggagattgctttgtggttccctgatggacctgtcaactggcagagcagcgttcacccttgggtctatgaaacttgatgatctgttgctttttcagtagtgtgttttctacattgcttgcttttgaacaagactgaaatattttaagttgaatttgattatccttctcc

SEQ ID NO: 21514 - protein, 149 aa, Arabidopsis thaliana
  peptide (1)..(149): Ceres Seq. ID no. 15223002
MEQTFIMIKPDGVQRGLIGEVICRFEKKGFTLKGLKLISVERSFAEKHYEDLSSKSFFSGLVDYIVSGPVVAMIWEGKNVVLTGRKIIGATNPAASEPGTIRGDFAIDIGRNVIHGSDSVESARKEIALWFPDGPVNWQSSVHPWVYET

SEQ ID NO: 21515 - protein, 143 aa, Arabidopsis thaliana
  peptide (1)..(143): Ceres Seq. ID no. 15223003
MIKPDGVQRGLIGEVICRFEKKGFTLKGLKLISVERSFAEKHYEDLSSKSFFSGLVDYIVSGPVVAMIWEGKNVVLTGRKIIGATNPAASEPGTIRGDFAIDIGRNVIHGSDSVESARKEIALWFPDGPVNWQSSVHPWVYET

SEQ ID NO: 21516 - protein, 77 aa, Arabidopsis thaliana
  peptide (1)..(77): Ceres Seq. ID no. 15223004
MIWEGKNVVLTGRKIIGATNPAASEPGTIRGDFAIDIGRNVIHGSDSVESARKEIALWFPDGPVNWQSSVHPWVYET

SEQ ID NO: 21517 - DNA, 1683 bp, Arabidopsis thaliana
  misc_feature (1)..(1683): Ceres Seq. ID no. 13621954
  misc_feature (1)..(1683): Ortholog of  Ceres SEQ ID NO 15176349 as cited in SEQ ID NO 58789
aaaatctatcaagggtttgccgtacaaaggtatcggaggagagagtaaagggtaaacaaaagagagactggtttacttcttcttcgtgtgcgtgtagctttttcctgcgattctcatcgagttttggttagtgctttgttatcaaggtgaaaatcgatttgaagatggcgagcgaaagtcctgatgttgctgttgtagctccggtggtggagaatggcggcgctgagtcctctaatggtaaagaggaacaattggaatctgagctttcgaagaagcttgagattgcagaagatggtcaagaggagaacgatggagaagaaggaagcaaagctgagacttcaacgaagaagaagaagaagaaaaataaaagcaagaagaagaaggaactccctcaacagactgatccaccttcaattcctgtcgttgagctcttcccatcaggagagtttcctgaaggtgaaatccaagagtataaggatgataatctttggagaacaacatctgaagagaagagagagctggagcgttttgaaaagccaatatataactctgttcgccgagctgcagaagttcatcgccaggttcgtaaatatgtcagaagcatagtgaagcctggaatgttgatgactgatatatgtgagaccctagagaatactgttcgtaagttgatatcagagaatggtcttcaagctggtattgcattccctacaggatgctctttgaattgggtcgctgctcattggacaccaaactctggagataagactgtacttcagtacgacgatgttatgaaattggactttggaacacatattgatgggcatattattgactgtgcatttacagttgccttcaaccctatgttcgatcctctcttagcagcctctcgtgaagctacgtataccggtatcaaggaagctgggatcgatgtccgtctctgtgatatcggtgctgctattcaggaggtcatggagtcttatgaggttgaaatcaacggaaaggtcttccaagttaaaagtatccgaaacttgaatggtcacagcattggaccctatcagatacatgctgggaaatctgttcctatcgtaaaaggaggcgagcagacaaagatggaagagggcgagttttatgccatcgaaacatttggatcaaccgggaaaggatatgtgagagaagacctagaatgtagccattacatgaagaactttgacgctggccacgtccccttgaggttgcctagagcaaaacaactccttgcaaccattaacaagaatttctcgactctcgccttctgcagacgttatttggaccgcattggtgaaaccaaatacttaatggctctaaagaatctttgtgactctggcattgttcagccgtatcctcctctgtgtgatgtgaaaggaagctatgtatcacagtttgaacacaccattttactgcgacctacttgcaaagaagttctctccaagggagacgactactgattcagatcctctgttttgctctgtttacctttatcatctcatactgttgtcgagattgtacacttgcttgtttcttttgtcgtcgttaacacaagctttgaatccttttataaaaagcttcagtgcctctgttaaaaaaaaactatgtatttgccatgaacatgaatttgctcatcaatcttactagaagttgattgat

SEQ ID NO: 21518 - protein, 439 aa, Arabidopsis thaliana
  peptide (1)..(439): Ceres Seq. ID no. 13621955
MASESPDVAVVAPVVENGGAESSNGKEEQLESELSKKLEIAEDGQEENDGEEGSKAETSTKKKKKKNKSKKKKELPQQTDPPSIPVVELFPSGEFPEGEIQEYKDDNLWRTTSEEKRELERFEKPIYNSVRRAAEVHRQVRKYVRSIVKPGMLMTDICETLENTVRKLISENGLQAGIAFPTGCSLNWVAAHWTPNSGDKTVLQYDDVMKLDFGTHIDGHIIDCAFTVAFNPMFDPLLAASREATYTGIKEAGIDVRLCDIGAAIQEVMESYEVEINGKVFQVKSIRNLNGHSIGPYQIHAGKSVPIVKGGEQTKMEEGEFYAIETFGSTGKGYVREDLECSHYMKNFDAGHVPLRLPRAKQLLATINKNFSTLAFCRRYLDRIGETKYLMALKNLCDSGIVQPYPPLCDVKGSYVSQFEHTILLRPTCKEVLSKGDDY

SEQ ID NO: 21519 - protein, 288 aa, Arabidopsis thaliana
  peptide (1)..(288): Ceres Seq. ID no. 13621956
MLMTDICETLENTVRKLISENGLQAGIAFPTGCSLNWVAAHWTPNSGDKTVLQYDDVMKLDFGTHIDGHIIDCAFTVAFNPMFDPLLAASREATYTGIKEAGIDVRLCDIGAAIQEVMESYEVEINGKVFQVKSIRNLNGHSIGPYQIHAGKSVPIVKGGEQTKMEEGEFYAIETFGSTGKGYVREDLECSHYMKNFDAGHVPLRLPRAKQLLATINKNFSTLAFCRRYLDRIGETKYLMALKNLCDSGIVQPYPPLCDVKGSYVSQFEHTILLRPTCKEVLSKGDDY

SEQ ID NO: 21520 - protein, 286 aa, Arabidopsis thaliana
  peptide (1)..(286): Ceres Seq. ID no. 13621957
MTDICETLENTVRKLISENGLQAGIAFPTGCSLNWVAAHWTPNSGDKTVLQYDDVMKLDFGTHIDGHIIDCAFTVAFNPMFDPLLAASREATYTGIKEAGIDVRLCDIGAAIQEVMESYEVEINGKVFQVKSIRNLNGHSIGPYQIHAGKSVPIVKGGEQTKMEEGEFYAIETFGSTGKGYVREDLECSHYMKNFDAGHVPLRLPRAKQLLATINKNFSTLAFCRRYLDRIGETKYLMALKNLCDSGIVQPYPPLCDVKGSYVSQFEHTILLRPTCKEVLSKGDDY

SEQ ID NO: 21521 - DNA, 923 bp, Arabidopsis thaliana
  misc_feature (1)..(923): Ceres Seq. ID no. 12328503
  misc_feature (1)..(923): Ortholog of  Ceres SEQ ID NO 13658584 as cited in SEQ ID NO 66428
  misc_feature (1)..(923): Ortholog of  Ceres SEQ ID NO 13596269 as cited in SEQ ID NO 67972
agctacgattgtgtgtttattattattgcaaccatttctctgctgtttcttcgtcgtttagcttcagaggacgacaatccggtaggcgagagagagagattaatcaatcggcgacctttttaattcgctcgtaattcgttttgattttcgtgtttttgcaacgaatttaacaacttctgtgtgtgtgggtgtgagtttcttaagagaagtcagaaacaatgattgggttgtttaaagtaaaggaaaagcaaagagaacaagctcaaaatgctactagaggaggagcttctgttaagaagcaatctgctggcgaacttcgtcttcacaaagatatatcagagttgaaccttcctagctcttgttcaatatcttttccaaatggcaaagatgatttgatgaactttgaagtatccattaaacctgatgatggatattaccacaatggtacgtttgttttcacattccaagtctctcctgtgtatccacatgaagctccaaaagttaaatgcaaaaccaaggtttatcatcccaatatcgatttggaaggaaacgtttgcctgaacatcttgcgtgaagattggaaacctgttcttaacattaacacagttatctacggactcttccatctgttcacggaacccaattctgaagatcccttgaaccatgatgctgcagcagttttgagggataacccaaagctctttgagaccaatgttcgcagggccatgaccggtggatatgtcggtcagacctttttcccgcgttgtatctaacaaagctctggtttgtcttcttcaaggaaaaagataagaaccaaaccctttgtccgccattgtatttcttctctttctcaaggaccctcgtttgtttgtttgatcttgtaaaattacattccgcgttaaagtaaccctttccttatatcc

SEQ ID NO: 21522 - protein, 184 aa, Arabidopsis thaliana
  peptide (1)..(184): Ceres Seq. ID no. 12328504
MIGLFKVKEKQREQAQNATRGGASVKKQSAGELRLHKDISELNLPSSCSISFPNGKDDLMNFEVSIKPDDGYYHNGTFVFTFQVSPVYPHEAPKVKCKTKVYHPNIDLEGNVCLNILREDWKPVLNINTVIYGLFHLFTEPNSEDPLNHDAAAVLRDNPKLFETNVRRAMTGGYVGQTFFPRCI

SEQ ID NO: 21523 - protein, 125 aa, Arabidopsis thaliana
  peptide (1)..(125): Ceres Seq. ID no. 12328505
MNFEVSIKPDDGYYHNGTFVFTFQVSPVYPHEAPKVKCKTKVYHPNIDLEGNVCLNILREDWKPVLNINTVIYGLFHLFTEPNSEDPLNHDAAAVLRDNPKLFETNVRRAMTGGYVGQTFFPRCI

SEQ ID NO: 21524 - DNA, 877 bp, Arabidopsis thaliana
  misc_feature (1)..(877): Ceres Seq. ID no. 12333370
  misc_feature (1)..(877): Ortholog of  Ceres SEQ ID NO 13638567 as cited in SEQ ID NO 51303
  misc_feature (1)..(877): Ortholog of  Ceres SEQ ID NO 14301396 as cited in SEQ ID NO 51789
  misc_feature (1)..(877): Ortholog of  Ceres SEQ ID NO 12610031 as cited in SEQ ID NO 55811
  misc_feature (1)..(877): Ortholog of  Ceres SEQ ID NO 12610896 as cited in SEQ ID NO 55861
  misc_feature (1)..(877): Ortholog of  Ceres SEQ ID NO 12619664 as cited in SEQ ID NO 66048
  misc_feature (1)..(877): Ortholog of  Ceres SEQ ID NO 12635952 as cited in SEQ ID NO 0
actcaacaaagcttaaccataaactgtgagtaaaaaagagaagaaagaaaaatggtgctaaaggtgtacggacctcactttgcttcaccaaagagagctttggtcacactgatcgagaagggcgttgccttcgagaccatccccgtcgatctcatgaaaggagaacacaagcagcctgcttatctcgctctacagccttttggtactgttcctgctgttgttgacggtgactacaaaatcttcgagtcccgtgcggtgatgaggtacgtagctgagaagtacaggtcacaaggacctgatcttttggggaaaaccgttgaagacagaggtcaagttgaacaatggcttgatgtggaagcgaccacttaccacccaccgctattgaacttaacgcttcacataatgttcgcatcagtcatgggattcccatctgatgagaagctgatcaaggagagtgaagagaagcttgcgggtgttcttgatgtctacgaggcacatctctcaaagagcaagtacttggccggtgacttcgtgagcttggctgatttggctcacctcccgttcactgattacttggttggtccgattgggaaagcttacatgatcaaagataggaaacacgtgagcgcgtggtgggatgatattagcagccgtcctgcgtggaaggagactgttgccaagtattcattcccagcttaagatgtgttcatcttcttggtgatgtggtttgtgttttatgagaggtttaataaaagtggaactaaatgtacctcttaatgtaatgttgccacctctgtgttctctttccttttgtagtttaataagtatctttatggctttgtgaggctttcaattttaaggaaatgatcttttcccc

SEQ ID NO: 21525 - protein, 215 aa, Arabidopsis thaliana
  peptide (1)..(215): Ceres Seq. ID no. 12333371
MVLKVYGPHFASPKRALVTLIEKGVAFETIPVDLMKGEHKQPAYLALQPFGTVPAVVDGDYKIFESRAVMRYVAEKYRSQGPDLLGKTVEDRGQVEQWLDVEATTYHPPLLNLTLHIMFASVMGFPSDEKLIKESEEKLAGVLDVYEAHLSKSKYLAGDFVSLADLAHLPFTDYLVGPIGKAYMIKDRKHVSAWWDDISSRPAWKETVAKYSFPA

SEQ ID NO: 21526 - protein, 181 aa, Arabidopsis thaliana
  peptide (1)..(181): Ceres Seq. ID no. 12333372
MKGEHKQPAYLALQPFGTVPAVVDGDYKIFESRAVMRYVAEKYRSQGPDLLGKTVEDRGQVEQWLDVEATTYHPPLLNLTLHIMFASVMGFPSDEKLIKESEEKLAGVLDVYEAHLSKSKYLAGDFVSLADLAHLPFTDYLVGPIGKAYMIKDRKHVSAWWDDISSRPAWKETVAKYSFPA

SEQ ID NO: 21527 - protein, 146 aa, Arabidopsis thaliana
  peptide (1)..(146): Ceres Seq. ID no. 12333373
MRYVAEKYRSQGPDLLGKTVEDRGQVEQWLDVEATTYHPPLLNLTLHIMFASVMGFPSDEKLIKESEEKLAGVLDVYEAHLSKSKYLAGDFVSLADLAHLPFTDYLVGPIGKAYMIKDRKHVSAWWDDISSRPAWKETVAKYSFPA

SEQ ID NO: 21528 - DNA, 1577 bp, Arabidopsis thaliana
  misc_feature (1)..(1577): Ceres Seq. ID no. 12575042
  misc_feature (1)..(1577): Ortholog of  Ceres SEQ ID NO 13597656 as cited in SEQ ID NO 65561
gaaacttcatctctgccgtcttaagaagattttgccagtgcgggaagcggcggagattgagagattagcgacgatggaggaaagcaaacagaactatgacctgacgccactaatagcgcctaacctggacagacacttggtgtttcctatattcgagttccttcaagagcgtcagctttaccctgatgagcagatcctgaagtctaaaatccagcttttgaaccagacgaacatggttgattacgccatggatattcacaagagtctctaccacactgaagacgctcctcaagaaatggtggagagaagaacagaggttgtcgctaggctcaaatctttggaggaggctgctgcaccactcgtgtcttttcttttgaaccctaacgctgtgcaggagctaagagctgacaagcagtacaatctccaaatgctcaaggaacgctaccagattggtccagaccagattgaggctttgtaccagtacgccaagtttcagtttgaatgtggcaactattctggtgctgctgattatctttaccagtacaggaccctgtgctctaaccttgagaggagtttgagtgccttgtggggaaagctcgcatctgaaatattgatgcaaaactgggatattgctcttgaagagcttaaccgtctcaaagagattattgactcaaagagtttttcatcgccgttaaaccaggtgcagaacaggatttggttgatgcattggggtctgtatatcttttttaaccatgataatggaaggacacagatcattgatctttttaaccaagacaagtatctgaatgccatccaaactagtgctccacacttgctgcgctacttggcaactgctttcattgtcaacaaaaggagaagaccacaattgaaagaattcattaaggtcattcagcaagagcactactcctacaaagatccaattatcgagttcctggcatgtgtgtttgtcaattatgactttgatggggctcaaaagaagatgaaagagtgtgaagaggtcattgtgaatgatccattccttggcaagcgagttgaggatggaaacttttcaactgtaccactgagagatgaatttcttgaaaatgcccgcctattcgtctttgaaacctattgcaaaattcatcaaaggattgacatgggggtacttgctgaaaaattgaatctgaactatgaggaggccgagagatggattgtgaacctaatccgcacctcaaagcttgatgccaagattgattctgagtcaggaactgtaatcatggagcctactcagcccaacgtgcatgagcagttgataaaccacaccaaaggcttatcaggacgaacatacaagttagtgaatcagctcttggaacacacacaggcgcaagcaactcgctagtcaaaattttgctgtggaagcctttccttgataaaactcaccttcggttgactggaattattttctttttcttgctctgagttcaccttttactttgaaaaagattattatggagttgttctatttgaaatgttggatccacagattggaacattttccaaccaaatcagcattttgt

SEQ ID NO: 21529 - protein, 465 aa, Arabidopsis thaliana
  peptide (1)..(465): Ceres Seq. ID no. 12575043
KLHLCRLKKILPVREAAEIERLATMEESKQNYDLTPLIAPNLDRHLVFPIFEFLQERQLYPDEQILKSKIQLLNQTNMVDYAMDIHKSLYHTEDAPQEMVERRTEVVARLKSLEEAAAPLVSFLLNPNAVQELRADKQYNLQMLKERYQIGPDQIEALYQYAKFQFECGNYSGAADYLYQYRTLCSNLERSLSALWGKLASEILMQNWDIALEELNRLKEIIDSKSFSSPLNQVQNRIWLMHWGLYIFFNHDNGRTQIIDLFNQDKYLNAIQTSAPHLLRYLATAFIVNKRRRPQLKEFIKVIQQEHYSYKDPIIEFLACVFVNYDFDGAQKKMKECEEVIVNDPFLGKRVEDGNFSTVPLRDEFLENARLFVFETYCKIHQRIDMGVLAEKLNLNYEEAERWIVNLIRTSKLDAKIDSESGTVIMEPTQPNVHEQLINHTKGLSGRTYKLVNQLLEHTQAQATR

SEQ ID NO: 21530 - protein, 441 aa, Arabidopsis thaliana
  peptide (1)..(441): Ceres Seq. ID no. 12575044
MEESKQNYDLTPLIAPNLDRHLVFPIFEFLQERQLYPDEQILKSKIQLLNQTNMVDYAMDIHKSLYHTEDAPQEMVERRTEVVARLKSLEEAAAPLVSFLLNPNAVQELRADKQYNLQMLKERYQIGPDQIEALYQYAKFQFECGNYSGAADYLYQYRTLCSNLERSLSALWGKLASEILMQNWDIALEELNRLKEIIDSKSFSSPLNQVQNRIWLMHWGLYIFFNHDNGRTQIIDLFNQDKYLNAIQTSAPHLLRYLATAFIVNKRRRPQLKEFIKVIQQEHYSYKDPIIEFLACVFVNYDFDGAQKKMKECEEVIVNDPFLGKRVEDGNFSTVPLRDEFLENARLFVFETYCKIHQRIDMGVLAEKLNLNYEEAERWIVNLIRTSKLDAKIDSESGTVIMEPTQPNVHEQLINHTKGLSGRTYKLVNQLLEHTQAQATR

SEQ ID NO: 21531 - protein, 388 aa, Arabidopsis thaliana
  peptide (1)..(388): Ceres Seq. ID no. 12575045
MVDYAMDIHKSLYHTEDAPQEMVERRTEVVARLKSLEEAAAPLVSFLLNPNAVQELRADKQYNLQMLKERYQIGPDQIEALYQYAKFQFECGNYSGAADYLYQYRTLCSNLERSLSALWGKLASEILMQNWDIALEELNRLKEIIDSKSFSSPLNQVQNRIWLMHWGLYIFFNHDNGRTQIIDLFNQDKYLNAIQTSAPHLLRYLATAFIVNKRRRPQLKEFIKVIQQEHYSYKDPIIEFLACVFVNYDFDGAQKKMKECEEVIVNDPFLGKRVEDGNFSTVPLRDEFLENARLFVFETYCKIHQRIDMGVLAEKLNLNYEEAERWIVNLIRTSKLDAKIDSESGTVIMEPTQPNVHEQLINHTKGLSGRTYKLVNQLLEHTQAQATR

SEQ ID NO: 21532 - DNA, 658 bp, Arabidopsis thaliana
  misc_feature (1)..(658): Ceres Seq. ID no. 12331893
  misc_feature (1)..(658): Ortholog of  Ceres SEQ ID NO 13599287 as cited in SEQ ID NO 338
tttcccagtgagaaatggcgacgaaggaaccagaatctgtttacgagttaagcatcgaggatgcaaaagggaacaacttagcactcagtcaatacaaagacaaagttcttttaattgtcaatgttgcttccaaatgtgggatgacaaactcaaactacactgaattgaatgagctttacaacaggtataaagataaaggtctggagattctagcatttccttgtaaccagtttggtgacgaggaaccgggaactaatgaccaaattactgactttgtttgtactcgcttcaaatctgaattccccattttcaacaagattgaagtaaacggagagaatgcttctcctctgtataagttcctgaagaaaggcaaatggggaatcttcggcgatgacattcaatggaactttgctaagtttcttgttgacaaaaacggtcaagctgtacaacgttattatccaactacttcccctcttacacttgagcatgacataaagaatcttctgaatatctcctgaatgatgaagctttgttgctgaatcgtattgtatttgattatgaacctctctcattcaataaagagccatgacattgacttggattgattagttctgtttgagagccaaatcggttatttagataaaccagcattattatc

SEQ ID NO: 21533 - protein, 167 aa, Arabidopsis thaliana
  peptide (1)..(167): Ceres Seq. ID no. 12331894
MATKEPESVYELSIEDAKGNNLALSQYKDKVLLIVNVASKCGMTNSNYTELNELYNRYKDKGLEILAFPCNQFGDEEPGTNDQITDFVCTRFKSEFPIFNKIEVNGENASPLYKFLKKGKWGIFGDDIQWNFAKFLVDKNGQAVQRYYPTTSPLTLEHDIKNLLNIS

SEQ ID NO: 21534 - protein, 125 aa, Arabidopsis thaliana
  peptide (1)..(125): Ceres Seq. ID no. 12331895
MTNSNYTELNELYNRYKDKGLEILAFPCNQFGDEEPGTNDQITDFVCTRFKSEFPIFNKIEVNGENASPLYKFLKKGKWGIFGDDIQWNFAKFLVDKNGQAVQRYYPTTSPLTLEHDIKNLLNIS

SEQ ID NO: 21535 - DNA, 1018 bp, Arabidopsis thaliana
  misc_feature (1)..(1018): Ceres Seq. ID no. 13490011
  misc_feature (1)..(1018): Ortholog of  Ceres SEQ ID NO 14313014 as cited in SEQ ID NO 54841
  misc_feature (1)..(1018): Ortholog of  Ceres SEQ ID NO 14316091 as cited in SEQ ID NO 57622
  misc_feature (1)..(1018): Ortholog of  Ceres SEQ ID NO 13639317 as cited in SEQ ID NO 59781
  misc_feature (1)..(1018): Ortholog of  Ceres SEQ ID NO 13654578 as cited in SEQ ID NO 68583
attacttaacccaaaccaaaaaaataaaaagttcatttcgaaagaagaagaagaaaacatcaaatcatgagtgggcaagagaatcatgatcatggccggatctcttctacgcccgccgccgcgtcggagccttccaaggctgctgctcactcctctgactacgctccttaccctaagctcgatcctaccgacgtcactcctcctcctcctcagcctattcccaccggtgccgccgcaaccaccatgccagcggaatccaatccttacgtttctccttcccctgccccaaggaatacgatggattcggtgaaggatacgttagggaaatgggggaaaatggctgccgacgccaccaagaaggcggaggatctcgccggaaatttttggcagcacttgaaaacaggcccaagtgtagcagatgctgctgtttcacgaattgctcaggggacaaaaatacttgcagagggtggatacgagaaggtcttcaagcaaacatttgattgccttcctgatgaaaaacttctcaagacctatgcttgctacttgtctacatctgctggtcctgtcctgggagttatgtatctttcgactcacaagcttgcgttctctagtgacaatcctctctcttacaaagagggtgagcagaccctgtggagctattacaaggtggtacttccggcgaatcagctgaaggcagtgaacccatcaacaagtagagtgaacacatctgataaatacatacaagtgatttccatcgacaaccacgagttctggtttatggggtttgtgacttatgaaagcgctgtgaagagccttcaagaagcggtgcagtcacatggtccgtgaaggtccactggtataaatggcagctcttagtgatattgtgcattaatatatggaacagtgtgttttagtatttgataccatttcaatgtgttctacattttgtcctcttggcgtttactcataaacattgcttttgttcatttccttttgtataaaattatttcttattttt

SEQ ID NO: 21536 - protein, 259 aa, Arabidopsis thaliana
  peptide (1)..(259): Ceres Seq. ID no. 13490012
MSGQENHDHGRISSTPAAASEPSKAAAHSSDYAPYPKLDPTDVTPPPPQPIPTGAAATTMPAESNPYVSPSPAPRNTMDSVKDTLGKWGKMAADATKKAEDLAGNFWQHLKTGPSVADAAVSRIAQGTKILAEGGYEKVFKQTFDCLPDEKLLKTYACYLSTSAGPVLGVMYLSTHKLAFSSDNPLSYKEGEQTLWSYYKVVLPANQLKAVNPSTSRVNTSDKYIQVISIDNHEFWFMGFVTYESAVKSLQEAVQSHGP

SEQ ID NO: 21537 - protein, 200 aa, Arabidopsis thaliana
  peptide (1)..(200): Ceres Seq. ID no. 13490013
MPAESNPYVSPSPAPRNTMDSVKDTLGKWGKMAADATKKAEDLAGNFWQHLKTGPSVADAAVSRIAQGTKILAEGGYEKVFKQTFDCLPDEKLLKTYACYLSTSAGPVLGVMYLSTHKLAFSSDNPLSYKEGEQTLWSYYKVVLPANQLKAVNPSTSRVNTSDKYIQVISIDNHEFWFMGFVTYESAVKSLQEAVQSHGP

SEQ ID NO: 21538 - protein, 182 aa, Arabidopsis thaliana
  peptide (1)..(182): Ceres Seq. ID no. 13490014
MDSVKDTLGKWGKMAADATKKAEDLAGNFWQHLKTGPSVADAAVSRIAQGTKILAEGGYEKVFKQTFDCLPDEKLLKTYACYLSTSAGPVLGVMYLSTHKLAFSSDNPLSYKEGEQTLWSYYKVVLPANQLKAVNPSTSRVNTSDKYIQVISIDNHEFWFMGFVTYESAVKSLQEAVQSHGP

SEQ ID NO: 21539 - DNA, 871 bp, Arabidopsis thaliana
  misc_feature (1)..(871): Ceres Seq. ID no. 12561955
  misc_feature (1)..(871): Ortholog of  Ceres SEQ ID NO 13596601 as cited in SEQ ID NO 62486
aaaataaagatatgatggatctgttactaaaacaaagtcgctttattcagatctgaagaagaagaagaagaagaagaaacatagttgaagtctctgttaatatgtcttcaacaacaacagattctacagaattgcaaaatctgatcaaactgtttcaaaattgcgaaactcagcctcgtcaacattttcctgcaaaatcttcagctgtattagtttgtctataccaagaacaaagagaagacaaaaacgagctacgcgtaatcttaaccaaacgctccactactctctcttctcatcctggggaagtagcattgcctggaggaaaaagagaccaagaagataaagatgacatagctactgcgttgagagaagctcgtgaagagatcggtttagatccttctcttgttacaatcatttctgttcttgaaccatttgttaacaagaagggaatgtcggtagcaccagttatcggtattctacacgataagaaagcgtttaatccgttaccaaatccagctgaagtggaagagatctttgatgtgccattagagatgttcctcaaggacaagaacaggcgagcagaggaacgagagcatgaaggagagagatatcttcttcagtactttgattactattccgaagataaagagagaaactttaccatatgggcactcactgctggtattctgatcagagttgcctccattgtttatcagagattaccgaagtttcaagaacgtaagccgagtttctggaatcagcctaactgattcttgacttgatctgattgagaaaaatgaaactttcatgtataataagcgatacaaatcgaatcttctttaaatgtgtttcaagaatctatctttactcc

SEQ ID NO: 21540 - protein, 222 aa, Arabidopsis thaliana
  peptide (1)..(222): Ceres Seq. ID no. 12561956
MSSTTTDSTELQNLIKLFQNCETQPRQHFPAKSSAVLVCLYQEQREDKNELRVILTKRSTTLSSHPGEVALPGGKRDQEDKDDIATALREAREEIGLDPSLVTIISVLEPFVNKKGMSVAPVIGILHDKKAFNPLPNPAEVEEIFDVPLEMFLKDKNRRAEEREHEGERYLLQYFDYYSEDKERNFTIWALTAGILIRVASIVYQRLPKFQERKPSFWNQPN

SEQ ID NO: 21541 - DNA, 719 bp, Arabidopsis thaliana
  misc_feature (1)..(719): Ceres Seq. ID no. 12329455
  misc_feature (1)..(719): Ortholog of  Ceres SEQ ID NO 14309653 as cited in SEQ ID NO 0
aagcctaagttatcattcagaatattcaagctgagaaagtcgtagcctctaaaaccctaatcctctctgaaaccctagacatcgcagctgaaaatgaccggagaagtcgtcaaccctaaagcgtatccgcttgcagattctcagttatcgataacaattcttgacctcgttcaacaagctactaactacaagcagctcaagaagggtgctaatgaagctacgaagactcttaatcgtggaatctccgagtttgttgtcatggctgcagatgctgagcctctagagattcttcttcatcttcccctacttgctgaggataagaatgttccttatgtctttgtgccttcaaagcaagccttgggaagagcctgtggtgtgactagacctgttatcgcttgttcagtcacatctaacgaagctagtcaattgaaatcacagattcaacatctcaaggatgctattgagaagcttctgatctaaggcattctctgaattgattgctcggtatgatgggtctccgcgaatgggaaggctttgactgaagttttgtttaggcaactaccaaatcaaaaaccgtccattattctactatcttctcttcaagtttgtaacgtaattcacttttctgcaacttggtttcttaagaatttgtgttggtttctggttttggtttgtagcgaatcattgtgttatttataagaacttgttttgatatctat

SEQ ID NO: 21542 - protein, 128 aa, Arabidopsis thaliana
  peptide (1)..(128): Ceres Seq. ID no. 12329456
MTGEVVNPKAYPLADSQLSITILDLVQQATNYKQLKKGANEATKTLNRGISEFVVMAADAEPLEILLHLPLLAEDKNVPYVFVPSKQALGRACGVTRPVIACSVTSNEASQLKSQIQHLKDAIEKLLI

SEQ ID NO: 21543 - protein, 73 aa, Arabidopsis thaliana
  peptide (1)..(73): Ceres Seq. ID no. 12329457
MAADAEPLEILLHLPLLAEDKNVPYVFVPSKQALGRACGVTRPVIACSVTSNEASQLKSQIQHLKDAIEKLLI

SEQ ID NO: 21544 - DNA, 1018 bp, Arabidopsis thaliana
  misc_feature (1)..(1018): Ceres Seq. ID no. 12602461
  misc_feature (1)..(1018): Ortholog of  Ceres SEQ ID NO 14304626 as cited in SEQ ID NO 52955
ataattagatctatgtttttaaattgcaaaaaaaaagtgtacaaagagcgtgaaatccgcggtggcttggacccctcccgagtcctcaacacgatataagacactttcttctctaatctccatcacctcttattttcatctgcttttgaatttcaaaccttcacataaaaaaaatacttttgaatccgtgtttcattcatcgaatctttttccgataactatggctgaggaaatcaagaatgttcctgaacaggaggtgccaaaggtagcaacagaggaatcatcggcagaggttacagatcgtggattgttcgatttcttgggaaagaagaaagacgaaacaaaaccagaggagactccgatcgcttcagagtttgagcagaaggttcatatttcagagccggagccagaggttaaacacgaaagtcttcttgaaaagcttcaccgaagcgacagttcttctagctcctcaagtgaggaagaaggttcagatggtgagaagaggaagaagaagaaggagaagaagaagccaactactgaagttgaggtaaaggaggaagagaagaaagggtttatggagaagttgaaagagaagcttcctggacacaagaaacctgaagacggttcagccgtcgctgcggcaccggtggttgttcctcctcctgtggaagaagcgcatccagtggagaagaaagggattcttgagaagattaaggagaagcttccaggataccaccctaagaccaccgtagaggaggagaagaaagataaagaataagaagattatcattaaagatattaagaataatgatggttgatttgctttgtttttttttttttttattgtgatgattgatcatcttttgcttttgtgatgtgtaagtttgttggcttttttgttgattacaatttcttattttctcttgtatatggtttttaaaaacaaaagatctcaaggtattttaatggtatgaatattttcatttgattaagtgatatggatgatataattttatgt

SEQ ID NO: 21545 - protein, 185 aa, Arabidopsis thaliana [sequence omitted]

SEQ ID NO: 21546 - DNA, 2920 bp, Arabidopsis thaliana
  misc_feature (1)..(2920): Ceres Seq. ID no. 12600069
  misc_feature (1)..(2920): Ortholog of  Ceres SEQ ID NO 15172491 as cited in SEQ ID NO 58719
ccctctctttctcatctctctgcgcctaacgtcgcttacggaagaagacgaaaattttgaacagaagctctctctctctatctctctatctctctatctctaacgctattcgatgtgcgtaaattagggttcttcactcgtcggatctgattgtatattgtgaaaatctcagatctcagatctcttatctaacaccgttgcgtgtcttcgtttccttctgattttgaaggaggtgaagcaaagtcgggagctgtacatttccgctttcatgttctgtgttgaatccgaattctctccacattagttgtttttacagatctccgaagttggctcctcaaagaagatcacagcgcctcatgggcggccaaatgcagcaaaacaatgctgcggctgcgacggcgctttacgatggggctttacccactaatgacgcaggagatgcagtcatggcacggtggcttcaatccgctggtttgcagcatttggcgtctcctgttgcttctacaggcaatgatcagcgtcacctcccaaaccttctcatgcagggttatggagctcagactgctgaagagaaacaaagactgttccaactaatgagaaatctcaattttaatggggagtcgacttctgaatcatatacaccaactgctcacacatcagcagctatgccctcttcggaaggatttttttcacctgagttcagaggtgattttggagcaggattattggatcttcatgcaatggatgatacagagcttctatctgagcatgtgattaccgaaccctttgagccgtcacctttcatgcctagtgtaaataaagaatttgaagaagactataatttggcagctaatcgtcaacagcggcaacagacagaagctgaacctttgggtttattgcctaaaagtgataaagaaaataacagtgtagccaagattaaagtagtggtaaggaaaagacccctaaacaagaaagaaacagctaaaaaggaggaggatgtcgtgacggtatctgataattctttgactgtccatgagcccagagtgaaggttgatttgactgcttatgtggaaaagcatgagttctgctttgatgctgttctagatgaggatgtttcaaatgacgaggtgtatcgggccacaattgagccaataattcccattattttccagagaactaaagctacatgctttgcatatggccaaacaggtagtggtaagacatttacaatgaaaccattacctatacgagcagttgaagatcttatgaggttgttgcgtcaaccagtatacagcaatcagaggtttaaattgtggctcagctattttgagatatatggtggaaagctgttcgatcttctcagtgagagaaagaaactttgcatgcgagaagatggtagacagcaagtttgcattgttggcctgcaagaatatgaagtttcagatgtacaaattgtaaaggattttatcgagaaaggaaatgccgaaaggagcacaggttcaactggagcaaatgaggaatcttctagatcgcatgccatcctacagcttgttgtaaaaaagcatgttgaggtaaaagacactagacggaggaataatgatagtaatgaattgcctgggaaagttgtgggaaagatttctttcattgaccttgctggcagtgaaagaggtgcagacaccacagacaatgatcgccagacaaggattgaaggcgcagaaatcaacaagagtctcttggctcttaaggaatgtatacgtgcactggacaatgaccagctacatataccatttcgtggaagcaaactaacggaagtgctccgtgactcatttgttggaaactcaagaacggtgatgatttcctgcatctctccaaatgcaggatcgtgtgaacataccctcaatactctaagatatgctgatcgagtcaaaagtctatctaaaagtggaaatagcaagaaagatcaaactgcgaattcaatgcctccggttaataaggatcctttgttgggcccaaatgatgtagaagatgtctttgagcctccacaggaagtgaatgtaccagaaaccaggaggagggtggtcgagaaggacagcaacagcagtacgtcgggtattgacttcagacagcctacaaattatcgagaggaaagtggaatcccatcattctcaatggacaagggaagatcagagccgaacagttcttttgctggctccactagtcagagaaacaacatttcttcatatccccaagaaacttcagaccgtgaagagaaagtaaagaaagtgtcaccacctcgtgggaaagggttgcgggaagaaaaaccagacagaccacaaaattggtctaaaagagatgtcagttcgtcggatatccctaccttgacaaattttagacagaacgcaagtgaaactgcttcaaggcaatatgaaaccgcttcaaggcaatatgaaaccgacccttcgcttgatgaaaacctcgatgcactgcttgaggaagaagaagctctgattgcagcgcacagaaaagaaattgaggatacaatggagattgttcgcgaggaaatgaaacttctagcggaggtggaccaaccgggaagcatgatagaaaactatgtgacgcaactgagctttgtgttgtcccggaaagcagcagggctagtcagtcttcaagccaggcttgctcggttccaacaccgtctcaaggaacaagaaatactgagccgtaagagagttcctcggtagttggtagaagaaggaaaaccaaaagtgtggtgttgtttaagtgtgaaaggttggttgggtgatctcttcttatatatgacaaagaatgacagaaatgtccttcatgtttgtgaatttgggcatttctttccttttatttttgaatctttattataaagttataccttttgtgtttctta

SEQ ID NO: 21547 - protein, 794 aa, Arabidopsis thaliana
  peptide (1)..(794): Ceres Seq. ID no. 12600070
MGGQMQQNNAAAATALYDGALPTNDAGDAVMARWLQSAGLQHLASPVASTGNDQRHLPNLLMQGYGAQTAEEKQRLFQLMRNLNFNGESTSESYTPTAHTSAAMPSSEGFFSPEFRGDFGAGLLDLHAMDDTELLSEHVITEPFEPSPFMPSVNKEFEEDYNLAANRQQRQQTEAEPLGLLPKSDKENNSVAKIKVVVRKRPLNKKETAKKEEDVVTVSDNSLTVHEPRVKVDLTAYVEKHEFCFDAVLDEDVSNDEVYRATIEPIIPIIFQRTKATCFAYGQTGSGKTFTMKPLPIRAVEDLMRLLRQPVYSNQRFKLWLSYFEIYGGKLFDLLSERKKLCMREDGRQQVCIVGLQEYEVSDVQIVKDFIEKGNAERSTGSTGANEESSRSHAILQLVVKKHVEVKDTRRRNNDSNELPGKVVGKISFIDLAGSERGADTTDNDRQTRIEGAEINKSLLALKECIRALDNDQLHIPFRGSKLTEVLRDSFVGNSRTVMISCISPNAGSCEHTLNTLRYADRVKSLSKSGNSKKDQTANSMPPVNKDPLLGPNDVEDVFEPPQEVNVPETRRRVVEKDSNSSTSGIDFRQPTNYREESGIPSFSMDKGRSEPNSSFAGSTSQRNNISSYPQETSDREEKVKKVSPPRGKGLREEKPDRPQNWSKRDVSSSDIPTLTNFRQNASETASRQYETASRQYETDPSLDENLDALLEEEEALIAAHRKEIEDTMEIVREEMKLLAEVDQPGSMIENYVTQLSFVLSRKAAGLVSLQARLARFQHRLKEQEILSRKRVPR

SEQ ID NO: 21548 - protein, 790 aa, Arabidopsis thaliana
  peptide (1)..(790): Ceres Seq. ID no. 12600071
MQQNNAAAATALYDGALPTNDAGDAVMARWLQSAGLQHLASPVASTGNDQRHLPNLLMQGYGAQTAEEKQRLFQLMRNLNFNGESTSESYTPTAHTSAAMPSSEGFFSPEFRGDFGAGLLDLHAMDDTELLSEHVITEPFEPSPFMPSVNKEFEEDYNLAANRQQRQQTEAEPLGLLPKSDKENNSVAKIKVVVRKRPLNKKETAKKEEDVVTVSDNSLTVHEPRVKVDLTAYVEKHEFCFDAVLDEDVSNDEVYRATIEPIIPIIFQRTKATCFAYGQTGSGKTFTMKPLPIRAVEDLMRLLRQPVYSNQRFKLWLSYFEIYGGKLFDLLSERKKLCMREDGRQQVCIVGLQEYEVSDVQIVKDFIEKGNAERSTGSTGANEESSRSHAILQLVVKKHVEVKDTRRRNNDSNELPGKVVGKISFIDLAGSERGADTTDNDRQTRIEGAEINKSLLALKECIRALDNDQLHIPFRGSKLTEVLRDSFVGNSRTVMISCISPNAGSCEHTLNTLRYADRVKSLSKSGNSKKDQTANSMPPVNKDPLLGPNDVEDVFEPPQEVNVPETRRRVVEKDSNSSTSGIDFRQPTNYREESGIPSFSMDKGRSEPNSSFAGSTSQRNNISSYPQETSDREEKVKKVSPPRGKGLREEKPDRPQNWSKRDVSSSDIPTLTNFRQNASETASRQYETASRQYETDPSLDENLDALLEEEEALIAAHRKEIEDTMEIVREEMKLLAEVDQPGSMIENYVTQLSFVLSRKAAGLVSLQARLARFQHRLKEQEILSRKRVPR

SEQ ID NO: 21549 - protein, 764 aa, Arabidopsis thaliana
  peptide (1)..(764): Ceres Seq. ID no. 12600072
MARWLQSAGLQHLASPVASTGNDQRHLPNLLMQGYGAQTAEEKQRLFQLMRNLNFNGESTSESYTPTAHTSAAMPSSEGFFSPEFRGDFGAGLLDLHAMDDTELLSEHVITEPFEPSPFMPSVNKEFEEDYNLAANRQQRQQTEAEPLGLLPKSDKENNSVAKIKVVVRKRPLNKKETAKKEEDVVTVSDNSLTVHEPRVKVDLTAYVEKHEFCFDAVLDEDVSNDEVYRATIEPIIPIIFQRTKATCFAYGQTGSGKTFTMKPLPIRAVEDLMRLLRQPVYSNQRFKLWLSYFEIYGGKLFDLLSERKKLCMREDGRQQVCIVGLQEYEVSDVQIVKDFIEKGNAERSTGSTGANEESSRSHAILQLVVKKHVEVKDTRRRNNDSNELPGKVVGKISFIDLAGSERGADTTDNDRQTRIEGAEINKSLLALKECIRALDNDQLHIPFRGSKLTEVLRDSFVGNSRTVMISCISPNAGSCEHTLNTLRYADRVKSLSKSGNSKKDQTANSMPPVNKDPLLGPNDVEDVFEPPQEVNVPETRRRVVEKDSNSSTSGIDFRQPTNYREESGIPSFSMDKGRSEPNSSFAGSTSQRNNISSYPQETSDREEKVKKVSPPRGKGLREEKPDRPQNWSKRDVSSSDIPTLTNFRQNASETASRQYETASRQYETDPSLDENLDALLEEEEALIAAHRKEIEDTMEIVREEMKLLAEVDQPGSMIENYVTQLSFVLSRKAAGLVSLQARLARFQHRLKEQEILSRKRVPR

SEQ ID NO: 21550 - DNA, 844 bp, Arabidopsis thaliana
  misc_feature (1)..(844): Ceres Seq. ID no. 12604767
  misc_feature (1)..(844): Ortholog of  Ceres SEQ ID NO 12557850 as cited in SEQ ID NO 65
  misc_feature (1)..(844): Ortholog of  Ceres SEQ ID NO 14312702 as cited in SEQ ID NO 0
ctaaatatttaaagctttccttcaccagcattgtattgcctccctggaacaccgaagctctggattaacctattttcaccttctaaggttcttcgtcgttcttattgatctgtgaagatgtattcgggtcagaacaagatccacaaggataagggtgttgcaccaacagagtttgaagagcaagttactcaggctttgtttgacttggagaacaccaaccaggagttgaaaagcgagttgaaagatctctacattaaccaagctgttcagatggatatttctggcaaccgcaaagctgttgtgatctacgttccattcaggctgaggaaagctttccgcaagattcatcttcgtctggtcagagagcttgagaagaagttcagtggaaaagatgtgatctttgttgctaccagaagaatcatgcgcccaccaaagaaaggctcagctgttcagagaccacgcaacagaactcttacttctgtccatgaagccatgctcgaggatgtcgcttaccctgctgagattgtaggaaagagaaccagataccgtcttgatggcaccaagatcatgaaggtatttttggatagtaagctaaagaacgacactgagtacaagctggagacaatggtgggtgtgtacaggaaacttacagggaaagatgtagttttcgagtacccagtcatagaagcttgaagagatgaatgtttgtttcattcttttttgtcggatagagagcttttgattctgtttgggagtaaaactctttgcaaagattttgttatttcagcatttcgcaatctcttcttcaaagttcgatttatcgatacaattcttttttcctacc

SEQ ID NO: 21551 - protein, 191 aa, Arabidopsis thaliana
  peptide (1)..(191): Ceres Seq. ID no. 12604768
MYSGQNKIHKDKGVAPTEFEEQVTQALFDLENTNQELKSELKDLYINQAVQMDISGNRKAVVIYVPFRLRKAFRKIHLRLVRELEKKFSGKDVIFVATRRIMRPPKKGSAVQRPRNRTLTSVHEAMLEDVAYPAEIVGKRTRYRLDGTKIMKVFLDSKLKNDTEYKLETMVGVYRKLTGKDVVFEYPVIEA

SEQ ID NO: 21552 - protein, 140 aa, Arabidopsis thaliana
  peptide (1)..(140): Ceres Seq. ID no. 12604769
MDISGNRKAVVIYVPFRLRKAFRKIHLRLVRELEKKFSGKDVIFVATRRIMRPPKKGSAVQRPRNRTLTSVHEAMLEDVAYPAEIVGKRTRYRLDGTKIMKVFLDSKLKNDTEYKLETMVGVYRKLTGKDVVFEYPVIEA

SEQ ID NO: 21553 - DNA, 1399 bp, Arabidopsis thaliana
  misc_feature (1)..(1399): Ceres Seq. ID no. 12641203
  misc_feature (1)..(1399): Ortholog of  Ceres SEQ ID NO 14308598 as cited in SEQ ID NO 60416
  misc_feature (1)..(1399): Ortholog of  Ceres SEQ ID NO 13502952 as cited in SEQ ID NO 62271
  misc_feature (1)..(1399): Ortholog of  Ceres SEQ ID NO 13502973 as cited in SEQ ID NO 68052
  misc_feature (1)..(1399): Ortholog of  Ceres SEQ ID NO 13596000 as cited in SEQ ID NO 68188
acaatctatcgagctaaaacactgaagcagacattagcgttgagaaaaaaaaaaaagtaagaacgagagagagaaagccatgtctgcgaaaacaatcctatcatcagtagttttggtggttctcgtcgccgcatcagcagcggctaatatcggattcgatgagtcaaacccgatccgaatggtctccgatggtctccgggaggtagaagaatctgtttcccagatcttaggtcaatctcgtcacgttctctctttcgctcgcttcactcaccgatatggtaaaaagtatcagaacgtggaggagatgaagcttcgattctcgattttcaaggagaatcttgatttgatcagatccaccaacaagaaaggcttatcttacaaactcggtgttaatcaatttgctgatttgacatggcaagagtttcaaaggaccaagcttggtgctgctcagaactgctctgccactttaaagggcagccacaaggtcacagaagcagctcttcctgaaacaaaagactggagagaagatggtatcgttagtccggtcaaagatcagggaggttgtggatcttgctggacattcagcacaactggagctcttgaggcagcttaccatcaggcatttggaaaaggaatttctctctctgagcaacagcttgtggattgtgctggagctttcaataactatggttgcaatggtggccttccttctcaagcctttgaatacatcaaatccaacggtggcctcgacacagagaaagcttatccttataccggtaaagatgaaacctgcaaattttcagctgaaaacgttggtgtacaagtcctcaactcagtcaacattactctgggtgctgaagatgaactgaagcatgcggttggattggtacggccagtaagcatagcatttgaggttatacactcgttccggctttacaagagtggagtttacactgatagtcactgtggaagtactccaatggatgtgaaccacgcggttttggccgttggttatggagttgaagacggtgtaccatattggcttattaagaactcatggggagcggattggggcgacaaaggttacttcaagatggagatggggaagaacatgtgtggtattgctacatgtgcatcataccccgttgtggcttgagatgatcagcgaatgtggttggtcaattatcaaattacgaaatgttcacgtatttattggattaagacattacgtaaaagttgggacttgggaatgcatatggtttatgcttgttgtaacataaaaaggtctgttaatatgtacaaaataaagccaaaactatagacgacaaatttataatattttcatgttaaatttatgaacataaattgatttagatcaaagtagtttcgttcttgatcc

SEQ ID NO: 21554 - protein, 358 aa, Arabidopsis thaliana
  peptide (1)..(358): Ceres Seq. ID no. 12641204
MSAKTILSSVVLVVLVAASAAANIGFDESNPIRMVSDGLREVEESVSQILGQSRHVLSFARFTHRYGKKYQNVEEMKLRFSIFKENLDLIRSTNKKGLSYKLGVNQFADLTWQEFQRTKLGAAQNCSATLKGSHKVTEAALPETKDWREDGIVSPVKDQGGCGSCWTFSTTGALEAAYHQAFGKGISLSEQQLVDCAGAFNNYGCNGGLPSQAFEYIKSNGGLDTEKAYPYTGKDETCKFSAENVGVQVLNSVNITLGAEDELKHAVGLVRPVSIAFEVIHSFRLYKSGVYTDSHCGSTPMDVNHAVLAVGYGVEDGVPYWLIKNSWGADWGDKGYFKMEMGKNMCGIATCASYPVVA

SEQ ID NO: 21555 - protein, 325 aa, Arabidopsis thaliana
  peptide (1)..(325): Ceres Seq. ID no. 12641205
MVSDGLREVEESVSQILGQSRHVLSFARFTHRYGKKYQNVEEMKLRFSIFKENLDLIRSTNKKGLSYKLGVNQFADLTWQEFQRTKLGAAQNCSATLKGSHKVTEAALPETKDWREDGIVSPVKDQGGCGSCWTFSTTGALEAAYHQAFGKGISLSEQQLVDCAGAFNNYGCNGGLPSQAFEYIKSNGGLDTEKAYPYTGKDETCKFSAENVGVQVLNSVNITLGAEDELKHAVGLVRPVSIAFEVIHSFRLYKSGVYTDSHCGSTPMDVNHAVLAVGYGVEDGVPYWLIKNSWGADWGDKGYFKMEMGKNMCGIATCASYPVVA

SEQ ID NO: 21556 - protein, 283 aa, Arabidopsis thaliana
  peptide (1)..(283): Ceres Seq. ID no. 12641206
MKLRFSIFKENLDLIRSTNKKGLSYKLGVNQFADLTWQEFQRTKLGAAQNCSATLKGSHKVTEAALPETKDWREDGIVSPVKDQGGCGSCWTFSTTGALEAAYHQAFGKGISLSEQQLVDCAGAFNNYGCNGGLPSQAFEYIKSNGGLDTEKAYPYTGKDETCKFSAENVGVQVLNSVNITLGAEDELKHAVGLVRPVSIAFEVIHSFRLYKSGVYTDSHCGSTPMDVNHAVLAVGYGVEDGVPYWLIKNSWGADWGDKGYFKMEMGKNMCGIATCASYPVVA

SEQ ID NO: 21557 - DNA, 1212 bp, Arabidopsis thaliana
  misc_feature (1)..(1212): Ceres Seq. ID no. 12333915
  misc_feature (1)..(1212): Ortholog of  Ceres SEQ ID NO 13595503 as cited in SEQ ID NO 56643
gaaaaagcgttcgaccaaaagatcagaacaaagcgaaggcggattttctggattctcgacggccggagattcatggcgacggctaacggagcaaagagtccgtcgagtatgggccctaaggttttgttttattccatattgctcacacttcagtacggagcccagcctctgatctccaaacgctgcatcagaaaggatgttattgtaacttcatctgttttgacgtgcgagattgttaaggtcatatgtgctctgattctcatggcaagaaatggtagtttgaagggattagcaaaagagtggacgttgatgggatccttgacagcatcaggacttcctgcagccatatatgcactgcagaacagtttgctgcagatctcatacaggagtcttgattccttgacattttcaattctgaatcagacgaaaatctttttcacagcattctttactttcataatactaaggcagaagcaatcaattctacaaataggagccttgtgtctattgatcatggcagcagtccttctaagtgttggtgaaggctctaacaaagattcaagcggcattaatgcggatcaaaagctgttttatggaattatcccggtcttggcagcctctgtcctgtcgggtttagcctcttctctgtgtcaatgggcttctcaggtcaagaagcattcatcatacttaatgacggttgaaatgtctatcgttggaagcctctgtttattagtaagtactcttaaatctccagatggtgaagcgattaaaaaatatggcttctttcatggttggactgctttaacactggtcccagtaataagcaatgctcttggtgggattcttgttggcctagttacatcacatgccggtggtgtaagaaagggatttgtgattgtgtcggcattacttgtgacggcgctacttcaatttgcgtttgaaggaaaaccgccatcatcgtattgcctagttgctcttcctcttgtgatgagtagtatctcaatgtaccagaaatacccatacattgacaagaagaagaagaaggtgtaagaaaaaggttccattcagagaatagctgctagtgctaagtacaacaatgagatatcttaatgccattattattaactaagtagatgatagtgtgattcttggagcattcaaaagactttgtagtatatttacattcaaagatggaatgagtccaattgagac

SEQ ID NO: 21558 - protein, 349 aa, Arabidopsis thaliana
  peptide (1)..(349): Ceres Seq. ID no. 12333916
EKAFDQKIRTKRRRIFWILDGRRFMATANGAKSPSSMGPKVLFYSILLTLQYGAQPLISKRCIRKDVIVTSSVLTCEIVKVICALILMARNGSLKGLAKEWTLMGSLTASGLPAAIYALQNSLLQISYRSLDSLTFSILNQTKIFFTAFFTFIILRQKQSILQIGALCLLIMAAVLLSVGEGSNKDSSGINADQKLFYGIIPVLAASVLSGLASSLCQWASQVKKHSSYLMTVEMSIVGSLCLLVSTLKSPDGEAIKKYGFFHGWTALTLVPVISNALGGILVGLVTSHAGGVRKGFVIVSALLVTALLQFAFEGKPPSSYCLVALPLVMSSISMYQKYPYIDKKKKKV

SEQ ID NO: 21559 - protein, 325 aa, Arabidopsis thaliana
  peptide (1)..(325): Ceres Seq. ID no. 12333917
MATANGAKSPSSMGPKVLFYSILLTLQYGAQPLISKRCIRKDVIVTSSVLTCEIVKVICALILMARNGSLKGLAKEWTLMGSLTASGLPAAIYALQNSLLQISYRSLDSLTFSILNQTKIFFTAFFTFIILRQKQSILQIGALCLLIMAAVLLSVGEGSNKDSSGINADQKLFYGIIPVLAASVLSGLASSLCQWASQVKKHSSYLMTVEMSIVGSLCLLVSTLKSPDGEAIKKYGFFHGWTALTLVPVISNALGGILVGLVTSHAGGVRKGFVIVSALLVTALLQFAFEGKPPSSYCLVALPLVMSSISMYQKYPYIDKKKKKV

SEQ ID NO: 21560 - protein, 313 aa, Arabidopsis thaliana
  peptide (1)..(313): Ceres Seq. ID no. 12333918
MGPKVLFYSILLTLQYGAQPLISKRCIRKDVIVTSSVLTCEIVKVICALILMARNGSLKGLAKEWTLMGSLTASGLPAAIYALQNSLLQISYRSLDSLTFSILNQTKIFFTAFFTFIILRQKQSILQIGALCLLIMAAVLLSVGEGSNKDSSGINADQKLFYGIIPVLAASVLSGLASSLCQWASQVKKHSSYLMTVEMSIVGSLCLLVSTLKSPDGEAIKKYGFFHGWTALTLVPVISNALGGILVGLVTSHAGGVRKGFVIVSALLVTALLQFAFEGKPPSSYCLVALPLVMSSISMYQKYPYIDKKKKKV

SEQ ID NO: 21561 - DNA, 1224 bp, Arabidopsis thaliana
  misc_feature (1)..(1224): Ceres Seq. ID no. 13621991
  misc_feature (1)..(1224): Ortholog of  Ceres SEQ ID NO 13593831 as cited in SEQ ID NO 53828
agaaaacattactgataaaactacaaaaatagctggaatggagcattcaaaactctgtccaaagtccaaacggttaaattatcactgacccaatccaataattagatttatttaagaagaagaagaagaaaaaaaacagagctttacaatttctctctacagagatcgaagatatggaaggcaaggaagaagacgttagagttggagctaacaagttcccggagagacaaccaatcggaacatcagctcagagtgacaaggactacaaggaaccaccaccagctccgtttttcgaacctggtgagctttcttcatggtctttttggagagctgggatcgctgagttcatcgctacttttctctttctctacatcactgtcttgactgttatgggagtgaaaaggtcaccgaacatgtgtgcttccgtcggaatccaaggaatcgcttgggctttcggtggtatgatatttgccttagtctactgtaccgctggtatctccggtggacacatcaacccagcggttacttttggtctgttcttagcccggaagctgtcgcttactagagctctgtactacatagtgatgcagtgcttgggagctatctgtggtgctggagtggttaaagggttccagcctaagcaataccaggctctaggaggaggagctaacactgtggctcatggttacaccaagggaagtggtcttggagctgagatcattggcacattcgttcttgtatacacagtcttctcagcaactgacgccaagagaaatgctcgtgactctcatgtccctattcttgcaccactcccaatcgggtttgcggttttcttggttcacttggcaaccatcccaatcactggcacaggcatcaacccagctagaagccttggagctgcaatcatctacaacaaagaccattcctgggatgaccactgggtgttttgggttggccccttcattgaagctgcacttgctgctctttaccatgtggttgtcatcagagccatccccttcaagtccagaagctaagtaaaaacaagacatcaagtcctctggtttctggccttgtccttagttgcttctatagttctattgttgatctactacatgtatgtgtgcaatgtgtttatctatgtgccctcttaatgcaatatttgtaaacaaggaagaagttccaaaggagaattatttgcaaattatgatgtttaacatgtttatt

SEQ ID NO: 21562 - protein, 286 aa, Arabidopsis thaliana
  peptide (1)..(286): Ceres Seq. ID no. 13621992
MEGKEEDVRVGANKFPERQPIGTSAQSDKDYKEPPPAPFFEPGELSSWSFWRAGIAEFIATFLFLYITVLTVMGVKRSPNMCASVGIQGIAWAFGGMIFALVYCTAGISGGHINPAVTFGLFLARKLSLTRALYYIVMQCLGAICGAGVVKGFQPKQYQALGGGANTVAHGYTKGSGLGAEIIGTFVLVYTVFSATDAKRNARDSHVPILAPLPIGFAVFLVHLATIPITGTGINPARSLGAAIIYNKDHSWDDHWVFWVGPFIEAALAALYHVVVIRAIPFKSRS

SEQ ID NO: 21563 - protein, 214 aa, Arabidopsis thaliana
  peptide (1)..(214): Ceres Seq. ID no. 13621993
MGVKRSPNMCASVGIQGIAWAFGGMIFALVYCTAGISGGHINPAVTFGLFLARKLSLTRALYYIVMQCLGAICGAGVVKGFQPKQYQALGGGANTVAHGYTKGSGLGAEIIGTFVLVYTVFSATDAKRNARDSHVPILAPLPIGFAVFLVHLATIPITGTGINPARSLGAAIIYNKDHSWDDHWVFWVGPFIEAALAALYHVVVIRAIPFKSRS

SEQ ID NO: 21564 - protein, 206 aa, Arabidopsis thaliana
  peptide (1)..(206): Ceres Seq. ID no. 13621994
MCASVGIQGIAWAFGGMIFALVYCTAGISGGHINPAVTFGLFLARKLSLTRALYYIVMQCLGAICGAGVVKGFQPKQYQALGGGANTVAHGYTKGSGLGAEIIGTFVLVYTVFSATDAKRNARDSHVPILAPLPIGFAVFLVHLATIPITGTGINPARSLGAAIIYNKDHSWDDHWVFWVGPFIEAALAALYHVVVIRAIPFKSRS

SEQ ID NO: 21565 - DNA, 1190 bp, Arabidopsis thaliana
  misc_feature (1)..(1190): Ceres Seq. ID no. 12333877
  misc_feature (1)..(1190): Ortholog of  Ceres SEQ ID NO 15171366 as cited in SEQ ID NO 51578
  misc_feature (1)..(1190): Ortholog of  Ceres SEQ ID NO 14306949 as cited in SEQ ID NO 54919
  misc_feature (1)..(1190): Ortholog of  Ceres SEQ ID NO 14308536 as cited in SEQ ID NO 55469
  misc_feature (1)..(1190): Ortholog of  Ceres SEQ ID NO 15175723 as cited in SEQ ID NO 57875
  misc_feature (1)..(1190): Ortholog of  Ceres SEQ ID NO 14314909 as cited in SEQ ID NO 58002
  misc_feature (1)..(1190): Ortholog of  Ceres SEQ ID NO 15179772 as cited in SEQ ID NO 64248
atcacaaccatttctctctctcgtcttcgtcttcttcttcttcaacgttcctctccaaaatcctcagaccaagaaatcatcatggccgtcgatctaatgcgtttccctaagatagatgatcaaacggctattcaggaagctgcatcgcaaggtttacaaagtatggaacatctgatccgtgtcctctctaaccgtcccgaacaacaacacaacgttgactgctccgagatcactgacttcaccgtttctaaattcaaaaccgtcatttctctccttaaccgtactggtcacgctcggttcagacgcggaccggttcactccacttcctctgccgcatctcagaaactacagagtcagatcgttaaaaatactcaacctgaggctccgattgtttctcagccagtgagaacaactacgaatcaccctcaaatcgttcctccaccgtctagtgtaacactcgatttctctaaaccaagcatcttcggcaccaaagctaagagcgccgagctggaattctccaaagaaaacttcagtgtttctttaaactcctcattcatgtcgtcggcgataaccggagacggcagcgtctccaatggaaaaatcttccttgcttctgctccgtcgcagcctgttaactcttccggaaaaccaccgttggctggtcatccttacagaaagagatgtctcgagcatgagcactcagagagtttctccggaaaagtctccggctccgcctacggaaagtgccattgcaagaaaagcaggaaaaatcggatgaagagaaccgtgagagtaccggcgataagtgcaaagatcgccgatattccaccggacgaatattcgtggaggaagtacggacaaaaaccgatcaagggctcaccacacccacgtggttactacaagtgcagtacattcagaggatgtccagcgaggaaacacgtggaacgagcattagatgatccagcgatgcttattgtgacatacgaaggagagcaccgtcataaccaatccgcgatgcaggagaatatttcttcttcaggcattaatgatttagtgtttgcctcggcttgacttttttttgtactatttgttttttgattttttgagtactttagatggattgaaatttgtaaatttttttattaagaaatcaatttaaatagagaaaaattagtggtggtgcaatgttc

SEQ ID NO: 21566 - protein, 356 aa, Arabidopsis thaliana
  peptide (1)..(356): Ceres Seq. ID no. 12333878
ITTISLSRLRLLLLQRSSPKSSDQEIIMAVDLMRFPKIDDQTAIQEAASQGLQSMEHLIRVLSNRPEQQHNVDCSEITDFTVSKFKTVISLLNRTGHARFRRGPVHSTSSAASQKLQSQIVKNTQPEAPIVSQPVRTTTNHPQIVPPPSSVTLDFSKPSIFGTKAKSAELEFSKENFSVSLNSSFMSSAITGDGSVSNGKIFLASAPSQPVNSSGKPPLAGHPYRKRCLEHEHSESFSGKVSGSAYGKCHCKKSRKNRMKRTVRVPAISAKIADIPPDEYSWRKYGQKPIKGSPHPRGYYKCSTFRGCPARKHVERALDDPAMLIVTYEGEHRHNQSAMQENISSSGINDLVFASA

SEQ ID NO: 21567 - protein, 329 aa, Arabidopsis thaliana
  peptide (1)..(329): Ceres Seq. ID no. 12333879
MAVDLMRFPKIDDQTAIQEAASQGLQSMEHLIRVLSNRPEQQHNVDCSEITDFTVSKFKTVISLLNRTGHARFRRGPVHSTSSAASQKLQSQIVKNTQPEAPIVSQPVRTTTNHPQIVPPPSSVTLDFSKPSIFGTKAKSAELEFSKENFSVSLNSSFMSSAITGDGSVSNGKIFLASAPSQPVNSSGKPPLAGHPYRKRCLEHEHSESFSGKVSGSAYGKCHCKKSRKNRMKRTVRVPAISAKIADIPPDEYSWRKYGQKPIKGSPHPRGYYKCSTFRGCPARKHVERALDDPAMLIVTYEGEHRHNQSAMQENISSSGINDLVFASA

SEQ ID NO: 21568 - protein, 324 aa, Arabidopsis thaliana
  peptide (1)..(324): Ceres Seq. ID no. 12333880
MRFPKIDDQTAIQEAASQGLQSMEHLIRVLSNRPEQQHNVDCSEITDFTVSKFKTVISLLNRTGHARFRRGPVHSTSSAASQKLQSQIVKNTQPEAPIVSQPVRTTTNHPQIVPPPSSVTLDFSKPSIFGTKAKSAELEFSKENFSVSLNSSFMSSAITGDGSVSNGKIFLASAPSQPVNSSGKPPLAGHPYRKRCLEHEHSESFSGKVSGSAYGKCHCKKSRKNRMKRTVRVPAISAKIADIPPDEYSWRKYGQKPIKGSPHPRGYYKCSTFRGCPARKHVERALDDPAMLIVTYEGEHRHNQSAMQENISSSGINDLVFASA

SEQ ID NO: 21569 - DNA, 888 bp, Arabidopsis thaliana
  misc_feature (1)..(888): Ceres Seq. ID no. 12333881
  misc_feature (1)..(888): Ortholog of  Ceres SEQ ID NO 14308640 as cited in SEQ ID NO 60489
  misc_feature (1)..(888): Ortholog of  Ceres SEQ ID NO 12619999 as cited in SEQ ID NO 66123
  misc_feature (1)..(888): Ortholog of  Ceres SEQ ID NO 13656436 as cited in SEQ ID NO 69154
aaaagcttaaaacagaggatttagcaagagaggatttagcgagagagagacgttgaagaagatgactagtggaggaggatacggagatccgtcgcagaagattgattatgtgttcaaagtggtgttgatcggcgattccgcggttgggaaatcacagatactggctcgttatgctagagacgaattcagtttggattctaaggccaccatcggcgttgagtttcagactcggacgcttgttatcgatcacaagagtgttaaggctcagatctgggataccgccggccaagaacgatacagagcagtaacaagtgcatattaccgaggagcggttggggcgatgttggtgtatgacataaccagacgccaaacctttgaccatatcccaagatggttagaagaactacgtgctcatgcagataagaacattgtgataatccttattgggaacaagtcagatcttgtggatcaacgagctataccgacagaagatgcgaaagaatttgcggagaaagaaggtttgttcttcttggagacatctgcatttaacgcaaccaatgttgagagcgctttctccacggttttgactgagatcttcaacattgtgaacaagaaaagtctggctgcgagtgaagatcaagagaatggtaatcccgggtcgcttgctggtaagaagattgatattgttccaggtcctggtcaagtgataccaaacaagagtaacatgtgttgtaactcttagataaaccaattcaattcttgaatgttacttgataacaacaatatatagatgttttaaagactctgattgggatatttctcctatctagagctgtgtgattcatttgttgcttaatgagcagtttttgtggggttttggggtgttgt

SEQ ID NO: 21570 - protein, 226 aa, Arabidopsis thaliana
  peptide (1)..(226): Ceres Seq. ID no. 12333882
MTSGGGYGDPSQKIDYVFKVVLIGDSAVGKSQILARYARDEFSLDSKATIGVEFQTRTLVIDHKSVKAQIWDTAGQERYRAVTSAYYRGAVGAMLVYDITRRQTFDHIPRWLEELRAHADKNIVIILIGNKSDLVDQRAIPTEDAKEFAEKEGLFFLETSAFNATNVESAFSTVLTEIFNIVNKKSLAASEDQENGNPGSLAGKKIDIVPGPGQVIPNKSNMCCNS

SEQ ID NO: 21571 - protein, 133 aa, Arabidopsis thaliana
  peptide (1)..(133): Ceres Seq. ID no. 12333883
MLVYDITRRQTFDHIPRWLEELRAHADKNIVIILIGNKSDLVDQRAIPTEDAKEFAEKEGLFFLETSAFNATNVESAFSTVLTEIFNIVNKKSLAASEDQENGNPGSLAGKKIDIVPGPGQVIPNKSNMCCNS

SEQ ID NO: 21572 - DNA, 563 bp, Arabidopsis thaliana
  misc_feature (1)..(563): Ceres Seq. ID no. 12333265
  misc_feature (1)..(563): Ortholog of  Ceres SEQ ID NO 14309553 as cited in SEQ ID NO 52735
  misc_feature (1)..(563): Ortholog of  Ceres SEQ ID NO 15172828 as cited in SEQ ID NO 60174
  misc_feature (1)..(563): Ortholog of  Ceres SEQ ID NO 12483999 as cited in SEQ ID NO 0
aaaaattgggattggtaggtgacgcgcatgctaagtaattgaaaaaaaaaaacacaagaggagaagaaacagaacagagaagaaaaagagagaagatggcttcggaagaaggacaagtgatcgcctgccacaccgttgagacatggaacgagcagcttcagaaggctaatgaatccaaaactcttgtggtggttgatttcacggcttcttggtgtggaccatgtcgtttcatcgctccattctttgctgatttggctaagaaacttcctaacgtgcttttcctcaaggttgatactgatgaattgaagtcggtggcaagtgattgggcgatacaggcgatgccaaccttcatgtttttgaaggaagggaagattttggacaaagttgttggagccaagaaagatgagcttcagtctaccattgccaaacacttggcttaagctttccactcttatatatctcttaagatgttggattaattgttctattactcttgacatgttataacttgttcccctttgttatggttccggtctataatctcatctgactatttgaagctg

SEQ ID NO: 21573 - protein, 114 aa, Arabidopsis thaliana
  peptide (1)..(114): Ceres Seq. ID no. 12333266
MASEEGQVIACHTVETWNEQLQKANESKTLVVVDFTASWCGPCRFIAPFFADLAKKLPNVLFLKVDTDELKSVASDWAIQAMPTFMFLKEGKILDKVVGAKKDELQSTIAKHLA

SEQ ID NO: 21574 - DNA, 1452 bp, Arabidopsis thaliana
  misc_feature (1)..(1452): Ceres Seq. ID no. 12385723
  misc_feature (1)..(1452): Ortholog of  Ceres SEQ ID NO 13593955 as cited in SEQ ID NO 54278
  misc_feature (1)..(1452): Ortholog of  Ceres SEQ ID NO 14314092 as cited in SEQ ID NO 62788
  misc_feature (1)..(1452): Ortholog of  Ceres SEQ ID NO 13655302 as cited in SEQ ID NO 63307
  misc_feature (1)..(1452): Ortholog of  Ceres SEQ ID NO 13597380 as cited in SEQ ID NO 64054
  misc_feature (1)..(1452): Ortholog of  Ceres SEQ ID NO 12625474 as cited in SEQ ID NO 64169
  misc_feature (1)..(1452): Ortholog of  Ceres SEQ ID NO 13597502 as cited in SEQ ID NO 64681
aaatttatttaataaagtttacctataatatcaaattatgcaaaacacaggctggttcagttttttccacgaatcaaaaatggttggagaaatattgaataagagagagagagagagagagagagagagagatagagtttcagagttgacacaacattgaagtaaactaaactcctaacctctttatctatgtgtatatataaaactcaaaagtacatataatcttcaccattcacacatagtcacataccaaagcaaaaacatggatcgttgcacgtcgtcgtttttgcttctcacattggtgtccattctccaaatctcctttgctcaacttgttccagcaatgatgacattcggtgactctgtagttgatgtcggcaacaacaactatcttccgacccttttcagagctgattatcctccttatggccgtgatttcgctaaccacaaagccaccggtcgtttctgcaacggcaaattagccactgatataactgctgagactttaggcttcactaagtacccaccagcttatctaagtcctgaagcttctggtaagaatcttctcattggtgctaatttcgcttctgcagcttcaggttatgatgacaaagctgctcttctcaatcacgcgatcccgttgtatcagcaagtagagtatttcaaggaatacaagagcaagctaataaaaattgcaggaagcaaaaaagctgattcgatcataaagggagcaatctgtctcttaagtgcaggaagcagtgattttgttcaaaactactatgtgaatcctctgctttacaaagtttacactgttgatgcatacggatctttccttatcgataacttctctacatttatcaagcaagtgtatgcggttggagcaaggaagatcggtgtgacatctctgcctccaacaggatgtcttcccgctgcaagaacccttttcggtttccatgaaaaaggctgtgtttcaagactcaacacagatgctcaaaactttaacaagaagcttaacgctgctgcttcaaagcttcagaagcaatattccgatcttaagattgttgtcttcgacatctactctccactttatgatcttgttcagaacccttccaaatccggattcacggaagcaaccaaaggatgttgtggaacaggaacagtcgagacaacttcactcttgtgcaacccgaaatcgtttgggacatgctccaatgctactcagtatgtgttctgggacagtgtgcatccttctgaagctgccaatgagattcttgccactgccctaattggacagggcttttctctcctcggttgatctcacgtatttatcttatattctcttttcaaatcgctgtttctatcacacatgagtcatacatttgtttttctttgaattatgtatcaaagcatcactgttttactaaaaatgtattgaaacttattacaagtact

SEQ ID NO: 21575 - protein, 350 aa, Arabidopsis thaliana
  peptide (1)..(350): Ceres Seq. ID no. 12385724
MDRCTSSFLLLTLVSILQISFAQLVPAMMTFGDSVVDVGNNNYLPTLFRADYPPYGRDFANHKATGRFCNGKLATDITAETLGFTKYPPAYLSPEASGKNLLIGANFASAASGYDDKAALLNHAIPLYQQVEYFKEYKSKLIKIAGSKKADSIIKGAICLLSAGSSDFVQNYYVNPLLYKVYTVDAYGSFLIDNFSTFIKQVYAVGARKIGVTSLPPTGCLPAARTLFGFHEKGCVSRLNTDAQNFNKKLNAAASKLQKQYSDLKIVVFDIYSPLYDLVQNPSKSGFTEATKGCCGTGTVETTSLLCNPKSFGTCSNATQYVFWDSVHPSEAANEILATALIGQGFSLLG

SEQ ID NO: 21576 - protein, 323 aa, Arabidopsis thaliana
  peptide (1)..(323): Ceres Seq. ID no. 12385725
MMTFGDSVVDVGNNNYLPTLFRADYPPYGRDFANHKATGRFCNGKLATDITAETLGFTKYPPAYLSPEASGKNLLIGANFASAASGYDDKAALLNHAIPLYQQVEYFKEYKSKLIKIAGSKKADSIIKGAICLLSAGSSDFVQNYYVNPLLYKVYTVDAYGSFLIDNFSTFIKQVYAVGARKIGVTSLPPTGCLPAARTLFGFHEKGCVSRLNTDAQNFNKKLNAAASKLQKQYSDLKIVVFDIYSPLYDLVQNPSKSGFTEATKGCCGTGTVETTSLLCNPKSFGTCSNATQYVFWDSVHPSEAANEILATALIGQGFSLLG

SEQ ID NO: 21577 - protein, 322 aa, Arabidopsis thaliana
  peptide (1)..(322): Ceres Seq. ID no. 12385726
MTFGDSVVDVGNNNYLPTLFRADYPPYGRDFANHKATGRFCNGKLATDITAETLGFTKYPPAYLSPEASGKNLLIGANFASAASGYDDKAALLNHAIPLYQQVEYFKEYKSKLIKIAGSKKADSIIKGAICLLSAGSSDFVQNYYVNPLLYKVYTVDAYGSFLIDNFSTFIKQVYAVGARKIGVTSLPPTGCLPAARTLFGFHEKGCVSRLNTDAQNFNKKLNAAASKLQKQYSDLKIVVFDIYSPLYDLVQNPSKSGFTEATKGCCGTGTVETTSLLCNPKSFGTCSNATQYVFWDSVHPSEAANEILATALIGQGFSLLG

SEQ ID NO: 21578 - DNA, 657 bp, Arabidopsis thaliana
  misc_feature (1)..(657): Ceres Seq. ID no. 12384594
  misc_feature (1)..(657): Ortholog of  Ceres SEQ ID NO 13585616 as cited in SEQ ID NO 63719
aaaaacacacgccggagagttttctaagaacaacagtgacgaaaaggtttttagggtttctttaccaatcagaatctccgccaagtaacgattttcagattccgaagcagcaaagttcaaataatttccgaactgtaacatggcggcaactactggacttgagactctcgtcgatcagattatttcggtgattacaaatgacggacgcaacattgtgggagttcttaaaggttttgaccaggctacaaatataatccttgatgaatctcatgaacgtgtgttttccacaaaggaaggagtacaacaacatgtgttgggtttgtacatcatcagaggggacaacataggtgttatcggggagctggacgaggagcttgatgctagtctggatttttcgaagctgagagcccatccgttgaaacccgtagtgcattgattgaatatagttatggtgagaaaatctaattctctcattcaaagcctaaaaacaaagagaagatttgattgtaaacaatttggatagtttgttttgatgtctggagttgtcttatttgtgtatcctaaggacaaaagctatatgatattttatgtcttaaacgttttggtcggaaacttaaatcatacccaatccttttggaacggaacctaggtttgcct

SEQ ID NO: 21579 - protein, 98 aa, Arabidopsis thaliana
  peptide (1)..(98): Ceres Seq. ID no. 12384595
MAATTGLETLVDQIISVITNDGRNIVGVLKGFDQATNIILDESHERVFSTKEGVQQHVLGLYIIRGDNIGVIGELDEELDASLDFSKLRAHPLKPVVH

SEQ ID NO: 21580 - protein, 62 aa, Arabidopsis thaliana
  peptide (1)..(62): Ceres Seq. ID no. 12384596
KHTPESFLRTTVTKRFLGFLYQSESPPSNDFQIPKQQSSNNFRTVTWRQLLDLRLSSIRLFR

SEQ ID NO: 21581 - DNA, 995 bp, Arabidopsis thaliana
  misc_feature (1)..(995): Ceres Seq. ID no. 12482528
  misc_feature (1)..(995): Ortholog of  Ceres SEQ ID NO 15176290 as cited in SEQ ID NO 54445
ctggtcttatgtttttttgccctaatcgacttctgcgtagagaaaccgaaaaaggagagagaaaatccgccgataagattccgtacgactgcacgtctccgatctcgccgtgaatctgtctcgagagtctgttaactcaccggatctccgtcgttgatctgcctctgtttcgatccgtgttaaactcgatttaaaactatggatccgatggatatagttggaaaatcaaaggaagatgcttcgcttccgaaagctaccatgacgaaaattataaaggagatgttacccgcagatgttcgtgttgctagagatgctcaagatctattgattgagtgttgtgtagagttcataaatcttatatcgtcggagtcgaatgaagtgtgtaacaaagaggataaacgaacaatagcccctgagcacgtactcaaagctttacaggttcttggctttggggaatacgtagaagaagtttatgccgcgtatgagcaacataaatatgaaaccatgcaggattcgcagagaagtgtgaagatgaatagcggagcagagatgacggaagaagaggcggcagcggaacaacagaggatgtttgcagaagctcgagcaagaatgaatggaggtgttacagttcctcaaccagagcaactagaagaaccccaacaacaacaacaaacaagtctacaaagctaatcaacaaaaccgcaaaggaatcccttattttaacattatccttttgacttctttttctttctagcaatatctctgtaaagtgcaaaattcgtcgcgtcttggtgttgatatgctctttacattttttaacttagggttgtgttttttcccctttctttgaatctaaaatcacttaggtgattcagatgtaattagtaaggtttttattgaatcttagcaactagtgtcattcgaatccaaatccccttaaattatgtgtaacttcataattctgaagtcttgaatccatttctagtctgatcacc

SEQ ID NO: 21582 - protein, 163 aa, Arabidopsis thaliana
  peptide (1)..(163): Ceres Seq. ID no. 12482529
MDPMDIVGKSKEDASLPKATMTKIIKEMLPADVRVARDAQDLLIECCVEFINLISSESNEVCNKEDKRTIAPEHVLKALQVLGFGEYVEEVYAAYEQHKYETMQDSQRSVKMNSGAEMTEEEAAAEQQRMFAEARARMNGGVTVPQPEQLEEPQQQQQTSLQS

SEQ ID NO: 21583 - protein, 160 aa, Arabidopsis thaliana
  peptide (1)..(160): Ceres Seq. ID no. 12482530
MDIVGKSKEDASLPKATMTKIIKEMLPADVRVARDAQDLLIECCVEFINLISSESNEVCNKEDKRTIAPEHVLKALQVLGFGEYVEEVYAAYEQHKYETMQDSQRSVKMNSGAEMTEEEAAAEQQRMFAEARARMNGGVTVPQPEQLEEPQQQQQTSLQS

SEQ ID NO: 21584 - protein, 143 aa, Arabidopsis thaliana
  peptide (1)..(143): Ceres Seq. ID no. 12482531
MTKIIKEMLPADVRVARDAQDLLIECCVEFINLISSESNEVCNKEDKRTIAPEHVLKALQVLGFGEYVEEVYAAYEQHKYETMQDSQRSVKMNSGAEMTEEEAAAEQQRMFAEARARMNGGVTVPQPEQLEEPQQQQQTSLQS

SEQ ID NO: 21585 - DNA, 929 bp, Arabidopsis thaliana
  misc_feature (1)..(929): Ceres Seq. ID no. 12338468
  misc_feature (1)..(929): Ortholog of  Ceres SEQ ID NO 12610412 as cited in SEQ ID NO 55977
attcctaagcaaatctcttctctctcccattcgtctccaaagagattacagttttgagcatttctcatctctcgaagctcttctctgtgtgtgtggcgatggctgctaattcgataatggcttcctccaaacccctaatctccctgtcatccaaccaacaaccaaaccgagtccaaattcccaaattcgccaaacttccccaaattcccaaatccctcacttcctccaccgatctccgtagcaaagcactatcactctcctccgccaccgccaaatccttagctttaatcgccgctttcgctcctccgtcgatggcggaggcgatggagaaagcacagctcttcgatttcaatctcacgcttccgatcatcgttgttgagtttctcttcttgatgttcgctctcgacaaggtctattactctccgcttggtaacttcatggatcaaagagacgcttccatcaaagagaagctcgcgagtgttaaggacacttcgactgaagtaaaggagctcgatgagcaagccgccgccgtaatgagagcagctagggctgagatcgccgccgcgcttaacaagatgaagaaggagactcaggttgaagtcgaggagaagctagcggagggaaggaagaaggtggaggaagagctaaaagaagctttggcgagcttggagagtcagaaagaagaaaccattaaagctttggattctcagattgctgctcttagtgaagacattgtcaagaaggttcttccttcttaaattatatttttgttaactgtgtaattctctgtctctctatctcaaaacttatttacaagaaattactgtaaatctcttcttcttcttcttctctgtttcttggattgttcgtcgttcaaagaagaacaatttttattttgtaagtttataaataattagctctcttctgcc

SEQ ID NO: 21586 - protein, 219 aa, Arabidopsis thaliana
  peptide (1)..(219): Ceres Seq. ID no. 12338469
MAANSIMASSKPLISLSSNQQPNRVQIPKFAKLPQIPKSLTSSTDLRSKALSLSSATAKSLALIAAFAPPSMAEAMEKAQLFDFNLTLPIIVVEFLFLMFALDKVYYSPLGNFMDQRDASIKEKLASVKDTSTEVKELDEQAAAVMRAARAEIAAALNKMKKETQVEVEEKLAEGRKKVEEELKEALASLESQKEETIKALDSQIAALSEDIVKKVLPS

SEQ ID NO: 21587 - protein, 213 aa, Arabidopsis thaliana
  peptide (1)..(213): Ceres Seq. ID no. 12338471
MASSKPLISLSSNQQPNRVQIPKFAKLPQIPKSLTSSTDLRSKALSLSSATAKSLALIAAFAPPSMAEAMEKAQLFDFNLTLPIIVVEFLFLMFALDKVYYSPLGNFMDQRDASIKEKLASVKDTSTEVKELDEQAAAVMRAARAEIAAALNKMKKETQVEVEEKLAEGRKKVEEELKEALASLESQKEETIKALDSQIAALSEDIVKKVLPS

SEQ ID NO: 21588 - protein, 148 aa, Arabidopsis thaliana
  peptide (1)..(148): Ceres Seq. ID no. 12338472
MAEAMEKAQLFDFNLTLPIIVVEFLFLMFALDKVYYSPLGNFMDQRDASIKEKLASVKDTSTEVKELDEQAAAVMRAARAEIAAALNKMKKETQVEVEEKLAEGRKKVEEELKEALASLESQKEETIKALDSQIAALSEDIVKKVLPS

SEQ ID NO: 21589 - DNA, 841 bp, Arabidopsis thaliana
  misc_feature (1)..(841): Ceres Seq. ID no. 12331964
  misc_feature (1)..(841): Ortholog of  Ceres SEQ ID NO 15179187 as cited in SEQ ID NO 0
aacccctctttatccgcgcgagagcaattgagcagccatggtttgcatcaggcgagcgacggtggatgatctgctggcgatgcaagcctgcaatctcatgtgtcttcctgagaactaccagatgaagtactacctctaccatatcctctcatggcctcagcttctctacgtcgccgaggactacaatggtcgcatcgttggctatgtcttggctaagatggaggaagagagcaacgagtgccacggccacatcacttctctcgccgttcttcgtacccatcgcaagctcggtctcgccactaagctcatgaccgccgctcaagctgccatggaacaggtttacgaggctgagtatgtttcgttgcatgtgaggagaagtaaccgagcagcattcaatctatacactgagacattaggctacaagattaatgatgtagaagcaaagtactacgccgatggggaggatgcttatgacatgcggaagaatctcaaggggaagcagaaccatcaccacgcccacggtcatcatcatcaccatggaggaggatgttgttctggtgatgcaaaagttgtagaaacagctcaagccgtagatggtaaagcagtttccaaatgagattcgaaagcagataattatgagtatattgaggtgggttcactggctcgctctagtacttctcactatttccattcatatgattccgagtgacaaatacatttggtgaccactctgtgttactcctttgtctttctttggttgtattgaaaatttagccgttcctttttttgatgtatcattttggaaattccaagctttcattaaggctttacaacttaagct

SEQ ID NO: 21590 - protein, 192 aa, Arabidopsis thaliana
  peptide (1)..(192): Ceres Seq. ID no. 12331965
MVCIRRATVDDLLAMQACNLMCLPENYQMKYYLYHILSWPQLLYVAEDYNGRIVGYVLAKMEEESNECHGHITSLAVLRTHRKLGLATKLMTAAQAAMEQVYEAEYVSLHVRRSNRAAFNLYTETLGYKINDVEAKYYADGEDAYDMRKNLKGKQNHHHAHGHHHHHGGGCCSGDAKVVETAQAVDGKAVSK

SEQ ID NO: 21591 - protein, 178 aa, Arabidopsis thaliana
  peptide (1)..(178): Ceres Seq. ID no. 12331966
MQACNLMCLPENYQMKYYLYHILSWPQLLYVAEDYNGRIVGYVLAKMEEESNECHGHITSLAVLRTHRKLGLATKLMTAAQAAMEQVYEAEYVSLHVRRSNRAAFNLYTETLGYKINDVEAKYYADGEDAYDMRKNLKGKQNHHHAHGHHHHHGGGCCSGDAKVVETAQAVDGKAVSK

SEQ ID NO: 21592 - protein, 172 aa, Arabidopsis thaliana
  peptide (1)..(172): Ceres Seq. ID no. 12331967
MCLPENYQMKYYLYHILSWPQLLYVAEDYNGRIVGYVLAKMEEESNECHGHITSLAVLRTHRKLGLATKLMTAAQAAMEQVYEAEYVSLHVRRSNRAAFNLYTETLGYKINDVEAKYYADGEDAYDMRKNLKGKQNHHHAHGHHHHHGGGCCSGDAKVVETAQAVDGKAVSK

SEQ ID NO: 21593 - DNA, 650 bp, Arabidopsis thaliana
  misc_feature (1)..(650): Ceres Seq. ID no. 12482746
  misc_feature (1)..(650): Ortholog of  Ceres SEQ ID NO 12422485 as cited in SEQ ID NO 20557
agttctctcagtggagaagaagactcgagtcatctgcagaaaagattcccgatcggattggatcatataagattttagggatttggaaaaaatcttgagctatggaggcgaatgcggcggtggacggaacggggaatccgatccctacgtcggcggttttaacagcttcggcgaagcatataggaatcaggtgtatgccggaaaacatggcgttcctgaaatgtaagaagaatgatcctaacccagagaaatgcctcgagaagggacgtgacgtcactcgctgtgttcttggcctgctgaaggatcttcaccagagatgcccaaaggagatggatgcttacgttggatgcatgtattactacaccaacgagtttgagttgtgtcggaaagagcaagaagcttttgagaaagtgtgtccgttgaaatgagaaagtcaagtttttatctgtctcctaataagcaaatgttcattttgactctggagcgttactctaatcactcttccatcgctgcctgcttcttttccttttctggtaatggaagacctttaaaccatgtaatattgtcgtgtttcctttgtccagttctcccgagggaaacgattttggttacttgtgcaattgactctcaagtacagagcttaattagtc

SEQ ID NO: 21594 - protein, 108 aa, Arabidopsis thaliana
  peptide (1)..(108): Ceres Seq. ID no. 12482747
MEANAAVDGTGNPIPTSAVLTASAKHIGIRCMPENMAFLKCKKNDPNPEKCLEKGRDVTRCVLGLLKDLHQRCPKEMDAYVGCMYYYTNEFELCRKEQEAFEKVCPLK

SEQ ID NO: 21595 - protein, 77 aa, Arabidopsis thaliana
  peptide (1)..(77): Ceres Seq. ID no. 12482748
MPENMAFLKCKKNDPNPEKCLEKGRDVTRCVLGLLKDLHQRCPKEMDAYVGCMYYYTNEFELCRKEQEAFEKVCPLK

SEQ ID NO: 21596 - protein, 75 aa, Arabidopsis thaliana
  peptide (1)..(75): Ceres Seq. ID no. 12482749
MRKSSFYLSPNKQMFILTLERYSNHSSIAACFFSFSGNGRPLNHVILSCFLCPVLPRETILVTCAIDSQVQSLIS

SEQ ID NO: 21597 - DNA, 933 bp, Arabidopsis thaliana
  misc_feature (1)..(933): Ceres Seq. ID no. 12370043
  misc_feature (1)..(933): Ortholog of  Ceres SEQ ID NO 14316459 as cited in SEQ ID NO 57754
attggccatcgaacacaccacacagagaaaacaatatgagcaatcatcaaactcaggtgttgaagctattggagccatggtgtgaacttaaagacaaagtggttcttgtgacaggagcttcctctggtattggaagagagatctgtcttgatcttgccaaagctggttgccaggttattgcagcagctcgtcgtgttgatcgactcaactctctctgctctgaaatcaacagcttcagttcaactggaatccaagccgcagctcttgagttagacgtttcatcagacgcagccaccattcaaaaagcggtcagggaagcttgggacatctttggaaagatcgatgcattgatcaacaatgctggaatcagaggcaatgtcaagtcgagtttggatttgtcagaggacgaatgggacaacgtcttcaagaccaacttaaagggtccttggttagtatccaaacatgtttgtatgttaatgcgtgacgctaaacgaggtggctcggtgataaacatctcatcgatcgccgggatccggggtatgttgcccggtggacttgcttatgcttgttccaaaggcggtgttgacaccatgtcaaggatgatggcacttgagttaggtgttcataagatcagagtgaactcgatcgcaccggggcttttcaagtcagagatcacacaaggtcttatgcaaaaggagtggctcaagaatgttaccgagaggactgtgccgttaaaggtgcaacagaccgttgatccagggcttacttctctggttcgctatctcattcatgactcttctcaatatatatccgggaatacatacattgttgattccggtgctacattgcccggtgtgcctatcttttcatctctctgaaaatcgaaccttataatatcttatcttgtgcaataataagtgaatacatttaccc

SEQ ID NO: 21598 - protein, 291 aa, Arabidopsis thaliana
  peptide (1)..(291): Ceres Seq. ID no. 12370044
WPSNTPHRENNMSNHQTQVLKLLEPWCELKDKVVLVTGASSGIGREICLDLAKAGCQVIAAARRVDRLNSLCSEINSFSSTGIQAAALELDVSSDAATIQKAVREAWDIFGKIDALINNAGIRGNVKSSLDLSEDEWDNVFKTNLKGPWLVSKHVCMLMRDAKRGGSVINISSIAGIRGMLPGGLAYACSKGGVDTMSRMMALELGVHKIRVNSIAPGLFKSEITQGLMQKEWLKNVTERTVPLKVQQTVDPGLTSLVRYLIHDSSQYISGNTYIVDSGATLPGVPIFSSL

SEQ ID NO: 21599 - protein, 280 aa, Arabidopsis thaliana
  peptide (1)..(280): Ceres Seq. ID no. 12370045
MSNHQTQVLKLLEPWCELKDKVVLVTGASSGIGREICLDLAKAGCQVIAAARRVDRLNSLCSEINSFSSTGIQAAALELDVSSDAATIQKAVREAWDIFGKIDALINNAGIRGNVKSSLDLSEDEWDNVFKTNLKGPWLVSKHVCMLMRDAKRGGSVINISSIAGIRGMLPGGLAYACSKGGVDTMSRMMALELGVHKIRVNSIAPGLFKSEITQGLMQKEWLKNVTERTVPLKVQQTVDPGLTSLVRYLIHDSSQYISGNTYIVDSGATLPGVPIFSSL

SEQ ID NO: 21600 - DNA, 1127 bp, Arabidopsis thaliana
  misc_feature (1)..(1127): Ceres Seq. ID no. 12332941
  misc_feature (1)..(1127): Ortholog of  Ceres SEQ ID NO 15172958 as cited in SEQ ID NO 51206
  misc_feature (1)..(1127): Ortholog of  Ceres SEQ ID NO 15171139 as cited in SEQ ID NO 60093
aaccattctctcttctcttctttatctcaaactctttcttcttccaaatcataaaccatggcaacatgcatccacacatgccgaaccggtaatacccaagacgatgattcccggttctgttgcatcaataaattcttccgacccggtttctctgtcaaccggaagatccaccacacccaaatcgaagatgacgatgatgtctggatcaagatgctcaaagaagccgaatccgatgttaaacaagaacccattttgtcaaactactactacgcttcgatcacatctcatcgatctttagagtctgctttaggtcacatcctctccgtaaagctcagcaatttaaacctaccaagcaacacactcttcgaactgttcataagcgttttagaagaaagccctgagatcatcgaatccacgaagcaagatcttatagcagtcaaagaaagagacccagcttgtataagctacgttcattgcttcttgggcttcaaaggcttcctcgcttgtcaagctcatcgaatagctcataccctctggaaacagaacagaaaaatcgtagctttattgatccaaaacagagtatcagaatctttcgccgtcgatattcatcccggagcgaagatcggaaaagggattcttttagaccatgcgacgggcgtggttatcggagagacggcggtggttggagacaatgtttcgattctacacggagtgaccttgggaggaacagggaaacagagtggtgatcggcatccgaagattggtgatggtgtgttgattggagctgggagttgtatattggggaatataacaatcggtgagggagctaagattggatcagggtcggtggtggttaaggatgtgccggcgcgtacgacggcggttggaaatccggcgaggttgattggtgggaaagagaatccgagaaaacatgataagattccttgtctgactatggaccagacatcgtatttaaccgagtggtctgattatgtgatttaacacaaatgtgtatttctttctttcttgtaactgatgatgatgaaacaagtcttgtctatttcttaatattttactatgtactaatcaaacaagtcttgaaatcaagctcatcgatctttaagaag

SEQ ID NO: 21601 - protein, 314 aa, Arabidopsis thaliana
  peptide (1)..(314): Ceres Seq. ID no. 12332942
MATCIHTCRTGNTQDDDSRFCCINKFFRPGFSVNRKIHHTQIEDDDDVWIKMLKEAESDVKQEPILSNYYYASITSHRSLESALGHILSVKLSNLNLPSNTLFELFISVLEESPEIIESTKQDLIAVKERDPACISYVHCFLGFKGFLACQAHRIAHTLWKQNRKIVALLIQNRVSESFAVDIHPGAKIGKGILLDHATGVVIGETAVVGDNVSILHGVTLGGTGKQSGDRHPKIGDGVLIGAGSCILGNITIGEGAKIGSGSVVVKDVPARTTAVGNPARLIGGKENPRKHDKIPCLTMDQTSYLTEWSDYVI

SEQ ID NO: 21602 - protein, 263 aa, Arabidopsis thaliana
  peptide (1)..(263): Ceres Seq. ID no. 12332943
MLKEAESDVKQEPILSNYYYASITSHRSLESALGHILSVKLSNLNLPSNTLFELFISVLEESPEIIESTKQDLIAVKERDPACISYVHCFLGFKGFLACQAHRIAHTLWKQNRKIVALLIQNRVSESFAVDIHPGAKIGKGILLDHATGVVIGETAVVGDNVSILHGVTLGGTGKQSGDRHPKIGDGVLIGAGSCILGNITIGEGAKIGSGSVVVKDVPARTTAVGNPARLIGGKENPRKHDKIPCLTMDQTSYLTEWSDYVI

SEQ ID NO: 21603 - DNA, 1210 bp, Arabidopsis thaliana
  misc_feature (1)..(1210): Ceres Seq. ID no. 13492950
  misc_feature (1)..(1210): Ortholog of  Ceres SEQ ID NO 15171366 as cited in SEQ ID NO 51578
  misc_feature (1)..(1210): Ortholog of  Ceres SEQ ID NO 14308536 as cited in SEQ ID NO 55469
  misc_feature (1)..(1210): Ortholog of  Ceres SEQ ID NO 15179772 as cited in SEQ ID NO 64248
ctcttatttactttagtcctctcgaatcccataaagtccacaactctctccttgtagagagagagattttatggcggtggagctcatgactcggaattacatctccggcgtcggagctgatagcttcgccgttcaagaagcagctgcttcaggactcaaaagtatcgaaaatttcatcggtttaatgtctcgtgatagctttaactctgatcagccatcttcttcttccgcctccgcctccgcctccgcctccgcctccgcctccgccgccgcagatcttgaatcagctcgtaacacaacggcggacgcggctgtttcaaagtttaaaagagtcatatctctcttagatcgaactcgaaccggacacgcccggtttagacgtgctccggttcatgttatttctccggttcttttacaagaagaaccaaaaacgacgccgtttcagtctcctcttcctcctccgccgcaaatgatccgaaaaggttcgttttcttcatcgatgaaaacgattgatttctcatctctctcctctgtaacaacggaatcagacaaccagaagaagattcatcatcatcaacgtccctctgaaacggcgccgtttgcgtctcaaactcaaagcctctccacgacggtctcgtctttctcaaaatcaacaaagagaaaatgtaactctgagaatcttctcaccggaaaatgcgcttccgcttcttcctccggtcgttgtcattgctcgaagaaaagaaagataaaacagaggagaataattagggttccggcgataagtgcaaaaatgtccgatgtaccaccggacgattattcatggaggaaatacggacaaaaaccaattaaaggatctccacatccaagaggatattataagtgtagtagcgtaagaggttgtccagcacgtaaacatgttgagagagcagctgatgattcgtccatgttgattgttacttatgaaggagatcataatcattctctctccgccgctgatctcgccggagccgccgttgctgatcttattttggaatcgtcttgaaaagaacaaatctttatttaaggcttttataatataaatttagatccttacttagtgaagtactcaaactatgaatgaaatcaatgtaatcaaaatcaaaaagcttttgctaaatttcgatttgttagttttttggattgttaaattataaattgtgatatattcacc

SEQ ID NO: 21604 - protein, 323 aa, Arabidopsis thaliana
  peptide (1)..(323): Ceres Seq. ID no. 13492951
MAVELMTRNYISGVGADSFAVQEAAASGLKSIENFIGLMSRDSFNSDQPSSSSASASASASASASAAADLESARNTTADAAVSKFKRVISLLDRTRTGHARFRRAPVHVISPVLLQEEPKTTPFQSPLPPPPQMIRKGSFSSSMKTIDFSSLSSVTTESDNQKKIHHHQRPSETAPFASQTQSLSTTVSSFSKSTKRKCNSENLLTGKCASASSSGRCHCSKKRKIKQRRIIRVPAISAKMSDVPPDDYSWRKYGQKPIKGSPHPRGYYKCSSVRGCPARKHVERAADDSSMLIVTYEGDHNHSLSAADLAGAAVADLILESS

SEQ ID NO: 21605 - protein, 318 aa, Arabidopsis thaliana
  peptide (1)..(318): Ceres Seq. ID no. 13492952
MTRNYISGVGADSFAVQEAAASGLKSIENFIGLMSRDSFNSDQPSSSSASASASASASASAAADLESARNTTADAAVSKFKRVISLLDRTRTGHARFRRAPVHVISPVLLQEEPKTTPFQSPLPPPPQMIRKGSFSSSMKTIDFSSLSSVTTESDNQKKIHHHQRPSETAPFASQTQSLSTTVSSFSKSTKRKCNSENLLTGKCASASSSGRCHCSKKRKIKQRRIIRVPAISAKMSDVPPDDYSWRKYGQKPIKGSPHPRGYYKCSSVRGCPARKHVERAADDSSMLIVTYEGDHNHSLSAADLAGAAVADLILESS

SEQ ID NO: 21606 - protein, 285 aa, Arabidopsis thaliana
  peptide (1)..(285): Ceres Seq. ID no. 13492953
MSRDSFNSDQPSSSSASASASASASASAAADLESARNTTADAAVSKFKRVISLLDRTRTGHARFRRAPVHVISPVLLQEEPKTTPFQSPLPPPPQMIRKGSFSSSMKTIDFSSLSSVTTESDNQKKIHHHQRPSETAPFASQTQSLSTTVSSFSKSTKRKCNSENLLTGKCASASSSGRCHCSKKRKIKQRRIIRVPAISAKMSDVPPDDYSWRKYGQKPIKGSPHPRGYYKCSSVRGCPARKHVERAADDSSMLIVTYEGDHNHSLSAADLAGAAVADLILESS

SEQ ID NO: 21607 - DNA, 1039 bp, Arabidopsis thaliana
  misc_feature (1)..(1039): Ceres Seq. ID no. 12348537
  misc_feature (1)..(1039): Ortholog of  Ceres SEQ ID NO 12618205 as cited in SEQ ID NO 65153
atatcatctcctgctaaaagcctaaaaagctaaaactagtcgtgactcgtcgtcgtctgatattaccagattcctgagaatttgagcctaatccttcatcaccaagctaagtctcaagatctgattgtggttgtggttgacttcttcttcaaaggtttcacgagtacaataatgagtcaaaagggtttgatatatagctttgttgctaaaggaacagttgttctagcagagcatactccttattcaggaaactttagcaccattgctgttcaatgtctgcagaagctacccacaaatagcagcaagtatacttactcttgcgatggtcatactttcaatttccttgttgacaatggctttgtgtttctagtggttgctgatgagtccaccggaagaagtgttcctttcgtgtttctcgaacgggtcaaggaagactttaagaagcggtatgaagcgagtataaagaatgatgagcgacatcctcttgcggatgaggacgaagatgatgatttgtttggagatcggtttagcgttgcatacaatcttgacagggagttcgggcccatactaaaggagcatatgcagtattgtatgagccatccagaagagatgagcaaactttctaagttgaaggcccaaataactgaggtcaaggggatcatgatggacaacattgagaaggttctggacagaggagagaagatcgaacttctggttgacaaaaccgaaaacctacagttccaggcagatagcttccagagacaaggaaggcagttaagaaggaagatgtggctacagagtctgcagatgaagctgatggtggctggtgctgttttctcttttattctcatcgtttgggttgttgcttgtggaggtttcaaatgctcatcatgatgtttcgcttcgtttgtatctgttttaacacttaaattgcatgctcatgtttgtacatggaagaacttataataacatatcatcatatcatcatcatctcccacatgctgtgatgctatatatataaaaaaatgtttttgttttc

SEQ ID NO: 21608 - protein, 240 aa, Arabidopsis thaliana
  peptide (1)..(240): Ceres Seq. ID no. 12348538
MSQKGLIYSFVAKGTVVLAEHTPYSGNFSTIAVQCLQKLPTNSSKYTYSCDGHTFNFLVDNGFVFLVVADESTGRSVPFVFLERVKEDFKKRYEASIKNDERHPLADEDEDDDLFGDRFSVAYNLDREFGPILKEHMQYCMSHPEEMSKLSKLKAQITEVKGIMMDNIEKVLDRGEKIELLVDKTENLQFQADSFQRQGRQLRRKMWLQSLQMKLMVAGAVFSFILIVWVVACGGFKCSS

SEQ ID NO: 21609 - DNA, 1097 bp, Arabidopsis thaliana
  misc_feature (1)..(1097): Ceres Seq. ID no. 12340203
  misc_feature (1)..(1097): Ortholog of  Ceres SEQ ID NO 13595414 as cited in SEQ ID NO 56539
  misc_feature (1)..(1097): Ortholog of  Ceres SEQ ID NO 14314396 as cited in SEQ ID NO 60048
gcattaactgatttcacattcttcgataaggattttactctccaaagaaagaaaaaaaaacctcctctgcttttgtgatcctttaaggaaaaagacgaaatggcaacggaatcgtacgaagccgccattaaaggactcaatgatcttctcagtacgaaagcggatctcggaaacgtcgccgccgcgaagatcaaagcgttgacggcggagctaaaggagcttgactcaagcaattcagacgcaattgaacgaatcaagaccggttttactcaattcaaaaccgagaaatatttgaagaatagtactttgttcaatcatcttgccaagactcagaccccaaagtttctggtgtttgcttgctctgattctcgagtttgtccatctcacatcttgaatttccaacctggtgaggcttttgttgtcagaaacatagccaatatggttccaccttttgaccagaagagacactctggagttggcgccgccgttgaatacgcagttgtacatctcaaggtggagaacattttggtgataggccatagctgctgtggtggtattaagggactcatgtccattgaagatgatgctgccccaactcaaagtgacttcattgaaaattgggtgaagataggcgcatcagcgaggaacaagatcaaggaggaacataaagacttgagctacgatgatcaatgcaacaagtgtgagaaggaagctgtgaacgtatcgcttggaaacttgctttcgtacccattcgtgagagctgaggtggtgaagaacacacttgcaataagaggaggtcactacaatttcgtcaaaggaacgtttgatctctgggagctcgatttcaagaccactcctgcttttgccttctcttaagaaagaaagctaccggaacatataaaactcttttgagataaaaaaagacactttgactcatctttcttcattctctcatgttgatgattcctctccaacttctttgatttctttttgttaattcaaaacttcaactttgctgcttctatttcaaaagctcaaacaataaagctgtaaccaacgtttgaaacttctatatttgtctaattgatgtttgaacc

SEQ ID NO: 21610 - protein, 258 aa, Arabidopsis thaliana
  peptide (1)..(258): Ceres Seq. ID no. 12340204
MATESYEAAIKGLNDLLSTKADLGNVAAAKIKALTAELKELDSSNSDAIERIKTGFTQFKTEKYLKNSTLFNHLAKTQTPKFLVFACSDSRVCPSHILNFQPGEAFVVRNIANMVPPFDQKRHSGVGAAVEYAVVHLKVENILVIGHSCCGGIKGLMSIEDDAAPTQSDFIENWVKIGASARNKIKEEHKDLSYDDQCNKCEKEAVNVSLGNLLSYPFVRAEVVKNTLAIRGGHYNFVKGTFDLWELDFKTTPAFAFS

SEQ ID NO: 21611 - protein, 145 aa, Arabidopsis thaliana
  peptide (1)..(145): Ceres Seq. ID no. 12340205
MVPPFDQKRHSGVGAAVEYAVVHLKVENILVIGHSCCGGIKGLMSIEDDAAPTQSDFIENWVKIGASARNKIKEEHKDLSYDDQCNKCEKEAVNVSLGNLLSYPFVRAEVVKNTLAIRGGHYNFVKGTFDLWELDFKTTPAFAFS

SEQ ID NO: 21612 - DNA, 1550 bp, Arabidopsis thaliana
  misc_feature (1)..(1550): Ceres Seq. ID no. 12576127
  misc_feature (1)..(1550): Ortholog of  Ceres SEQ ID NO 14311938 as cited in SEQ ID NO 51615
  misc_feature (1)..(1550): Ortholog of  Ceres SEQ ID NO 14302059 as cited in SEQ ID NO 68322
accaaactttacgatttctcctctctggaatctcgattctgtatgatctcttcgatctaatcgagtcttctaaacgttccgtgtagaatttcaaatctagggtttgctaaagcttgaacctttcttacccttttctctcgaagaggttttgattcctgggcatgaatttttccctaatcttgttaccttcgaagcataacaacaacgaaagatgtcagattcaatccaggaaagatacttagttggatacgcactcgcagccaagaaacagcatagtttcatccaaccttctttgatcgaacactcaaggcaacgaggcattgatctggtcaagcttgatccgacgaaatcgttgttggagcaagggaagcttgattgcataatccacaagctttacgatgtgtattggaaggagaatcttcatgagtttcgcgagaaatgtcctggtgttcctgtaatcgatttgcctgaggctatcgagcgattgcacaatagggtttcgatgcttgaggtgataactcaattgaggtttcctgtttcagatagcgagagatttggtgtcccggagcaagttgttgttatggattcgagcgtcttgagcggtggaggagctttaggggagcttaagtttccggtgattgctaagccgttggatgctgatgggagtgctaaatctcataagatgtttttgatttatgatcaagaagggatgaagattttgaaagctcctattgtgttgcaggagtttgtgaatcatggtggtgtgatctttaaggtctatgtggttggagatcatgtcaaatgtgtaaagagaagatctttacctgatatctctgaagagaagattgggacgtcgaaagggtctcttccgttttcgcagatatcgaatctgactgctcaagaggacaagaacattgagtatggtgaggataggagcttagagaaagtggaaatgcctccgttaagtttcttgacagatctagcaaaggccatgagggaatcaatgggactcaatctctttaacttcgacgtgattagggatgccaaagatgctaataggtaccttataattgatattaactactttcctggatatgctaagatgccctcttacgagcctgtgttgactgagttcttctgggacatggtcactaagaagaatcatgtctgagaaataatctgttggggagttagcaggaacattgttggggaggatttgtaccattgcaatgtgttgcaactgccattgcaattctggcctatggtgactagctgctttgctaattttcatttggattcttgaacttgtgctttttatatttttttagttgtttctcttttgtttacttccgagttttgcaaagccatgttcaaatgcataactgttgctactcttgaaaagcattgaatctctaaattcttggcaatgtggtctgttctcaactgttggtagtttgtgatttcttttcaagcttttatggtgcctgttttcttcctcaaatctgacaagactgagatatttgattaagcattggtataagttgattagt

SEQ ID NO: 21613 - protein, 319 aa, Arabidopsis thaliana
  peptide (1)..(319): Ceres Seq. ID no. 12576128
MSDSIQERYLVGYALAAKKQHSFIQPSLIEHSRQRGIDLVKLDPTKSLLEQGKLDCIIHKLYDVYWKENLHEFREKCPGVPVIDLPEAIERLHNRVSMLEVITQLRFPVSDSERFGVPEQVVVMDSSVLSGGGALGELKFPVIAKPLDADGSAKSHKMFLIYDQEGMKILKAPIVLQEFVNHGGVIFKVYVVGDHVKCVKRRSLPDISEEKIGTSKGSLPFSQISNLTAQEDKNIEYGEDRSLEKVEMPPLSFLTDLAKAMRESMGLNLFNFDVIRDAKDANRYLIIDINYFPGYAKMPSYEPVLTEFFWDMVTKKNHV

SEQ ID NO: 21614 - protein, 222 aa, Arabidopsis thaliana
  peptide (1)..(222): Ceres Seq. ID no. 12576129
MLEVITQLRFPVSDSERFGVPEQVVVMDSSVLSGGGALGELKFPVIAKPLDADGSAKSHKMFLIYDQEGMKILKAPIVLQEFVNHGGVIFKVYVVGDHVKCVKRRSLPDISEEKIGTSKGSLPFSQISNLTAQEDKNIEYGEDRSLEKVEMPPLSFLTDLAKAMRESMGLNLFNFDVIRDAKDANRYLIIDINYFPGYAKMPSYEPVLTEFFWDMVTKKNHV

SEQ ID NO: 21615 - protein, 196 aa, Arabidopsis thaliana
  peptide (1)..(196): Ceres Seq. ID no. 12576130
MDSSVLSGGGALGELKFPVIAKPLDADGSAKSHKMFLIYDQEGMKILKAPIVLQEFVNHGGVIFKVYVVGDHVKCVKRRSLPDISEEKIGTSKGSLPFSQISNLTAQEDKNIEYGEDRSLEKVEMPPLSFLTDLAKAMRESMGLNLFNFDVIRDAKDANRYLIIDINYFPGYAKMPSYEPVLTEFFWDMVTKKNHV

SEQ ID NO: 21616 - DNA, 889 bp, Arabidopsis thaliana
  misc_feature (1)..(889): Ceres Seq. ID no. 12369956
  misc_feature (1)..(889): Ortholog of  Ceres SEQ ID NO 14304209 as cited in SEQ ID NO 56460
  misc_feature (1)..(889): Ortholog of  Ceres SEQ ID NO 12615635 as cited in SEQ ID NO 63133
  misc_feature (1)..(889): Ortholog of  Ceres SEQ ID NO 12586351 as cited in SEQ ID NO 64028
  misc_feature (1)..(889): Ortholog of  Ceres SEQ ID NO 14301603 as cited in SEQ ID NO 67721
  misc_feature (1)..(889): Ortholog of  Ceres SEQ ID NO 15177482 as cited in SEQ ID NO 0
tataacacacactcgcttgttcacgcacaacaaaaagcaagaatatataccactttgtgaacttcagagatcctatagcaatggcgaacctaccgattcttttggattactggccaagtatgttcgggatgagggctagagttgcgttgcgagagaaaggtgttgagtttgaatacagagaggaagatttctcgaacaagagccctttactcctccagagtaatcccattcacaagaaaatcccggttctggtccacaacggtaaaccggtatgtgaatctcttaacgttgtccagtacgtcgacgaggcttggcccgagaagaacccgttcttcccttccgatccttacgggagagctcaggctcgattctgggctgatttcgtggacaagaagttcaccgacgcccaattcaaggtatgggggaagaaaggtgaggaacaagaagcaggcaagaaggaatttattgaggcagtgaagattcttgaatctgagctaggagataaaccttactttggtggagatagctttgggtatgtagacatttccttgattacattctcgagttggttccaagcctatgagaagtttggtaactttagcatcgagtcagagagtccgaaactgatcgcttgggcaaagcggtgcatggagaaagagagtgtgtctaagtctctccctgactctgagaagattgttgcatatgctgctgagtataggaagaacaatctctgatttgaataatcttgttgttctcttgttgctaagctgtgttctgtttttgtctttgtttttttttttcccctaataatgcgagagagccttagtgaatgtgtgttgtggtttttatgcatcctaagtatggaatttaaataaaatttgtttcgact

SEQ ID NO: 21617 - protein, 217 aa, Arabidopsis thaliana
  peptide (1)..(217): Ceres Seq. ID no. 12369957
MANLPILLDYWPSMFGMRARVALREKGVEFEYREEDFSNKSPLLLQSNPIHKKIPVLVHNGKPVCESLNVVQYVDEAWPEKNPFFPSDPYGRAQARFWADFVDKKFTDAQFKVWGKKGEEQEAGKKEFIEAVKILESELGDKPYFGGDSFGYVDISLITFSSWFQAYEKFGNFSIESESPKLIAWAKRCMEKESVSKSLPDSEKIVAYAAEYRKNNL

SEQ ID NO: 21618 - protein, 204 aa, Arabidopsis thaliana
  peptide (1)..(204): Ceres Seq. ID no. 12369958
MFGMRARVALREKGVEFEYREEDFSNKSPLLLQSNPIHKKIPVLVHNGKPVCESLNVVQYVDEAWPEKNPFFPSDPYGRAQARFWADFVDKKFTDAQFKVWGKKGEEQEAGKKEFIEAVKILESELGDKPYFGGDSFGYVDISLITFSSWFQAYEKFGNFSIESESPKLIAWAKRCMEKESVSKSLPDSEKIVAYAAEYRKNNL

SEQ ID NO: 21619 - protein, 201 aa, Arabidopsis thaliana
  peptide (1)..(201): Ceres Seq. ID no. 12369959
MRARVALREKGVEFEYREEDFSNKSPLLLQSNPIHKKIPVLVHNGKPVCESLNVVQYVDEAWPEKNPFFPSDPYGRAQARFWADFVDKKFTDAQFKVWGKKGEEQEAGKKEFIEAVKILESELGDKPYFGGDSFGYVDISLITFSSWFQAYEKFGNFSIESESPKLIAWAKRCMEKESVSKSLPDSEKIVAYAAEYRKNNL

SEQ ID NO: 21620 - DNA, 776 bp, Arabidopsis thaliana
  misc_feature (1)..(776): Ceres Seq. ID no. 12333448
  misc_feature (1)..(776): Ortholog of  Ceres SEQ ID NO 13597809 as cited in SEQ ID NO 64598
  misc_feature (1)..(776): Ortholog of  Ceres SEQ ID NO 12617960 as cited in SEQ ID NO 69051
  misc_feature (1)..(776): Ortholog of  Ceres SEQ ID NO 13589401 as cited in SEQ ID NO 0
ataagttgcctaataaacctatttctccgttcgttctctccctctctctcgcttcacgttggatcgaaatcggacaaaagtaaacgacaatggcggaagaattggagaaatctatgcacaaggaagaatctctgatggaaaagatcgctgataagatccacgatcacgactcttcgtcgtcgtctgattccgagcacgagaaaccagagtctccgtcagctttgaaggccaagatatatcgtttgtttggtagagagaagcctgttcataaggttctcggtggtggcttaccggctgatgtgttcttgtggagggacaaaaaactctcagcttctgttcttggtgtagcgactgcgatatgggttctgtttgaattggttgagtatcatttcttgagtcttgtgtgtcacattttgatattcgctctcgcagccctgtttttattgtccaatgctcatgcctttatgaacaagactccacctaaaattcctgaaatccatattaaagaggaacatttccttttgattgtttctgcactgagaaacgagctcaaccaggcctttgttattctaaggagcattgccctaggaagggacttgaagaaatttctcatggtggtttgtgggctgtggataatctcggttgtgggaaactggttcaacttcttgactcttgtatacatctgttttgtggtgttacatacagtaccaatgttgtatgagaaacatgaggacaaggtagatccagtggcagagaagacgttgaaggagctgaag

SEQ ID NO: 21621 - protein, 229 aa, Arabidopsis thaliana
  peptide (1)..(229): Ceres Seq. ID no. 12333449
MAEELEKSMHKEESLMEKIADKIHDHDSSSSSDSEHEKPESPSALKAKIYRLFGREKPVHKVLGGGLPADVFLWRDKKLSASVLGVATAIWVLFELVEYHFLSLVCHILIFALAALFLLSNAHAFMNKTPPKIPEIHIKEEHFLLIVSALRNELNQAFVILRSIALGRDLKKFLMVVCGLWIISVVGNWFNFLTLVYICFVVLHTVPMLYEKHEDKVDPVAEKTLKELK

SEQ ID NO: 21622 - protein, 221 aa, Arabidopsis thaliana
  peptide (1)..(221): Ceres Seq. ID no. 12333450
MHKEESLMEKIADKIHDHDSSSSSDSEHEKPESPSALKAKIYRLFGREKPVHKVLGGGLPADVFLWRDKKLSASVLGVATAIWVLFELVEYHFLSLVCHILIFALAALFLLSNAHAFMNKTPPKIPEIHIKEEHFLLIVSALRNELNQAFVILRSIALGRDLKKFLMVVCGLWIISVVGNWFNFLTLVYICFVVLHTVPMLYEKHEDKVDPVAEKTLKELK

SEQ ID NO: 21623 - protein, 214 aa, Arabidopsis thaliana
  peptide (1)..(214): Ceres Seq. ID no. 12333451
MEKIADKIHDHDSSSSSDSEHEKPESPSALKAKIYRLFGREKPVHKVLGGGLPADVFLWRDKKLSASVLGVATAIWVLFELVEYHFLSLVCHILIFALAALFLLSNAHAFMNKTPPKIPEIHIKEEHFLLIVSALRNELNQAFVILRSIALGRDLKKFLMVVCGLWIISVVGNWFNFLTLVYICFVVLHTVPMLYEKHEDKVDPVAEKTLKELK

SEQ ID NO: 21624 - DNA, 1625 bp, Arabidopsis thaliana
  misc_feature (1)..(1625): Ceres Seq. ID no. 13603067
  misc_feature (1)..(1625): Ortholog of  Ceres SEQ ID NO 14303850 as cited in SEQ ID NO 53464
  misc_feature (1)..(1625): Ortholog of  Ceres SEQ ID NO 15176262 as cited in SEQ ID NO 54751
  misc_feature (1)..(1625): Ortholog of  Ceres SEQ ID NO 13656177 as cited in SEQ ID NO 64997
ctctttcggatattccaccagtctctcgcaatcttcgctcttctctttgctctctctctctcaacgcggttcagatccgagtttgggagattcaagctccctgaaaaaagccctttactctcgcttaccaactttgctccagcatggcaggatctgcaccagaaggcacacagtttgatgcacgtcagtttgaccagaaactcaatgaagtacttgagggacaagatgagttcttcacatcctatgatgatgttcatgagagctttgatgccatgggtcttcaagagaaccttctcaggggtatttatgcttatggttttgagaagccttctgctattcagcaaagaggaatcgtccccttctgtaagggtcttgatgtgattcaacaggctcagtctggtactgggaaaacagcaactttctgctctggtgtcttgcagcagctggacttctcccttatccagtgtcaggctttggttctagctccaactagagagcttgctcagcaaattgagaaggtcatgagggcccttggtgattaccttggtgtcaaggttcacgcctgtgttggtggaaccagtgtccgtgaggatcagcgcatcctccaagctggtgtccatgttgttgttggaactccagggcgtgtctttgacatgttgaagaggcagtctcttcgtgctgacaacatcaagatgtttgttctcgatgaagctgatgaaatgctctcccgtggtttcaaggaccagatctatgacatattccagcttcttccaccaaagatccaagttggtgtgttctccgcaacaatgccaccagaagctcttgagatcacaaggaagttcatgagcaagccagtgagaatcttggtgaagcgtgatgagcttacccttgaaggtatcaagcagttctacgtcaacgttgagaaagaagagtggaagctcgagacactctgtgatctctacgagactcttgccatcactcagagtgtcatcttcgtgaacaccaggcgtaaggttgattggctcacagacaaaatgagaagccgtgaccacacagtctctgcaactcacggagacatggaccagaacaccagggacatcatcatgagagagttcaggtctggttcctcccgtgttctcatcaccactgacctcttagctcgtggtattgatgtccaacaagtctccctggttatcaacttcgatctcccaactcagccagagaactaccttcaccgtatcggaagaagtggaaggttcgggagaaagggtgttgcgatcaatttcgtgacccgtgatgatgagaggatgctgtttgatattcagaaattctacaatgtggttgtcgaagagctgccttcgaacgtggccgatctgctgtgaagggagaaaagaagtcggttctgttgctgtgtttgctctgccgtactagtatcaccggagaagaaaggttttcttgttttgcaaggcactctttgatctgattttgacccgtcgtctatcagcgatttacatttcttaaattttcttagttgttgttctctcctctctctcccagctacgaacatatctctctcttcttgaccatttttaagtttaagtcatatggagtatttatttcttcac

SEQ ID NO: 21625 - protein, 412 aa, Arabidopsis thaliana; identical to SEQ ID NO: 21228
  peptide (1)..(412): Ceres Seq. ID no. 13603068

SEQ ID NO: 21626 - protein, 369 aa, Arabidopsis thaliana; identical to SEQ ID NO: 21229
  peptide (1)..(369): Ceres Seq. ID no. 13603069

SEQ ID NO: 21627 - protein, 286 aa, Arabidopsis thaliana; identical to SEQ ID NO: 21230
  peptide (1)..(286): Ceres Seq. ID no. 13603070

SEQ ID NO: 21628 - DNA, 903 bp, Arabidopsis thaliana
  misc_feature (1)..(903): Ceres Seq. ID no. 12333566
  misc_feature (1)..(903): Ortholog of  Ceres SEQ ID NO 13599287 as cited in SEQ ID NO 338
gacttctgagatcgtcttgttcaccaaagagaagaagactaactgtgttttttttttctttcctcgatgcctagatcaagcagatgggtcaatcagcgagctacctctaagattaaaaaatttatactctttttgggtgtagcctttgtcttctacctctacagatacccttcttcgccatcgacggtggaacaatcatccacttccatctacaacatttccgttaaggatattgaagggaaagatgtgagtttgagcaagtttaccgggaaagtgcttcttatagtcaatgtagcctctaagtgtggtctaacacatggaaactacaaagaaatgaacattctgtatgccaagtacaaaactcaggggtttgagatcttagcatttccttgcaaccaatttggtagtcaagagccaggcagcaacatggagatcaaggaaaccgtttgcaatatcttcaaagcagaattcccaatctttgacaagattgaagtaaatggaaagaacacttgtcccctttacaatttcttaaaagaacaaaaaggaggattgtttggggatgctattaagtggaatttcgcaaagtttctggtagacagacaaggaaatgtcgttgaccgatatgctccaactacatcacctcttgaaattgagaaggatatcgtcaagctattggcatctgcttgaacatatatgtcaaaggacaggagagcaaaaagcatcgcatcaaacatgtctgagactgagaatgaaaaccactttctatacttattctttacctttcatgtttatccaaaaccatccatggaaaagaagatgcttgtctgaatctgtgaacctcattttctgtaacaaaaccccaaaaatgcttatgaaacatcaataaagaacaaagttttattt

SEQ ID NO: 21629 - protein, 206 aa, Arabidopsis thaliana
  peptide (1)..(206): Ceres Seq. ID no. 12333567
MPRSSRWVNQRATSKIKKFILFLGVAFVFYLYRYPSSPSTVEQSSTSIYNISVKDIEGKDVSLSKFTGKVLLIVNVASKCGLTHGNYKEMNILYAKYKTQGFEILAFPCNQFGSQEPGSNMEIKETVCNIFKAEFPIFDKIEVNGKNTCPLYNFLKEQKGGLFGDAIKWNFAKFLVDRQGNVVDRYAPTTSPLEIEKDIVKLLASA

SEQ ID NO: 21630 - protein, 117 aa, Arabidopsis thaliana
  peptide (1)..(117): Ceres Seq. ID no. 12333568
MNILYAKYKTQGFEILAFPCNQFGSQEPGSNMEIKETVCNIFKAEFPIFDKIEVNGKNTCPLYNFLKEQKGGLFGDAIKWNFAKFLVDRQGNVVDRYAPTTSPLEIEKDIVKLLASA

SEQ ID NO: 21631 - DNA, 775 bp, Arabidopsis thaliana
  misc_feature (1)..(775): Ceres Seq. ID no. 12332713
  misc_feature (1)..(775): Ortholog of  Ceres SEQ ID NO 14302588 as cited in SEQ ID NO 0
caatgaagattatggagaagcagtttctggattctttggtgttaccggcgctgcccccaaggttcttgtatacactggtaatgaagatatgaggaagtttattctggacggtgaattgaccgtaaataacattaagacacttgcggaagatttcctagcagacaaactgaagcctttctacaagtcagatccactaccggaaaataacgatggtgatgttaaggtcattgtgggaaacaattttgatgagattgttcttgacgagtcaaaggatgttcttctcgagatatatgctccttggtgtggccactgccaatcatttgagccgatttacaacaagcttggaaagtatttaaaaggcattgactcgttagttgtagcaaagatggatggtaccagcaatgagcatcctagagcaaaggctgatgggttcccaacaatcctgttcttccctggtggaaacaaaagcttcgatccgatcgctgtggatgttgaccgtacagtagtggaactgtacaaattcctgaagaagcacgcatcaatcccatttaaacttgagaaaccggcgacacctgaaccggtgatctcgaccatgaaatctgatgagaagatcgagggtgatagttccaaggatgagttgtgatgatcggaacagagtgtgtaacaaggctatagatgatgactcttctataaatgatagaaaatgttttgccctttgtttttttccattgttgtatgctatgaaatgaataattaaaagaagttttggtttctc

SEQ ID NO: 21632 - protein, 213 aa, Arabidopsis thaliana
  peptide (1)..(213): Ceres Seq. ID no. 12332714
NEDYGEAVSGFFGVTGAAPKVLVYTGNEDMRKFILDGELTVNNIKTLAEDFLADKLKPFYKSDPLPENNDGDVKVIVGNNFDEIVLDESKDVLLEIYAPWCGHCQSFEPIYNKLGKYLKGIDSLVVAKMDGTSNEHPRAKADGFPTILFFPGGNKSFDPIAVDVDRTVVELYKFLKKHASIPFKLEKPATPEPVISTMKSDEKIEGDSSKDEL

SEQ ID NO: 21633 - protein, 184 aa, Arabidopsis thaliana
  peptide (1)..(184): Ceres Seq. ID no. 12332715
MRKFILDGELTVNNIKTLAEDFLADKLKPFYKSDPLPENNDGDVKVIVGNNFDEIVLDESKDVLLEIYAPWCGHCQSFEPIYNKLGKYLKGIDSLVVAKMDGTSNEHPRAKADGFPTILFFPGGNKSFDPIAVDVDRTVVELYKFLKKHASIPFKLEKPATPEPVISTMKSDEKIEGDSSKDEL

SEQ ID NO: 21634 - DNA, 638 bp, Arabidopsis thaliana
  misc_feature (1)..(638): Ceres Seq. ID no. 12332709
  misc_feature (1)..(638): Ortholog of  Ceres SEQ ID NO 12610597 as cited in SEQ ID NO 56210
  misc_feature (1)..(638): Ortholog of  Ceres SEQ ID NO 12597985 as cited in SEQ ID NO 61061
aaaatcaatcagacgagaagaagattatccatcgccatgggacaagtctttaacaagctccgaggtaaagagtggagacataagcaggtacaagcgatatgtgatcgtgttttcgatcggttcaagatgcaaaccggaagagccaatcttacgtttgaagagttatacatcgctgttcttctcgtttacaatgacataaacaagagattgcctggtcctcatttcgatccaccttctaaggatctagtcaatagcattatgacggactgtgatatcaacttggatggagaacttgatagggaagagtttgtgaagtttattgagcagattacggctgagacgtttaacgtggttagtcagggtttgatcatagctttgattgttgctcccactgtggctattgcgacgaagaaggccacggaaggtgtccctggagttggcaaagttgtgcagaagctgcctacttcaatctatgcttctcttgtgactcttgcagttatgtgggtgaattctgattcaagttaagcttctcatattgtcaccataataaatgtgtttataactcaactgctacgaaaatatagaaacaacgcacggattggttgaacggttggataatactatttttttctgatttg

SEQ ID NO: 21635 - protein, 174 aa, Arabidopsis thaliana
  peptide (1)..(174): Ceres Seq. ID no. 12332710
KINQTRRRLSIAMGQVFNKLRGKEWRHKQVQAICDRVFDRFKMQTGRANLTFEELYIAVLLVYNDINKRLPGPHFDPPSKDLVNSIMTDCDINLDGELDREEFVKFIEQITAETFNVVSQGLIIALIVAPTVAIATKKATEGVPGVGKVVQKLPTSIYASLVTLAVMWVNSDSS

SEQ ID NO: 21636 - protein, 162 aa, Arabidopsis thaliana
  peptide (1)..(162): Ceres Seq. ID no. 12332711
MGQVFNKLRGKEWRHKQVQAICDRVFDRFKMQTGRANLTFEELYIAVLLVYNDINKRLPGPHFDPPSKDLVNSIMTDCDINLDGELDREEFVKFIEQITAETFNVVSQGLIIALIVAPTVAIATKKATEGVPGVGKVVQKLPTSIYASLVTLAVMWVNSDSS

SEQ ID NO: 21637 - protein, 132 aa, Arabidopsis thaliana
  peptide (1)..(132): Ceres Seq. ID no. 12332712
MQTGRANLTFEELYIAVLLVYNDINKRLPGPHFDPPSKDLVNSIMTDCDINLDGELDREEFVKFIEQITAETFNVVSQGLIIALIVAPTVAIATKKATEGVPGVGKVVQKLPTSIYASLVTLAVMWVNSDSS

SEQ ID NO: 21638 - DNA, 981 bp, Arabidopsis thaliana
  misc_feature (1)..(981): Ceres Seq. ID no. 12574569
  misc_feature (1)..(981): Ortholog of  Ceres SEQ ID NO 14304209 as cited in SEQ ID NO 56460
  misc_feature (1)..(981): Ortholog of  Ceres SEQ ID NO 12586351 as cited in SEQ ID NO 64028
  misc_feature (1)..(981): Ortholog of  Ceres SEQ ID NO 14301603 as cited in SEQ ID NO 67721
  misc_feature (1)..(981): Ortholog of  Ceres SEQ ID NO 15177482 as cited in SEQ ID NO 0
cttacaggtagtgtcccaaccaaacaaatcgagaaagacgaacacttacaaaaaaaaatctctttgtgagctttagcgatcgtaacaatggcgaacgaggtgattcttcttgatttctggccgagtatgttcgggatgaggacaaggatcgcattgagggagaaaggtgttgaatttgagtacagagaagaagatctaaggaacaagagtcctttgcttctccagatgaatccgattcacaagaagattcctgttctcatccacaatggtaaaccggttaacgaatctatcatccaggttcagtacattgacgaggtctggtctcacaagaaccctatccttccttctgatccttacctgagagctcaagctaggttctgggctgatttcattgacaagaagctgtatgatgctcagaggaaggtgtgggcgacaaagggtgaggaacaagaggcagggaagaaggatttcattgagatactcaagactcttgaatctgagcttggagacaaaccttactttagtggcgatgactttggctatgtagacattgcgttgattggattctacacatggtttccagcatacgagaagtttgctaacttcagtatcgaatctgaggttccgaaactgattgcttgggttaagaagtgtttgcagagggagagcgtggctaagtccttgcctgatcctgagaaggttactgaattcgtctctgagctcaggaagaaatttgtacctgagtaaatatgtttctcttgtcatatggttcggacttaagatgctctctgttttactttcgtgtgttgtctttcttaaataatgcagagcatctgtgaggtggtttgagtgtagagaatgtatgtctttgctgtagcagattcctgtgttttctggatttaatggcttgtcctagtttttatgcattgtaactatgagtttaattaatgatcgttaatctataatgattattaatttgtt

SEQ ID NO: 21639 - protein, 219 aa, Arabidopsis thaliana
  peptide (1)..(219): Ceres Seq. ID no. 12574570
MANEVILLDFWPSMFGMRTRIALREKGVEFEYREEDLRNKSPLLLQMNPIHKKIPVLIHNGKPVNESIIQVQYIDEVWSHKNPILPSDPYLRAQARFWADFIDKKLYDAQRKVWATKGEEQEAGKKDFIEILKTLESELGDKPYFSGDDFGYVDIALIGFYTWFPAYEKFANFSIESEVPKLIAWVKKCLQRESVAKSLPDPEKVTEFVSELRKKFVPE

SEQ ID NO: 21640 - protein, 206 aa, Arabidopsis thaliana
  peptide (1)..(206): Ceres Seq. ID no. 12574571
MFGMRTRIALREKGVEFEYREEDLRNKSPLLLQMNPIHKKIPVLIHNGKPVNESIIQVQYIDEVWSHKNPILPSDPYLRAQARFWADFIDKKLYDAQRKVWATKGEEQEAGKKDFIEILKTLESELGDKPYFSGDDFGYVDIALIGFYTWFPAYEKFANFSIESEVPKLIAWVKKCLQRESVAKSLPDPEKVTEFVSELRKKFVPE

SEQ ID NO: 21641 - protein, 203 aa, Arabidopsis thaliana
  peptide (1)..(203): Ceres Seq. ID no. 12574572
MRTRIALREKGVEFEYREEDLRNKSPLLLQMNPIHKKIPVLIHNGKPVNESIIQVQYIDEVWSHKNPILPSDPYLRAQARFWADFIDKKLYDAQRKVWATKGEEQEAGKKDFIEILKTLESELGDKPYFSGDDFGYVDIALIGFYTWFPAYEKFANFSIESEVPKLIAWVKKCLQRESVAKSLPDPEKVTEFVSELRKKFVPE

SEQ ID NO: 21642 - DNA, 1940 bp, Arabidopsis thaliana
  misc_feature (1)..(1940): Ceres Seq. ID no. 12466491
  misc_feature (1)..(1940): Ortholog of  Ceres SEQ ID NO 13654989 as cited in SEQ ID NO 63117
  misc_feature (1)..(1940): Ortholog of  Ceres SEQ ID NO 13584744 as cited in SEQ ID NO 69137
ctctcttgcccgcttcgtgcccgtctcttctctcttcttcgtattctctctccacagacatgaattccctttttgactaacctcctttttcccctaataagtgaatcttacttcttcttctcgccaagatcaaatttctgggattcttcttcttctctctaattcccttgcgtttgtttcctctgatcaagttccgtcctttttcctttttttgttcttgagttctcgtttgagctgctttttgggggagatgggtttcgattctgttaaagttatggagaattggcaatccaagacatctaatgagaatgagaagaagaagaagaagcggaggaggaagaagaacaacaatgtcagaaacagtgaacattatgaagaagaagcaaatgggtgttgggtcaaatttaggtatatagtctgttgcgcttcttcaacatcagacgttgagacctctctcactctctctactagcactgtgggaagtcagtccgcaattgtgcaatcaaatgaccaaccggttggcccagtctcttctactactacaactagcaatgcagaaagctctttgtccactcctatcataagtgaagaacttaacatctattctcaccttaagaagttttctttcattgatctcaagttggctactagaaatttcagacctgaaagccttctcggagaaggtggctttggttgtgtcttcaaaggctgggtcgaggagaacggaactgctcctgttaagcctggcactggccttactgttgccgtcaaaaccttaaatcctgatggccttcagggtcataaagagtggcttgctgagattaattatcttggtaatcttctccatcccaatcttgttaaactggtgggttattgtatcgaagatgatcaaaggctgcttgtatatgagtttatgcctcgaggaagtttggagaatcaccttttcagaaggtccttgcctcttccatggtcaattcggatgaagattgcattaggtgctgcaaagggtctcagtttccttcacgaagaagctttaaagccggtcatttatcgagatttcaaaacctcaaatattttactggatggggagtacaatgctaaattatcagattttgggcttgccaaagatgctcctgatgaaggcaaaactcatgtgtctactcgagtcatgggcacttatggttacgctgcccccgagtatgtaatgaccggtcacttgacatcaaaaagcgacgtttacagtttcggtgtggttcttctcgaaatgctgactggtagaagatcaatggacaaaaatcgaccaaacggtgaacacaacctcgttgaatgggcgagaccgcatctcctggacaaaagaagattctaccggttacttgatccgaggctggagggtcatttctcagttaaaggagcacaaaaagtgactcagcttgcagcacaatgccttagccgtgactccaaaataagacccaaaatgagtgaagtggtggaagtacttaagcctctcccacacctcaaggacatggctagcgcttcttactacttccagacaatgcaagctgaacgtttgaaagctggttctggttctggttctggtcgtggattcgggtcaagaaacgggcaaccagtgtttcggacattgtctagtcctcatggtcaagctggttcgtcgccttatcgtcatcagattccgtctcctaagcctaaaggtgcaactacttagattggctcgcaagtgtggacgcaagcaaacgtcttttttaaccgatgtaaaaccgacattgttaaccgatttaaagaaggaaaattaaggttgttccgaagaagatccgaatttgtgtatttactacctttgtgacctcatgtttcttcgtctgttgtaactcttgaacaaattgtctgttagggtaatattgtcattatgtattagtcgtttcgta

SEQ ID NO: 21643 - protein, 490 aa, Arabidopsis thaliana
  peptide (1)..(490): Ceres Seq. ID no. 12466492
MGFDSVKVMENWQSKTSNENEKKKKKRRRKKNNNVRNSEHYEEEANGCWVKFRYIVCCASSTSDVETSLTLSTSTVGSQSAIVQSNDQPVGPVSSTTTTSNAESSLSTPIISEELNIYSHLKKFSFIDLKLATRNFRPESLLGEGGFGCVFKGWVEENGTAPVKPGTGLTVAVKTLNPDGLQGHKEWLAEINYLGNLLHPNLVKLVGYCIEDDQRLLVYEFMPRGSLENHLFRRSLPLPWSIRMKIALGAAKGLSFLHEEALKPVIYRDFKTSNILLDGEYNAKLSDFGLAKDAPDEGKTHVSTRVMGTYGYAAPEYVMTGHLTSKSDVYSFGVVLLEMLTGRRSMDKNRPNGEHNLVEWARPHLLDKRRFYRLLDPRLEGHFSVKGAQKVTQLAAQCLSRDSKIRPKMSEVVEVLKPLPHLKDMASASYYFQTMQAERLKAGSGSGSGRGFGSRNGQPVFRTLSSPHGQAGSSPYRHQIPSPKPKGATT

SEQ ID NO: 21644 - protein, 482 aa, Arabidopsis thaliana
  peptide (1)..(482): Ceres Seq. ID no. 12466493
MENWQSKTSNENEKKKKKRRRKKNNNVRNSEHYEEEANGCWVKFRYIVCCASSTSDVETSLTLSTSTVGSQSAIVQSNDQPVGPVSSTTTTSNAESSLSTPIISEELNIYSHLKKFSFIDLKLATRNFRPESLLGEGGFGCVFKGWVEENGTAPVKPGTGLTVAVKTLNPDGLQGHKEWLAEINYLGNLLHPNLVKLVGYCIEDDQRLLVYEFMPRGSLENHLFRRSLPLPWSIRMKIALGAAKGLSFLHEEALKPVIYRDFKTSNILLDGEYNAKLSDFGLAKDAPDEGKTHVSTRVMGTYGYAAPEYVMTGHLTSKSDVYSFGVVLLEMLTGRRSMDKNRPNGEHNLVEWARPHLLDKRRFYRLLDPRLEGHFSVKGAQKVTQLAAQCLSRDSKIRPKMSEVVEVLKPLPHLKDMASASYYFQTMQAERLKAGSGSGSGRGFGSRNGQPVFRTLSSPHGQAGSSPYRHQIPSPKPKGATT

SEQ ID NO: 21645 - protein, 269 aa, Arabidopsis thaliana
  peptide (1)..(269): Ceres Seq. ID no. 12466494
MPRGSLENHLFRRSLPLPWSIRMKIALGAAKGLSFLHEEALKPVIYRDFKTSNILLDGEYNAKLSDFGLAKDAPDEGKTHVSTRVMGTYGYAAPEYVMTGHLTSKSDVYSFGVVLLEMLTGRRSMDKNRPNGEHNLVEWARPHLLDKRRFYRLLDPRLEGHFSVKGAQKVTQLAAQCLSRDSKIRPKMSEVVEVLKPLPHLKDMASASYYFQTMQAERLKAGSGSGSGRGFGSRNGQPVFRTLSSPHGQAGSSPYRHQIPSPKPKGATT

SEQ ID NO: 21646 - DNA, 2202 bp, Arabidopsis thaliana
  misc_feature (1)..(2202): Ceres Seq. ID no. 12327044
  misc_feature (1)..(2202): Ortholog of  Ceres SEQ ID NO 13659971 as cited in SEQ ID NO 67565
  misc_feature (1)..(2202): Ortholog of  Ceres SEQ ID NO 13500385 as cited in SEQ ID NO 67583
agtggtcttcatttaacaaacgccttctctcttttttcctttaaatctctgagctcttttttcttcatttgtttttttgccaaaaaataaaatatatattgaatcttcattcattaaaaaaacaatttttatttttccctattcatcttcggttcctcaccgtccgatgctttgactctgaccaatcagtcaatttgagcttcacaatcaacggtcatgggtcattgttacagccggaacatctccgccgtcgaggacgacgagatccccaccggtaacggcgaggtttcgaatcaaccatctcaaaatcaccggcatgcttcgattcctcagtctccggttgcttctggtactcctgaagtcaactcatataacattagccctttccaaagcccgttaccggcgggagtagctccatcaccggcgagaactccgggacggaagttcaaatggccgtttcctccaccgtcacctgccaaaccgattatggcggctttgagaagacgacgtggcgctccgcctcagcctcgagatgagccgatcccggaggatagtgaagatgtagtagatcacggtggtgacagtggcggcggagagaggttagataagaatttcgggtttgggaagaacttcgaagggaagtatgagttagggaaagaagtagggcgagggcattttggtcatacttgttgggcaaaagcgaagaaaggcaagatgaagaaccaaaccgtggctgtcaaaatcatctctaaagctaagatgacgtcgacgttatctattgaagatgttcgtagagaagtgaaattgctgaaagctttatcagggcataggcatatggttaagttctatgatgtatatgaggatgctgataatgtctttgttgttatggagttatgcgaaggtggagagctattggatagaattttggcgagaggtggacgataccctgaagtcgatgccaaacgtattcttgtgcagattttgtctgcaacagcattttttcaccttcaaggtgtcgtgcaccgtgatctgaagccggagaattttctctttaccagcagaaatgaggatgcgatactcaaggtcatagattttggcttgtctgatttcattagatacgatcagcgtctcaatgatgttgtaggaagtgcatactatgttgcacctgaagtactccataggtcttacagcactgaagcagatatgtggagcatcggtgtcataagttacatacttctctgtggaagcagacctttctatggaagaactgagtctgcaatattccgttgtgtgcttagagcaaaccctaattttgaggatatgccttggccttctatatctcctactgccaaagacttcgtgaaaaggcttttgaacaaggaccataggaaacgaatgacagctgctcaagctctagctcatccgtggttacgtgacgaaaaccccggtttgcttcttgatttctcggtctacaagttggtcaagtcctatatccgtgcctcacctttccgacgatcagcacttaaggctctctcgaaagctatacctgatgaagaacttgtgttccttaaggcacagttcatgctcctggatcctaaagacggagacctatcccttaactgtttcacaatggctttaacaagatatgctactgatgctatgatggaatcaaggcttcctgacattttaaatacgatgcaacctctggcgcaaaagaagcttgactttgaagagttctgtgcggctgcggtcagtgtttaccaactggaggctcttgaagaatgggaacagattgcaacttcagcatttgagcactttgaacatgaaggaaaccgaatcatatctgtccaagaactcgccggggagatgagcgtgggaccgagtgcatatcctctgctcaaggattggatccgaagttcggatggaaagctgagtttcttggggtacgctaagttcttgcatggtgtgaccgtacgaagctcaagctcgagacctaggtgacacaccatgatgtaaaaagtcttctaacatgtgaattgagtttcaagaaacatcctaaacaatgtcgtcgtcagagaccttggattcaaagattaaaaaaaaaaaacttgaaatggaagtgaagtcaggtaggtatttcctttgtaaatgattctttgagcattttgttttcgaaacaaactaaaaaaggaaaaacatatt

SEQ ID NO: 21647 - protein, 594 aa, Arabidopsis thaliana
  peptide (1)..(594): Ceres Seq. ID no. 12327045
MGHCYSRNISAVEDDEIPTGNGEVSNQPSQNHRHASIPQSPVASGTPEVNSYNISPFQSPLPAGVAPSPARTPGRKFKWPFPPPSPAKPIMAALRRRRGAPPQPRDEPIPEDSEDVVDHGGDSGGGERLDKNFGFGKNFEGKYELGKEVGRGHFGHTCWAKAKKGKMKNQTVAVKIISKAKMTSTLSIEDVRREVKLLKALSGHRHMVKFYDVYEDADNVFVVMELCEGGELLDRILARGGRYPEVDAKRILVQILSATAFFHLQGVVHRDLKPENFLFTSRNEDAILKVIDFGLSDFIRYDQRLNDVVGSAYYVAPEVLHRSYSTEADMWSIGVISYILLCGSRPFYGRTESAIFRCVLRANPNFEDMPWPSISPTAKDFVKRLLNKDHRKRMTAAQALAHPWLRDENPGLLLDFSVYKLVKSYIRASPFRRSALKALSKAIPDEELVFLKAQFMLLDPKDGDLSLNCFTMALTRYATDAMMESRLPDILNTMQPLAQKKLDFEEFCAAAVSVYQLEALEEWEQIATSAFEHFEHEGNRIISVQELAGEMSVGPSAYPLLKDWIRSSDGKLSFLGYAKFLHGVTVRSSSSRPR

SEQ ID NO: 21648 - protein, 504 aa, Arabidopsis thaliana
  peptide (1)..(504): Ceres Seq. ID no. 12327046
MAALRRRRGAPPQPRDEPIPEDSEDVVDHGGDSGGGERLDKNFGFGKNFEGKYELGKEVGRGHFGHTCWAKAKKGKMKNQTVAVKIISKAKMTSTLSIEDVRREVKLLKALSGHRHMVKFYDVYEDADNVFVVMELCEGGELLDRILARGGRYPEVDAKRILVQILSATAFFHLQGVVHRDLKPENFLFTSRNEDAILKVIDFGLSDFIRYDQRLNDVVGSAYYVAPEVLHRSYSTEADMWSIGVISYILLCGSRPFYGRTESAIFRCVLRANPNFEDMPWPSISPTAKDFVKRLLNKDHRKRMTAAQALAHPWLRDENPGLLLDFSVYKLVKSYIRASPFRRSALKALSKAIPDEELVFLKAQFMLLDPKDGDLSLNCFTMALTRYATDAMMESRLPDILNTMQPLAQKKLDFEEFCAAAVSVYQLEALEEWEQIATSAFEHFEHEGNRIISVQELAGEMSVGPSAYPLLKDWIRSSDGKLSFLGYAKFLHGVTVRSSSSRPR

SEQ ID NO: 21649 - protein, 428 aa, Arabidopsis thaliana
  peptide (1)..(428): Ceres Seq. ID no. 12327047
MKNQTVAVKIISKAKMTSTLSIEDVRREVKLLKALSGHRHMVKFYDVYEDADNVFVVMELCEGGELLDRILARGGRYPEVDAKRILVQILSATAFFHLQGVVHRDLKPENFLFTSRNEDAILKVIDFGLSDFIRYDQRLNDVVGSAYYVAPEVLHRSYSTEADMWSIGVISYILLCGSRPFYGRTESAIFRCVLRANPNFEDMPWPSISPTAKDFVKRLLNKDHRKRMTAAQALAHPWLRDENPGLLLDFSVYKLVKSYIRASPFRRSALKALSKAIPDEELVFLKAQFMLLDPKDGDLSLNCFTMALTRYATDAMMESRLPDILNTMQPLAQKKLDFEEFCAAAVSVYQLEALEEWEQIATSAFEHFEHEGNRIISVQELAGEMSVGPSAYPLLKDWIRSSDGKLSFLGYAKFLHGVTVRSSSSRPR

SEQ ID NO: 21650 - DNA, 752 bp, Arabidopsis thaliana
  misc_feature (1)..(752): Ceres Seq. ID no. 12466396
  misc_feature (1)..(752): Ortholog of  Ceres SEQ ID NO 15172954 as cited in SEQ ID NO 50896
  misc_feature (1)..(752): Ortholog of  Ceres SEQ ID NO 15173263 as cited in SEQ ID NO 64606
ctataaaaactaaactccattcgctgacttcgcaaagaagaacactttctctctgaaatctcaaattcatctcttctcttccgatttcgctgaatcatgtcagacgacgagcatcacttcgaatccagcgacgccggagcttctaagacttatcctcaacaagccggtaacattcgtaaaggtggtcacatcgtcatcaagggacgtccctgcaaggtggttgaggtatcgacttcgaagactgggaagcatggtcacgccaagtgtcactttgttgccattgatatctttacttctaagaagcttgaagatatcgttccttcttcccacaattgtgatgttccacatgtgaatcgtgttgattatcagttgattgatatctctgaagatggctttgttagtcttcttactgataatggtagcactaaggatgatctgaagctgccaacagatgaagctttactcacacagctcaagaatggatttgaggagggtaaggatattgttgtgtctgtcatgtctgcaatgggagaggagcagatgtgtgctctcaaggaagttggtcccaagtaataataataagtaagcattctctcttttacagaggctatgtattatcaagtttgacagagtcaaatgttataagaacaaagtttggtccttttttttggtcttcttagtataatttaagcccacatgtgtttcccatgcaagacactcttatatttactagtatatcttactattggttt

SEQ ID NO: 21651 - protein, 158 aa, Arabidopsis thaliana
  peptide (1)..(158): Ceres Seq. ID no. 12466397
MSDDEHHFESSDAGASKTYPQQAGNIRKGGHIVIKGRPCKVVEVSTSKTGKHGHAKCHFVAIDIFTSKKLEDIVPSSHNCDVPHVNRVDYQLIDISEDGFVSLLTDNGSTKDDLKLPTDEALLTQLKNGFEEGKDIVVSVMSAMGEEQMCALKEVGPK

SEQ ID NO: 21652 - DNA, 869 bp, Arabidopsis thaliana
  misc_feature (1)..(869): Ceres Seq. ID no. 12393543
  misc_feature (1)..(869): Ortholog of  Ceres SEQ ID NO 13597574 as cited in SEQ ID NO 64677
  misc_feature (1)..(869): Ortholog of  Ceres SEQ ID NO 13597843 as cited in SEQ ID NO 64850
  misc_feature (1)..(869): Ortholog of  Ceres SEQ ID NO 13597678 as cited in SEQ ID NO 65375
  misc_feature (1)..(869): Ortholog of  Ceres SEQ ID NO 13596180 as cited in SEQ ID NO 67941
  misc_feature (1)..(869): Ortholog of  Ceres SEQ ID NO 13591190 as cited in SEQ ID NO 68044
  misc_feature (1)..(869): Ortholog of  Ceres SEQ ID NO 13595961 as cited in SEQ ID NO 68223
atcctgttggaccagtgttgcatctcgaaaacggcaatgacgatgatgagaagcaatcggaaattttgcggtggctcgacgagcaaccgtctaaatctgttgtgtttctctgctttgggagcttgggaggtttcactgaagaacaaacaagagaaaccgctgtggccctagatagaagcggtcagcggtttctttggtgtcttcgtcacgcatcgccaaatataaaaacagatcgtcccagagattacacgaatcttgaggaggttttaccggaggggttcttggaacggactttggatagagggaaagtgattggatgggcaccacaagtggcggtactagagaagccggcgataggagggtttgttactcattgcggctggaactctattttagagagcttgtggttcggtgttccaatggtgacgtggccgctatacgcggagcagaaggttaacgcgtttgagatggttgaggagctgggtttggcggtggagatacggaagtacttaaaaggagatttgttcgccggagagatggagacggttaccggggaggatatagagagagccattaggcgtgtgatggagcaagacagtgacgttaggaacaacgtgaaagagatggcggagaagtgccacttggcgttaatggacggtggatcttcgaaggcggctttggaaaagtttattcaagacgtgatagagaatatggattaaattggatagagagaatagcatgttgactatgactctatgagatacgatgactcagatccaaatgttactttgtatattatgtacgatatgtcaaaagaaaaatgtttgtttttcatttggtataagactttttgttcaaagtttaaatcc

SEQ ID NO: 21653 - protein, 238 aa, Arabidopsis thaliana
  peptide (1)..(238): Ceres Seq. ID no. 12393544
PVGPVLHLENGNDDDEKQSEILRWLDEQPSKSVVFLCFGSLGGFTEEQTRETAVALDRSGQRFLWCLRHASPNIKTDRPRDYTNLEEVLPEGFLERTLDRGKVIGWAPQVAVLEKPAIGGFVTHCGWNSILESLWFGVPMVTWPLYAEQKVNAFEMVEELGLAVEIRKYLKGDLFAGEMETVTGEDIERAIRRVMEQDSDVRNNVKEMAEKCHLALMDGGSSKAALEKFIQDVIENMD

SEQ ID NO: 21654 - DNA, 1518 bp, Arabidopsis thaliana
  misc_feature (1)..(1518): Ceres Seq. ID no. 12327700
  misc_feature (1)..(1518): Ortholog of  Ceres SEQ ID NO 15225703 as cited in SEQ ID NO 59527
  misc_feature (1)..(1518): Ortholog of  Ceres SEQ ID NO 12615972 as cited in SEQ ID NO 62455
  misc_feature (1)..(1518): Ortholog of  Ceres SEQ ID NO 13596229 as cited in SEQ ID NO 68800
  misc_feature (1)..(1518): Ortholog of  Ceres SEQ ID NO 15179393 as cited in SEQ ID NO 0
aaattagcttgttcacaaggaaatgcctcaaaagaggaaagacgattgattcatctcaaccttctcgtcttctttcggacaacaatgtcacaaaaagtctgatcctttctctttagatttggcttcgagaaatggctcgcgatcggcgggaaggtctggagatcaaggtggtgaatccaccggcggcggcgacaaacaatgtggctgtagaaacgtctccggcgacggcgacgaggagacggagacaacaacaacgagcttcgttcgcttagtttagaccgtttaagctttggtttccatggcttgttccagctatcgtggtggctaacattgcccttttcgccatttcgatgtttattaacaattgtcctaagaactcggcttattgcttagctaggtttcttgggagatttgcttttcagcctatgaaagagaatcctcttctgggtccttcttctttgacattggagaagatgggggctttaaatgtatcaatggtggttcataagcacgaggtgtggcgcttgttcacttgtatatggctacatgctggggtttttcatgttcttgccaacatgttgagccttatcttcattggcattcgacttgagcaagaatttggatttgtacgcattggattgctttatatgatatctggatttggtggaagtttgttatcttctctatttaaccgggctggtatatccgttggtgcctctggagcattattcggcttgcttggtgctatgctttcagagcttctcactaattggactatttacgctaataagtttgcagctcttttgacactcatcttcatcatagccattaatttagcagtaggtattcttccacatgtagacaactttgcccatcttggaggattcacatcagggtttcttctaggctttgttttcttgatacgtcctcagtatggatacttcaaccagcggaacaatcctcggggttatgctgcaccgtctgctaaatccaaacacaagccataccaatacgttctttggatcacctctttagtgcttttaatagcaggatataccgctggactcgtagtgcttcttcgaggaacggatctaaacaagcattgttcatggtgccattatctcagctgtattcctacgtcgctttggagctgtaaatctcaaaatgtctactgtgagtcgagccaaattgggcagcagatgaacttgacatgtatcacgaatgggaaaacagagatgtacaagctctctaacgatataccgtctcggattcagcagttgtgttcccaattgtgcagatgaataccactaaacgtctaatttttatactcttgtagaaagttaggaatgtgtcttgaggaagagaagattgttcatttaacatgatcatgcacttgtggattcttctttctgatcattgtttgtttccacttcttgttttattgttgcatatgtattgaccatgatctatgtaatgagaacataggtgaagagaaagttgaacaaagtttttgttctt

SEQ ID NO: 21655 - protein, 316 aa, Arabidopsis thaliana
  peptide (1)..(316): Ceres Seq. ID no. 12327701
MFINNCPKNSAYCLARFLGRFAFQPMKENPLLGPSSLTLEKMGALNVSMVVHKHEVWRLFTCIWLHAGVFHVLANMLSLIFIGIRLEQEFGFVRIGLLYMISGFGGSLLSSLFNRAGISVGASGALFGLLGAMLSELLTNWTIYANKFAALLTLIFIIAINLAVGILPHVDNFAHLGGFTSGFLLGFVFLIRPQYGYFNQRNNPRGYAAPSAKSKHKPYQYVLWITSLVLLIAGYTAGLVVLLRGTDLNKHCSWCHYLSCIPTSLWSCKSQNVYCESSQIGQQMNLTCITNGKTEMYKLSNDIPSRIQQLCSQLCR

SEQ ID NO: 21656 - protein, 291 aa, Arabidopsis thaliana
  peptide (1)..(291): Ceres Seq. ID no. 12327702
MKENPLLGPSSLTLEKMGALNVSMVVHKHEVWRLFTCIWLHAGVFHVLANMLSLIFIGIRLEQEFGFVRIGLLYMISGFGGSLLSSLFNRAGISVGASGALFGLLGAMLSELLTNWTIYANKFAALLTLIFIIAINLAVGILPHVDNFAHLGGFTSGFLLGFVFLIRPQYGYFNQRNNPRGYAAPSAKSKHKPYQYVLWITSLVLLIAGYTAGLVVLLRGTDLNKHCSWCHYLSCIPTSLWSCKSQNVYCESSQIGQQMNLTCITNGKTEMYKLSNDIPSRIQQLCSQLCR

SEQ ID NO: 21657 - protein, 275 aa, Arabidopsis thaliana
  peptide (1)..(275): Ceres Seq. ID no. 12327703
MGALNVSMVVHKHEVWRLFTCIWLHAGVFHVLANMLSLIFIGIRLEQEFGFVRIGLLYMISGFGGSLLSSLFNRAGISVGASGALFGLLGAMLSELLTNWTIYANKFAALLTLIFIIAINLAVGILPHVDNFAHLGGFTSGFLLGFVFLIRPQYGYFNQRNNPRGYAAPSAKSKHKPYQYVLWITSLVLLIAGYTAGLVVLLRGTDLNKHCSWCHYLSCIPTSLWSCKSQNVYCESSQIGQQMNLTCITNGKTEMYKLSNDIPSRIQQLCSQLCR

SEQ ID NO: 21658 - DNA, 1082 bp, Arabidopsis thaliana
  misc_feature (1)..(1082): Ceres Seq. ID no. 12334810
  misc_feature (1)..(1082): Ortholog of  Ceres SEQ ID NO 13583408 as cited in SEQ ID NO 62616
  misc_feature (1)..(1082): Ortholog of  Ceres SEQ ID NO 15179752 as cited in SEQ ID NO 63074
gttttgtcctccttctacgccgcacactatcttttcctctcactcagacttcctcttcatctcaagagaaatggctgaatccaaggtagtggttccagagtctgtgctaaagaagatcaagaggcaagaggaatgggcattggccaagaaagatgaagctgtagctgctaagaagaagagtgttgaggcccgcaagcttatcttcaagagagctgagcagtatgccaaagaatacgctgagaaggataacgagttgatccgattgaagcgggaggctaagttgaaaggaggtttctacgttgaccctgaggctaagttgctctttatcattcgtatccgtggtatcaatgccattgacccaaaaaccaagaagattctgcagctcctgcgtttgagacaggtaggtttcacagtttgttattttcatccagctatattagcctaacatatgattattgattaatatttgttatatgttcaaactaatatgtgatagttgcctgttcatcatttttaaaagagagtagaagactattgcgttgtcaagaagtttactttcgtatacatttgtgcagatcttcaatggtgtgtttcttaaggtgaacaaggcaacagtaaacatgctgcgccgagttgaaccatacgtgacttacggatacccaaacttgaagagcgttaaggaactgatctacaaaagaggttatggaaagctgaaccaccagaggatagcacttactgacaactccattgtggatcaggctctcggaaagcatgggatcatctgcgttgaggatctcatccacgagatcatgactgttggacctcacttcaaggaagccaacaacttcctgtggccattccaattgaaggcaccactcggtggccttaagaagaagagaaaccactacgtcgaaggtggtgatgctggaaacagggagaatttcatcaacgagcttgtcaggagaatgaattgatgaaagcttccttctttatctttgcaaatttcaaagattttgggaccgagtttttttttttttttgttcaagttatcagagacttgtgatcttttatccgagataggc

SEQ ID NO: 21659 - protein, 147 aa, Arabidopsis thaliana
  peptide (1)..(147): Ceres Seq. ID no. 12334811
FCPPSTPHTIFSSHSDFLFISREMAESKVVVPESVLKKIKRQEEWALAKKDEAVAAKKKSVEARKLIFKRAEQYAKEYAEKDNELIRLKREAKLKGGFYVDPEAKLLFIIRIRGINAIDPKTKKILQLLRLRQVGFTVCYFHPAILA

SEQ ID NO: 21660 - protein, 124 aa, Arabidopsis thaliana
  peptide (1)..(124): Ceres Seq. ID no. 12334812
MAESKVVVPESVLKKIKRQEEWALAKKDEAVAAKKKSVEARKLIFKRAEQYAKEYAEKDNELIRLKREAKLKGGFYVDPEAKLLFIIRIRGINAIDPKTKKILQLLRLRQVGFTVCYFHPAILA

SEQ ID NO: 21661 - protein, 117 aa, Arabidopsis thaliana
  peptide (1)..(117): Ceres Seq. ID no. 12334813
MLRRVEPYVTYGYPNLKSVKELIYKRGYGKLNHQRIALTDNSIVDQALGKHGIICVEDLIHEIMTVGPHFKEANNFLWPFQLKAPLGGLKKKRNHYVEGGDAGNRENFINELVRRMN

SEQ ID NO: 21662 - DNA, 1150 bp, Arabidopsis thaliana
  misc_feature (1)..(1150): Ceres Seq. ID no. 13486886
  misc_feature (1)..(1150): Ortholog of  Ceres SEQ ID NO 14314550 as cited in SEQ ID NO 52321
catctcttcttgaagctgctttcttcctcaaattctttttttttccagattcttctcctttcttcttccttcttccttatttcgatttcgaattttgaattttctcaatggctcaatcgtgtcttaaaattgttcgaatcaacaatctaaggaacagagtgaatcgtcggattttgattctccgacgattcacacggttgttatggagtagaatcgttgcttgtactcctggcaaatctcggagatatctcttgctttctcgcgctcttccgtctccgactgtttctcgtccttctccttctccgatccccgccgtcgatgtcgtcgtcggtggtggtggtggtggtggtgagtttgttcgtcgttcgtcggttgtttacgataatgataacagtcatcggagatcggattctgatttggtttctttgaagattagtctcttaggagatccagaaatcggaaaaactagcttcctggcgaaatatgttggagaagagaaagaagtagaaatgagagaattggagaaaggtataaattgtacggacaagacgttatacatgggaggtgctcgcatttcatatagtatctgggaattagaagctgagagatcacgagatcaaatccctgtggcttgcaaggactctgttgccattctctttatgtttgatttaaccagtcgttgcacgcttaatagtgtcattagctggtatcaacaagctaggaagtcaaatcagacggcgataccagttatggtaggaaccaagtttgatgagtttattcagcttcctattgatctgcaatggacaattgctagccaggcgagaacatatgcgaaggctttaaacgcgacgctcttcttctcgagtgcttcatacaacataaacgtgaataagatctttaagtttgtgacggcgaagctcttcgacttaccatggacggtggaacgcaatctcacaatcggagaaccaatcatcgacttctagaatatgtatttgtatataatataaaagaagcgaatcctgaagaatgcgttttttttttttttttttttaattcaccgctaaagcttgtcgccgtgggactgatcggactagtcgtatttaagcgaaatggagagatgaagcggcggagatttcgcccgcttttctcc

SEQ ID NO: 21663 - protein, 291 aa, Arabidopsis thaliana
  peptide (1)..(291): Ceres Seq. ID no. 13486887
MAQSCLKIVRINNLRNRVNRRILILRRFTRLLWSRIVACTPGKSRRYLLLSRALPSPTVSRPSPSPIPAVDVVVGGGGGGGEFVRRSSVVYDNDNSHRRSDSDLVSLKISLLGDPEIGKTSFLAKYVGEEKEVEMRELEKGINCTDKTLYMGGARISYSIWELEAERSRDQIPVACKDSVAILFMFDLTSRCTLNSVISWYQQARKSNQTAIPVMVGTKFDEFIQLPIDLQWTIASQARTYAKALNATLFFSSASYNINVNKIFKFVTAKLFDLPWTVERNLTIGEPIIDF

SEQ ID NO: 21664 - protein, 157 aa, Arabidopsis thaliana
  peptide (1)..(157): Ceres Seq. ID no. 13486888
MRELEKGINCTDKTLYMGGARISYSIWELEAERSRDQIPVACKDSVAILFMFDLTSRCTLNSVISWYQQARKSNQTAIPVMVGTKFDEFIQLPIDLQWTIASQARTYAKALNATLFFSSASYNINVNKIFKFVTAKLFDLPWTVERNLTIGEPIIDF

SEQ ID NO: 21665 - DNA, 1529 bp, Arabidopsis thaliana
  misc_feature (1)..(1529): Ceres Seq. ID no. 12324289
  misc_feature (1)..(1529): Ortholog of  Ceres SEQ ID NO 13596581 as cited in SEQ ID NO 62420
  misc_feature (1)..(1529): Ortholog of  Ceres SEQ ID NO 13591273 as cited in SEQ ID NO 65904
  misc_feature (1)..(1529): Ortholog of  Ceres SEQ ID NO 13623086 as cited in SEQ ID NO 0
attcgcattacgatggtttatgtaaagagattggttatatcaatcttatcaaacccacctctctcgggattattgactcgatttggatatttatacatgtgactatatttagacatacatagatctcagtcctgtatatatagagctacattcataaaagaaagatctaacataacaaaaggaaaaaagcatcaagaacatggcggagactcaaggaaaggtcatcacttgtaaagctgctgtcgtatggggtccaaaagtgccgcttgtaattcaagaaatatgcgtcgatcctcctcagaaaatggaagtccgtgttaaaattctttactcctccatttgccacaccgatctcggatgttggaacggcacgaacgaagctgaacgagcatttccaaggattcttggccatgaagctgtcgggattgtagagagtgttggagaaggagtaaaagatgtgaaagaaggagactacgtgattccgactttcaatggagaatgtggtgaatgtaaagtgtgtaagagagaagaaagtaatctctgtgagcgatatcatgtggatcctatgaagagggtgatggtgaatgatggagggacgagattctcaaccaccataaacaaggacggtggttcgagccaaagccaacctatatatcacttccttaacacctccttcaccgaatacactgtcttggactcggcttgcgtcgtcaagatcgatcctaattctcctctcaagcaaatgagcctcttgagttgtggtgtctcaactggggttggagcagcttggaacattgcaaatgtgaaggaaggaaaaagcactgctgtctttggattgggttccgttggactcgctgttgctgaaggtgcaagagctagaggagcttctaggatcattggtgttgatgctaatgcttccaaatttgagaaaggtaaactgatgggagtaacagatttcataaaccctaaagacttaactaagccagtacatcagatgatacgagagataacgggaggaggcgtggactatagctttgaatgtacaggaaacgttgatgttcttcgcgaagcctttttatccactcacgtcggttggggatcgacagtacttgttgggatctatccgacgccaagaacattgcctcttcacccaatggagcttttcgacggccgtagaatcaccggttctgtgtttggtggcttcaagcccaaatctcagcttccaaatttcgcccaacaatgcatgaaaggggttgtgaaattggaaccttttattaccaatgagcttccatttgagaagataaacgatgcgtttcagctgcttcgcgatggaaaatctcttcggtgcattcttcaaatctctaaacttctcaagagatgattctacacattcacaaagtttactacactatatataatttacccaacaaacacttattttactgcattattcagtatattatcttacctataaatgtgtatcatcatcatcaataacgcgattatttgtgctgaaggattatatatcc

SEQ ID NO: 21666 - protein, 393 aa, Arabidopsis thaliana
  peptide (1)..(393): Ceres Seq. ID no. 12324290
MAETQGKVITCKAAVVWGPKVPLVIQEICVDPPQKMEVRVKILYSSICHTDLGCWNGTNEAERAFPRILGHEAVGIVESVGEGVKDVKEGDYVIPTFNGECGECKVCKREESNLCERYHVDPMKRVMVNDGGTRFSTTINKDGGSSQSQPIYHFLNTSFTEYTVLDSACVVKIDPNSPLKQMSLLSCGVSTGVGAAWNIANVKEGKSTAVFGLGSVGLAVAEGARARGASRIIGVDANASKFEKGKLMGVTDFINPKDLTKPVHQMIREITGGGVDYSFECTGNVDVLREAFLSTHVGWGSTVLVGIYPTPRTLPLHPMELFDGRRITGSVFGGFKPKSQLPNFAQQCMKGVVKLEPFITNELPFEKINDAFQLLRDGKSLRCILQISKLLKR

SEQ ID NO: 21667 - protein, 358 aa, Arabidopsis thaliana
  peptide (1)..(358): Ceres Seq. ID no. 12324291
MEVRVKILYSSICHTDLGCWNGTNEAERAFPRILGHEAVGIVESVGEGVKDVKEGDYVIPTFNGECGECKVCKREESNLCERYHVDPMKRVMVNDGGTRFSTTINKDGGSSQSQPIYHFLNTSFTEYTVLDSACVVKIDPNSPLKQMSLLSCGVSTGVGAAWNIANVKEGKSTAVFGLGSVGLAVAEGARARGASRIIGVDANASKFEKGKLMGVTDFINPKDLTKPVHQMIREITGGGVDYSFECTGNVDVLREAFLSTHVGWGSTVLVGIYPTPRTLPLHPMELFDGRRITGSVFGGFKPKSQLPNFAQQCMKGVVKLEPFITNELPFEKINDAFQLLRDGKSLRCILQISKLLKR

SEQ ID NO: 21668 - protein, 271 aa, Arabidopsis thaliana
  peptide (1)..(271): Ceres Seq. ID no. 12324292
MKRVMVNDGGTRFSTTINKDGGSSQSQPIYHFLNTSFTEYTVLDSACVVKIDPNSPLKQMSLLSCGVSTGVGAAWNIANVKEGKSTAVFGLGSVGLAVAEGARARGASRIIGVDANASKFEKGKLMGVTDFINPKDLTKPVHQMIREITGGGVDYSFECTGNVDVLREAFLSTHVGWGSTVLVGIYPTPRTLPLHPMELFDGRRITGSVFGGFKPKSQLPNFAQQCMKGVVKLEPFITNELPFEKINDAFQLLRDGKSLRCILQISKLLKR

SEQ ID NO: 21669 - DNA, 878 bp, Arabidopsis thaliana
  misc_feature (1)..(878): Ceres Seq. ID no. 13492905
  misc_feature (1)..(878): Ortholog of  Ceres SEQ ID NO 13638658 as cited in SEQ ID NO 51921
  misc_feature (1)..(878): Ortholog of  Ceres SEQ ID NO 14306522 as cited in SEQ ID NO 53365
  misc_feature (1)..(878): Ortholog of  Ceres SEQ ID NO 15175175 as cited in SEQ ID NO 0
gcaaacgctagttaccggaagacacgtcttgagtttcgcagcatctctctcctctcctctgttcatatctctctttagaaatttctcaatgaacatactcaacagattgggtttgggatcaagtgggcaaaccaatatggatccttctccgatcgctcagggaaatgacgatgacacaccggcgccggggaatcagtttgcccaattcggagctggatgtttctggggtgtcgagctggcgtttcagagagtcccaggggtgactcagaccgaggctggatacacccaagggaccgtagacaatccttcatacggagatgtttgttctggtaccacaggccattcggaggttgttagggttcaatatgatcttaacgattgcacctatgagtctctgcttgatttgttctggtctaggcatgatcccaccactttgaatcgccagggaaatgacgtgggaacccaatacagatctggaatatacttctacacacccgagcaggagaaactagcccgtgagtcacttgaacgtcaccagcaacaaatggagagaaagatcatgactgaaatcttgccagctaagaaattctacagagctgaagagcatcatcaacagtatctgtcaaaaggtgggcggtttggccaagggcaatccactgccaaaggctgcaacgacccaatccgctgttacggctaataagctgctttcctctgtccctctccgaaaacagaggacttagcatcaaaggacttgtgtgtcaaatagattgtgtaaaacttgactaagttgttcacacgctatgtaactacttctttggaatttcattcgcaatgttgtaatattgatgttatactctataaacataaaccaaataatc

SEQ ID NO: 21670 - protein, 231 aa, Arabidopsis thaliana
  peptide (1)..(231): Ceres Seq. ID no. 13492906
QTLVTGRHVLSFAASLSSPLFISLFRNFSMNILNRLGLGSSGQTNMDPSPIAQGNDDDTPAPGNQFAQFGAGCFWGVELAFQRVPGVTQTEAGYTQGTVDNPSYGDVCSGTTGHSEVVRVQYDLNDCTYESLLDLFWSRHDPTTLNRQGNDVGTQYRSGIYFYTPEQEKLARESLERHQQQMERKIMTEILPAKKFYRAEEHHQQYLSKGGRFGQGQSTAKGCNDPIRCYG

SEQ ID NO: 21671 - protein, 202 aa, Arabidopsis thaliana
  peptide (1)..(202): Ceres Seq. ID no. 13492907
MNILNRLGLGSSGQTNMDPSPIAQGNDDDTPAPGNQFAQFGAGCFWGVELAFQRVPGVTQTEAGYTQGTVDNPSYGDVCSGTTGHSEVVRVQYDLNDCTYESLLDLFWSRHDPTTLNRQGNDVGTQYRSGIYFYTPEQEKLARESLERHQQQMERKIMTEILPAKKFYRAEEHHQQYLSKGGRFGQGQSTAKGCNDPIRCYG

SEQ ID NO: 21672 - protein, 186 aa, Arabidopsis thaliana
  peptide (1)..(186): Ceres Seq. ID no. 13492908
MDPSPIAQGNDDDTPAPGNQFAQFGAGCFWGVELAFQRVPGVTQTEAGYTQGTVDNPSYGDVCSGTTGHSEVVRVQYDLNDCTYESLLDLFWSRHDPTTLNRQGNDVGTQYRSGIYFYTPEQEKLARESLERHQQQMERKIMTEILPAKKFYRAEEHHQQYLSKGGRFGQGQSTAKGCNDPIRCYG

SEQ ID NO: 21673 - DNA, 1224 bp, Arabidopsis thaliana
  misc_feature (1)..(1224): Ceres Seq. ID no. 12371589
  misc_feature (1)..(1224): Ortholog of  Ceres SEQ ID NO 14308615 as cited in SEQ ID NO 58538
  misc_feature (1)..(1224): Ortholog of  Ceres SEQ ID NO 13585342 as cited in SEQ ID NO 63601
  misc_feature (1)..(1224): Ortholog of  Ceres SEQ ID NO 15177459 as cited in SEQ ID NO 0
aataatataatttggtttctccccaaattctccacttgttcacttaatctttctcactacctgatcgtggaaatggcgattggaccatcaagtgtgatcgttattgttgggataatcttggcgttgacttatcagtcaatcttgaaacctcctccgccgaagctatgtggctcccccggtggtccaccgatcacagcaccgcgtataaagctgcgagacgggagacatttggcatacaaggagtatggacttccaagagagaaagctaaacacaaaatagtcttcatccatggatccgatagttgtagacacgacgccgttttcgccactcttctttctccggatttagttcaagaacgaggcgtgtatatggtttcgtttgacaagccgggttatggagagagtgatccggatccaatccgtacaccaaaaagcttggctttggatattgaagagctagctgatcaactgagtctaggatcaaagttctacgtgattgggaaatcaatgggaggacaagcggcgtggggatgccttaagtacacccctcaccggttagccggagtaacactagttgctcctgtggttaactactattggaggaacttacctttgaacatttccactgaaggatttaacttgcagcaaaagagagatcaatgggcggttcgtgttgctcactacgctccttggcttatttactggtggaacacacaaaactggttcccgggttcgagtgttgtgaaccgagatggcggtgtcttgtcacagcccgataaagatatcattttgaagctgggatcttcgaggaaaccgcatttggcagaagtaaggcagcaaggaatacatgagagtattaaccgtgatatgattgtgggttttggaaattgggaatttgatcctttagaactcgagaatccgtttttaaacagagaaggctctgttcatttgtggcaaggagacgaggacatgttagtgcctgtgacgctgcaacgttacattgcagataagcttccttggcttcactatcatgaggttgccggaggtggccacttcttccccctcgctaaaggtgtcgttgatgagattgttaagacagctcttaaccactgatgcgtagcattaagtaagataagatcccaaaggtatgaaaaaaccccaaaagattatgggacgtacaatggatttcttatgtaaaatgatttacatatacgaaaacataat

SEQ ID NO: 21674 - protein, 370 aa, Arabidopsis thaliana
  peptide (1)..(370): Ceres Seq. ID no. 12371590
NNIIWFLPKFSTCSLNLSHYLIVEMAIGPSSVIVIVGIILALTYQSILKPPPPKLCGSPGGPPITAPRIKLRDGRHLAYKEYGLPREKAKHKIVFIHGSDSCRHDAVFATLLSPDLVQERGVYMVSFDKPGYGESDPDPIRTPKSLALDIEELADQLSLGSKFYVIGKSMGGQAAWGCLKYTPHRLAGVTLVAPVVNYYWRNLPLNISTEGFNLQQKRDQWAVRVAHYAPWLIYWWNTQNWFPGSSVVNRDGGVLSQPDKDIILKLGSSRKPHLAEVRQQGIHESINRDMIVGFGNWEFDPLELENPFLNREGSVHLWQGDEDMLVPVTLQRYIADKLPWLHYHEVAGGGHFFPLAKGVVDEIVKTALNH

SEQ ID NO: 21675 - protein, 346 aa, Arabidopsis thaliana
  peptide (1)..(346): Ceres Seq. ID no. 12371591
MAIGPSSVIVIVGIILALTYQSILKPPPPKLCGSPGGPPITAPRIKLRDGRHLAYKEYGLPREKAKHKIVFIHGSDSCRHDAVFATLLSPDLVQERGVYMVSFDKPGYGESDPDPIRTPKSLALDIEELADQLSLGSKFYVIGKSMGGQAAWGCLKYTPHRLAGVTLVAPVVNYYWRNLPLNISTEGFNLQQKRDQWAVRVAHYAPWLIYWWNTQNWFPGSSVVNRDGGVLSQPDKDIILKLGSSRKPHLAEVRQQGIHESINRDMIVGFGNWEFDPLELENPFLNREGSVHLWQGDEDMLVPVTLQRYIADKLPWLHYHEVAGGGHFFPLAKGVVDEIVKTALNH

SEQ ID NO: 21676 - protein, 247 aa, Arabidopsis thaliana
  peptide (1)..(247): Ceres Seq. ID no. 12371592
MVSFDKPGYGESDPDPIRTPKSLALDIEELADQLSLGSKFYVIGKSMGGQAAWGCLKYTPHRLAGVTLVAPVVNYYWRNLPLNISTEGFNLQQKRDQWAVRVAHYAPWLIYWWNTQNWFPGSSVVNRDGGVLSQPDKDIILKLGSSRKPHLAEVRQQGIHESINRDMIVGFGNWEFDPLELENPFLNREGSVHLWQGDEDMLVPVTLQRYIADKLPWLHYHEVAGGGHFFPLAKGVVDEIVKTALNH

SEQ ID NO: 21677 - DNA, 1431 bp, Arabidopsis thaliana
  misc_feature (1)..(1431): Ceres Seq. ID no. 12371874
  misc_feature (1)..(1431): Ortholog of  Ceres SEQ ID NO 14314300 as cited in SEQ ID NO 57386
  misc_feature (1)..(1431): Ortholog of  Ceres SEQ ID NO 13596509 as cited in SEQ ID NO 62004
  misc_feature (1)..(1431): Ortholog of  Ceres SEQ ID NO 13500385 as cited in SEQ ID NO 67583
attatacacacatgcgtgtgtattggatctcacgatttcttatcaatggaactcgcttctctttctcagatccccatccaaatcgttttataggtagattagatagataaactacggatatactcgaactctatccatttacggtattgatttggaaatatggacaagtatgacgttgtcaaggatctgggagctggaaatttcggtgtggctcgccttctcaggcacaaggacaccaaagagcttgttgccatgaaatacatcgagagaggtcgcaagatagatgagaacgtggcgagagagattattaatcacagatcatttaaacatcctaatatcatccggttcaaggaggtgatcctgacacctactcatcttgctattgtgatggagtatgcttctggaggagagctctttgatcgaatctgtactgccggtagatttagtgaagctgaggctaggtacttctttcaacagctgatttgtggtgttgattactgccattccttgcaaatatgtcatagagacctgaagcttgagaacacactgctcgatgggagcccctgctccgcttttgaaaatctgtgattttggttactctaagtcatctatactacattctaggcctaaatcaactgttggaactccagcttacatagcacctgaagttctttcacggagagaatatgatggcaagcacgcggatgtgtggtcatgtggagtaaccctttatgtgatgctggtgggagcttacccgtttgaggaccctaatgatccaaaaaacttcaggaaaacaatccagcgcataatggctgtacaatacaagatcccggactatgttcacatatctcaggaatgcaaacatcttctctctcgcatattcgtcactaactctgctaagagaatcacacttaaggagatcaagaatcatccgtggtacttgaagaatttgccaaaggagctgctagagtcggctcaagcggcgtattacaagagagacacaagcttctctcttcaaagcgtagaggacataatgaagatagttggagaagcaaggaatccagctccatcaactagtgctgtcaaaagctcgggctcaggagctgatgaagaagaggaagaggacgttgaagctgaagtggaagaggaagaagatgatgaagacgaatacgagaagcatgtcaaagaggcacagtcttgtcaagagtctgacaaagcttaaaaagaaaaatgctctctgtttctcttactttatttcttcttcaagaacactccttggtgagttggtgacttgcttctggtaaaaagaaaaacacatttgtcaaacgcaaaggctgtaaactacgtgctggttgtttcacttttagattgatgtcgttgtactgagtaatgggcatgaaacagaaggtttatattattatatgatactat

SEQ ID NO: 21678 - protein, 222 aa, Arabidopsis thaliana
  peptide (1)..(222): Ceres Seq. ID no. 12371875
MGAPAPLLKICDFGYSKSSILHSRPKSTVGTPAYIAPEVLSRREYDGKHADVWSCGVTLYVMLVGAYPFEDPNDPKNFRKTIQRIMAVQYKIPDYVHISQECKHLLSRIFVTNSAKRITLKEIKNHPWYLKNLPKELLESAQAAYYKRDTSFSLQSVEDIMKIVGEARNPAPSTSAVKSSGSGADEEEEEDVEAEVEEEEDDEDEYEKHVKEAQSCQESDKA

SEQ ID NO: 21679 - protein, 161 aa, Arabidopsis thaliana
  peptide (1)..(161): Ceres Seq. ID no. 12371876
MLVGAYPFEDPNDPKNFRKTIQRIMAVQYKIPDYVHISQECKHLLSRIFVTNSAKRITLKEIKNHPWYLKNLPKELLESAQAAYYKRDTSFSLQSVEDIMKIVGEARNPAPSTSAVKSSGSGADEEEEEDVEAEVEEEEDDEDEYEKHVKEAQSCQESDKA

SEQ ID NO: 21680 - protein, 142 aa, Arabidopsis thaliana
  peptide (1)..(142): Ceres Seq. ID no. 12371877
MDKYDVVKDLGAGNFGVARLLRHKDTKELVAMKYIERGRKIDENVAREIINHRSFKHPNIIRFKEVILTPTHLAIVMEYASGGELFDRICTAGRFSEAEARYFFQQLICGVDYCHSLQICHRDLKLENTLLDGSPCSAFENL

SEQ ID NO: 21681 - DNA, 1326 bp, Arabidopsis thaliana
  misc_feature (1)..(1326): Ceres Seq. ID no. 13487947
  misc_feature (1)..(1326): Ortholog of  Ceres SEQ ID NO 15224520 as cited in SEQ ID NO 58188
  misc_feature (1)..(1326): Ortholog of  Ceres SEQ ID NO 12777206 as cited in SEQ ID NO 60246
gaagtgaccttcttccttgtcttttttctctccctgttgggatctctgagaaaaaaaaaatccatccgatcttcaaaaaaagtcaccccctttaacattcttctccaatctctctacaaaccctaatctcagccatggatctcgctgcagaagagcttcaatttctcaacattcaaggcatattacgtgaatccacaacaatccccaaattttccccaaaaaccttctacctcataaccctaaccctaattttccctctctccttcgcaatcctcgctcattccctctttacccaaccaatcttagctcagctagatgcaactcctccttcagatcaatctaaaaccaatcacgaatggacccttcttctcatttatcaattcatctacgtcatcttcctcttcgccttctctcttctctcaacagccgccgtcgtcttcaccgtcgcttcgctttacacgggaaagccagtttctttctcttcaacaatgtcagcgattcctctggttttgaagcgtttgttcattaccttcctttgggtttctttaatgatgcttgtgtacaactctgtcttcttgttgtttctcgttgttttgatcgtagctatcgatttacaaagcgtgattctcgctgtcttctcgatggttgtgattttcgttctgtttttgggtgttcatgtttacatgactgcttggtggcatttagctagtgtagtctctgttcttgaaccgatttacggtatcgccgcgatgaagaagagttacgagttgcttaatggaagaactaatatggcgtgttcgatggtttttatgtatcttgctctttgtggaatcactgctggtgttttcggtggtgttgtggttcatggaggtgatgatttcgggttgtttacgaagattgttgttggtggtttcttggttgggattctagtgattgtgaatctagttgggctgcttgtgcagagtgtgttttactatgtttgtaagagttttcatcatcagccgattgataaatctgcgttgcacgatcatcttggtggatatcttggtgactatgtgccgttaaagagcagtattcagatggagaactttgatatttaatcgttaaatggattggatgatgatgatgaagaagaaacggtttttgcggtttgtcattgtaagttgtaatgtttgtaattttctatagtgtttgtattagcttttgcataatctgaattaatttgggggatagacttatattgcagatgttctgttcctttgtaatttcatagtgttgtttttttcttcccaaaattggaagattaatgaaataaatttgtttatt

SEQ ID NO: 21682 - protein, 321 aa, Arabidopsis thaliana
  peptide (1)..(321): Ceres Seq. ID no. 13487948
MDLAAEELQFLNIQGILRESTTIPKFSPKTFYLITLTLIFPLSFAILAHSLFTQPILAQLDATPPSDQSKTNHEWTLLLIYQFIYVIFLFAFSLLSTAAVVFTVASLYTGKPVSFSSTMSAIPLVLKRLFITFLWVSLMMLVYNSVFLLFLVVLIVAIDLQSVILAVFSMVVIFVLFLGVHVYMTAWWHLASVVSVLEPIYGIAAMKKSYELLNGRTNMACSMVFMYLALCGITAGVFGGVVVHGGDDFGLFTKIVVGGFLVGILVIVNLVGLLVQSVFYYVCKSFHHQPIDKSALHDHLGGYLGDYVPLKSSIQMENFDI

SEQ ID NO: 21683 - protein, 203 aa, Arabidopsis thaliana
  peptide (1)..(203): Ceres Seq. ID no. 13487949
MSAIPLVLKRLFITFLWVSLMMLVYNSVFLLFLVVLIVAIDLQSVILAVFSMVVIFVLFLGVHVYMTAWWHLASVVSVLEPIYGIAAMKKSYELLNGRTNMACSMVFMYLALCGITAGVFGGVVVHGGDDFGLFTKIVVGGFLVGILVIVNLVGLLVQSVFYYVCKSFHHQPIDKSALHDHLGGYLGDYVPLKSSIQMENFDI

SEQ ID NO: 21684 - protein, 183 aa, Arabidopsis thaliana
  peptide (1)..(183): Ceres Seq. ID no. 13487950
MMLVYNSVFLLFLVVLIVAIDLQSVILAVFSMVVIFVLFLGVHVYMTAWWHLASVVSVLEPIYGIAAMKKSYELLNGRTNMACSMVFMYLALCGITAGVFGGVVVHGGDDFGLFTKIVVGGFLVGILVIVNLVGLLVQSVFYYVCKSFHHQPIDKSALHDHLGGYLGDYVPLKSSIQMENFDI

SEQ ID NO: 21685 - DNA, 1155 bp, Arabidopsis thaliana
  misc_feature (1)..(1155): Ceres Seq. ID no. 13486708
  misc_feature (1)..(1155): Ortholog of  Ceres SEQ ID NO 14304408 as cited in SEQ ID NO 58051
  misc_feature (1)..(1155): Ortholog of  Ceres SEQ ID NO 14314759 as cited in SEQ ID NO 59915
  misc_feature (1)..(1155): Ortholog of  Ceres SEQ ID NO 13661769 as cited in SEQ ID NO 61435
  misc_feature (1)..(1155): Ortholog of  Ceres SEQ ID NO 13600585 as cited in SEQ ID NO 0
gtgcaaccatctctctaaagcttcttctctcataacaatggcaagacaaatcaacatagagagtagtgtttctcaagttacctttatctcctccgccatccccgccgtatcttcctcctcctccatcaccgcttccgcctcattgtcctcttcacctactacatcttcctcttcttcgtcatcaacaaattctaacttcattgaggaagacaactctaaaagaaaagcatctcgaagatcattgtcatcgttagtctccgttgaagacgatgatgatcaaaacggtggaggtgggaaacggcgaaagaccaacggtggagataaacatccgacgtatagaggagtgaggatgaggagttggggaaaatgggtgtcggagattagagagccgagaaagaaatcaagaatctggctcgggacttatccaacggctgagatggcagctcgagctcatgacgtagcggctttagccattaaaggtacaacggcttacctcaattttcccaagttagccggcgagcttcctcgtccagtcacaaattctcctaaagacattcaagccgccgcctctttagcggccgttaactggcaagattcggtcaacgatgtgagtaattctgaagtggctgaaatagttgaagccgagccgagtcgagccgtggtggctcagttgttttcttcggacacaagcacgacgacgacgactcagagtcaagagtattcggaagcttcgtgtgcttcgacttcggcgtgtacggacaaagacagtgaggaagagaagctgtttgatttgccggatttgtttaccgatgagaatgagatgatgatacgaaacgatgcgttttgctactactcgtccacgtggcagctttgtggagccgatgctgggtttcggcttgaagagccgttttttctatctgaatgactaaagtacccctctcgagagagctctcactaacactttattagtttgccatttacttcttcttcattttctctatttacgtttgatatttttttttctttccaacttgagtgatattgattttttgtaaagaaacaatttcttttttttttcctagcaaaatcgtgtttgtgtaatataaatgtggtgataacatgttgaaatattgcagaataatataatgtagcctt

SEQ ID NO: 21686 - protein, 307 aa, Arabidopsis thaliana
  peptide (1)..(307): Ceres Seq. ID no. 13486709
CNHLSKASSLITMARQINIESSVSQVTFISSAIPAVSSSSSITASASLSSSPTTSSSSSSSTNSNFIEEDNSKRKASRRSLSSLVSVEDDDDQNGGGGKRRKTNGGDKHPTYRGVRMRSWGKWVSEIREPRKKSRIWLGTYPTAEMAARAHDVAALAIKGTTAYLNFPKLAGELPRPVTNSPKDIQAAASLAAVNWQDSVNDVSNSEVAEIVEAEPSRAVVAQLFSSDTSTTTTTQSQEYSEASCASTSACTDKDSEEEKLFDLPDLFTDENEMMIRNDAFCYYSSTWQLCGADAGFRLEEPFFLSE

SEQ ID NO: 21687 - protein, 295 aa, Arabidopsis thaliana
  peptide (1)..(295): Ceres Seq. ID no. 13486710
MARQINIESSVSQVTFISSAIPAVSSSSSITASASLSSSPTTSSSSSSSTNSNFIEEDNSKRKASRRSLSSLVSVEDDDDQNGGGGKRRKTNGGDKHPTYRGVRMRSWGKWVSEIREPRKKSRIWLGTYPTAEMAARAHDVAALAIKGTTAYLNFPKLAGELPRPVTNSPKDIQAAASLAAVNWQDSVNDVSNSEVAEIVEAEPSRAVVAQLFSSDTSTTTTTQSQEYSEASCASTSACTDKDSEEEKLFDLPDLFTDENEMMIRNDAFCYYSSTWQLCGADAGFRLEEPFFLSE

SEQ ID NO: 21688 - protein, 191 aa, Arabidopsis thaliana
  peptide (1)..(191): Ceres Seq. ID no. 13486711
MRSWGKWVSEIREPRKKSRIWLGTYPTAEMAARAHDVAALAIKGTTAYLNFPKLAGELPRPVTNSPKDIQAAASLAAVNWQDSVNDVSNSEVAEIVEAEPSRAVVAQLFSSDTSTTTTTQSQEYSEASCASTSACTDKDSEEEKLFDLPDLFTDENEMMIRNDAFCYYSSTWQLCGADAGFRLEEPFFLSE

SEQ ID NO: 21689 - DNA, 648 bp, Arabidopsis thaliana
  misc_feature (1)..(648): Ceres Seq. ID no. 13487129
  misc_feature (1)..(648): Ortholog of  Ceres SEQ ID NO 13599881 as cited in SEQ ID NO 1319
  misc_feature (1)..(648): Ortholog of  Ceres SEQ ID NO 13600163 as cited in SEQ ID NO 0
acttctcataaaaaaggtcatttcaaaaaaaaatcagaaaccgtcaaaaagccaccgttgatatttcttccttgttgcttcttcaatggcgtcgttcgacgaagcacctcccggaaaccccaaagccggtgaaaagatcttcagaaccaagtgcgctcagtgtcacaccgtcgagaaaggtgccggtcacaaacaaggaccgaatttgaatggattgtttggaagacaatctggaacaactccaggatattcttactctgctgctaacaaaagcatggctgtgaattgggaggagaagactctttacgattacttgttgaatcctaagaagtacatccctggaacaaaaatggtgtttcctggactgaaaaaaccgcaagatcgtgccgatctcatcgcttatttgaaggaaggtactgcttagacaggctcgtccagatatatgaagctggcatttttttttctcacagctaaataaaatcagaccaaaaatattatggtcatgaactgctttttgtatggtcttttattctttctttctttttacgttgttgaagaggctagttgcctcttataaagtggaatattcgttattgatgtgaagagctaagaaccaatttccaccacgatagtcatgagattttcctt

SEQ ID NO: 21690 - protein, 112 aa, Arabidopsis thaliana
  peptide (1)..(112): Ceres Seq. ID no. 13487130
MASFDEAPPGNPKAGEKIFRTKCAQCHTVEKGAGHKQGPNLNGLFGRQSGTTPGYSYSAANKSMAVNWEEKTLYDYLLNPKKYIPGTKMVFPGLKKPQDRADLIAYLKEGTA

SEQ ID NO: 21691 - DNA, 549 bp, Arabidopsis thaliana
  misc_feature (1)..(549): Ceres Seq. ID no. 13653411
  misc_feature (1)..(549): Ortholog of  Ceres SEQ ID NO 12329459 as cited in SEQ ID NO 20533
  misc_feature (1)..(549): Ortholog of  Ceres SEQ ID NO 14302474 as cited in SEQ ID NO 60589
aaaatcaaaagcaattcttcttcacacagtagcgaaaaaaagaaatctaattctctcgagaaaatgtctggtcgtggaaagggaggaaaaggcttgggtaaaggaggagccaagcgtcacaggaaggttctgagagacaacatccaaggaatcaccaagcctgccattcgaagattggctcgtagaggtggagtcaagcgtattagtggtctcatctacgaggagacacgtggcgtcctcaagatctttctcgagaacgtaattcgtgatgctgtcacttacaccgagcacgctaggaggaagactgtgaccgccatggatgttgtctacgctctcaagaggcaaggaaggactctctacggattcggcggttaatcagggtttttcagatttgtgtttggagatctgtttctggaaattagatttgagaatttcaatgtaggtattttagtaaatgtagcaagatttgatttcctttttttgctatttcgcttttgtaatgtgttttcatttgctaaattctcaacaatggaaacacgcaatttggtg

SEQ ID NO: 21692 - protein, 124 aa, Arabidopsis thaliana
  peptide (1)..(124): Ceres Seq. ID no. 13653412
KIKSNSSSHSSEKKKSNSLEKMSGRGKGGKGLGKGGAKRHRKVLRDNIQGITKPAIRRLARRGGVKRISGLIYEETRGVLKIFLENVIRDAVTYTEHARRKTVTAMDVVYALKRQGRTLYGFGG

SEQ ID NO: 21693 - protein, 103 aa, Arabidopsis thaliana; identical to SEQ ID NO: 7737
  peptide (1)..(103): Ceres Seq. ID no. 13653413

SEQ ID NO: 21694 - DNA, 632 bp, Arabidopsis thaliana
  misc_feature (1)..(632): Ceres Seq. ID no. 12321782
  misc_feature (1)..(632): Ortholog of  Ceres SEQ ID NO 12635883 as cited in SEQ ID NO 0
gaaaggtagacgtagacgttggatacttctttggtaggctcttaagaatcttaggtgtatctctttagtttgaagggatatggatcaagaaagatcgatggagacagcataaccaataaacagatcaagaagttctggagacagaagcagatcattaagaggatcatctctattctgctattaaggctgcagctcgtgtcagagctcgtaatctctctgatgaggattataaacggtttgaagaaagcttggacatggaggacctggaaaccgaagatcatcagggattgaaagactggtggacaaagagcaaatacgcgtacttgaaccagcctgctcttggatctgcagattcactgaagagaaagaggttttcgacttatacaccaaactgtttctcgttcaagccttgcaatcctctctacgcaacttcgctcaatgtcttttgaaccatgagcagcaaactctgcaagatcaatcgtcttgcatatatgtatatatttgttcgtgtgtgtctctgtacatgtcatgtgttattgcttctatattaatggatgtggattttggtgtggttgttgatttgtaactgttgaataaaatctttctatggaacactaatttcttcttgttcc

SEQ ID NO: 21695 - protein, 64 aa, Arabidopsis thaliana
  peptide (1)..(64): Ceres Seq. ID no. 12321783
MEDLETEDHQGLKDWWTKSKYAYLNQPALGSADSLKRKRFSTYTPNCFSFKPCNPLYATSLNVF

SEQ ID NO: 21696 - protein, 32 aa, Arabidopsis thaliana
  peptide (1)..(32): Ceres Seq. ID no. 12321784
MSSKLCKINRLAYMYIFVRVCLCTCHVLLLLY

SEQ ID NO: 21697 - DNA, 1419 bp, Arabidopsis thaliana
  misc_feature (1)..(1419): Ceres Seq. ID no. 12668556
  misc_feature (1)..(1419): Ortholog of  Ceres SEQ ID NO 14301482 as cited in SEQ ID NO 63355
cgacggttcgtcattcttcctctaagctttatctttctgatctctgaccttgtgtctctgtgcatgtgtgtttatctgctactgtgttttgtcggtttgatctccaaaaaccagacatgaacagaggaagcttatgccctaatcccatctgtctccctcctcttgagcaatccatctccaaattcttaacacagagtggaacgtttaaagatggagatcttcgagtgaacaaagatggaatccagaccgtgtctctgtccgaaccaggagctccacctcctattgagccattggacaaccaattgagtttggcagatttagaagtgatcaaagtcattggcaaaggaagtagtggtaatgtccagttggtcaaacacaaactcactcaacagtttttcgctcttaaggtcattcaattgaacacagaagaatcaacatgtcgggcgatttctcaggagctgagaataaacttgagctcgcaatgtccatatcttgtctcatgttatcaatctttctaccacaacggtcttgtttcaatcatattggaattcatggatggtggatcccttgcagacttgttaaagaaagtcggaaaagttcctgaaaacatgctatctgccatctgcaagcgagttcttcgaggtctttgttatattcatcatgagaggcgaatcattcatcgggacttaaagccttcaaacttgctaatcaatcatagaggtgaagtcaagatcacagactttggtgtcagcaagatcttgacaagcacaagtagtcttgctaattctttcgtgggcacatacccttatatgtctccagagagaatcagcgggagtttgtacagtaacaagagcgatatttggagcttgggactggttttgctcgaatgtgcaacgggtaaattcccgtatactcctccagaacacaagaaaggatggagtagcgtgtacgagcttgtggacgccattgttgaaaacccgcctccttgtgcaccttccaatctcttttctccagagttttgctccttcatctcgcaatgtgtacaaaaagatccaagggacagaaaatcagcaaaggagcttctggaacacaagttcgtaaagatgtttgaagattcggatacaaatctctcggcttacttcaccgacgcaggatctttgattcccccacttgctaactagaaccgagtttgaacaatcttttaacctccaagttattatttcatatccactagaagagattttatgaaagataaatttacgagatgttatgacttaagagacttgtctacaaaatttgatttaatgtgtgtacttttcacatcactattataaacacaactatcatcagttatgtttctctgctagtggtggatatacttatatagtagttcatatcattatacacattttgttttgt

SEQ ID NO: 21698 - protein, 354 aa, Arabidopsis thaliana
  peptide (1)..(354): Ceres Seq. ID no. 12668557
MNRGSLCPNPICLPPLEQSISKFLTQSGTFKDGDLRVNKDGIQTVSLSEPGAPPPIEPLDNQLSLADLEVIKVIGKGSSGNVQLVKHKLTQQFFALKVIQLNTEESTCRAISQELRINLSSQCPYLVSCYQSFYHNGLVSIILEFMDGGSLADLLKKVGKVPENMLSAICKRVLRGLCYIHHERRIIHRDLKPSNLLINHRGEVKITDFGVSKILTSTSSLANSFVGTYPYMSPERISGSLYSNKSDIWSLGLVLLECATGKFPYTPPEHKKGWSSVYELVDAIVENPPPCAPSNLFSPEFCSFISQCVQKDPRDRKSAKELLEHKFVKMFEDSDTNLSAYFTDAGSLIPPLAN

SEQ ID NO: 21699 - protein, 209 aa, Arabidopsis thaliana
  peptide (1)..(209): Ceres Seq. ID no. 12668558
MDGGSLADLLKKVGKVPENMLSAICKRVLRGLCYIHHERRIIHRDLKPSNLLINHRGEVKITDFGVSKILTSTSSLANSFVGTYPYMSPERISGSLYSNKSDIWSLGLVLLECATGKFPYTPPEHKKGWSSVYELVDAIVENPPPCAPSNLFSPEFCSFISQCVQKDPRDRKSAKELLEHKFVKMFEDSDTNLSAYFTDAGSLIPPLAN

SEQ ID NO: 21700 - protein, 190 aa, Arabidopsis thaliana
  peptide (1)..(190): Ceres Seq. ID no. 12668559
MLSAICKRVLRGLCYIHHERRIIHRDLKPSNLLINHRGEVKITDFGVSKILTSTSSLANSFVGTYPYMSPERISGSLYSNKSDIWSLGLVLLECATGKFPYTPPEHKKGWSSVYELVDAIVENPPPCAPSNLFSPEFCSFISQCVQKDPRDRKSAKELLEHKFVKMFEDSDTNLSAYFTDAGSLIPPLAN

SEQ ID NO: 21701 - DNA, 991 bp, Arabidopsis thaliana
  misc_feature (1)..(991): Ceres Seq. ID no. 12335104
  misc_feature (1)..(991): Ortholog of  Ceres SEQ ID NO 13595072 as cited in SEQ ID NO 55971
actttcaccaaacagcaaaacaagaagaacaacaacactaagcaaaaaagaaaagctcaagccgagagagacaatggcatcaacattcacgagctcaagcagtgttcttaccccaacaacattccttggccagactaaagcctcaagctttaacccccttcgtgatgttgtctctctcggatctcccaagtacactatgggaaatgatctttggtatggacctgacagagtgaagtacttaggacccttttccgttcaaactccgtcttacctcaccggagaattccctggcgattatggttgggacaccgccggtttatccgcagaccctgaagcctttgccaaaaacagagctcttgaggtgatccatgggagatgggcaatgttgggagcttttggttgcataacccctgaagttcttcaaaagtgggtccgtgtggacttcaaagaaccagtctggttcaaagccggttcacaaatcttctccgaaggcggtttggactacttaggcaacccaaacctagtccatgctcagagcattttagccgtccttggcttccaagtcatcctcatgggtttggttgaaggtttccgcatcaacggtcttgatggtgttggcgaaggcaacgacttgtaccccggtgggcaatactttgacccgttgggtctcgctgatgatccagttacttttgctgagcttaaggtgaaagagatcaagaacggaagattggctatgttctctatgtttggcttctttgttcaagccattgttactggaaaaggtcctttggagaatctccttgaccatcttgacaaccctgttgctaacaatgcgtgggctttcgcaactaagtttgcacctggagcttaaattttcaagtcttgatgtgattcttgtaatgatatgaacataacctttcttgttcctctcaaattacaaatcttctatttgctatgcacagaagaagtctcaaaaatacatgtctctcac

SEQ ID NO: 21702 - protein, 289 aa, Arabidopsis thaliana
  peptide (1)..(289): Ceres Seq. ID no. 12335105
LSPNSKTRRTTTLSKKEKLKPRETMASTFTSSSSVLTPTTFLGQTKASSFNPLRDVVSLGSPKYTMGNDLWYGPDRVKYLGPFSVQTPSYLTGEFPGDYGWDTAGLSADPEAFAKNRALEVIHGRWAMLGAFGCITPEVLQKWVRVDFKEPVWFKAGSQIFSEGGLDYLGNPNLVHAQSILAVLGFQVILMGLVEGFRINGLDGVGEGNDLYPGGQYFDPLGLADDPVTFAELKVKEIKNGRLAMFSMFGFFVQAIVTGKGPLENLLDHLDNPVANNAWAFATKFAPGA

SEQ ID NO: 21703 - protein, 265 aa, Arabidopsis thaliana
  peptide (1)..(265): Ceres Seq. ID no. 12335106
MASTFTSSSSVLTPTTFLGQTKASSFNPLRDVVSLGSPKYTMGNDLWYGPDRVKYLGPFSVQTPSYLTGEFPGDYGWDTAGLSADPEAFAKNRALEVIHGRWAMLGAFGCITPEVLQKWVRVDFKEPVWFKAGSQIFSEGGLDYLGNPNLVHAQSILAVLGFQVILMGLVEGFRINGLDGVGEGNDLYPGGQYFDPLGLADDPVTFAELKVKEIKNGRLAMFSMFGFFVQAIVTGKGPLENLLDHLDNPVANNAWAFATKFAPGA

SEQ ID NO: 21704 - protein, 224 aa, Arabidopsis thaliana
  peptide (1)..(224): Ceres Seq. ID no. 12335107
MGNDLWYGPDRVKYLGPFSVQTPSYLTGEFPGDYGWDTAGLSADPEAFAKNRALEVIHGRWAMLGAFGCITPEVLQKWVRVDFKEPVWFKAGSQIFSEGGLDYLGNPNLVHAQSILAVLGFQVILMGLVEGFRINGLDGVGEGNDLYPGGQYFDPLGLADDPVTFAELKVKEIKNGRLAMFSMFGFFVQAIVTGKGPLENLLDHLDNPVANNAWAFATKFAPGA

SEQ ID NO: 21705 - DNA, 1215 bp, Arabidopsis thaliana
  misc_feature (1)..(1215): Ceres Seq. ID no. 12651614
  misc_feature (1)..(1215): Ortholog of  Ceres SEQ ID NO 12562215 as cited in SEQ ID NO 20489
  misc_feature (1)..(1215): Ortholog of  Ceres SEQ ID NO 13595548 as cited in SEQ ID NO 51024
  misc_feature (1)..(1215): Ortholog of  Ceres SEQ ID NO 13582350 as cited in SEQ ID NO 56734
  misc_feature (1)..(1215): Ortholog of  Ceres SEQ ID NO 12476493 as cited in SEQ ID NO 58163
  misc_feature (1)..(1215): Ortholog of  Ceres SEQ ID NO 14313459 as cited in SEQ ID NO 62395
  misc_feature (1)..(1215): Ortholog of  Ceres SEQ ID NO 13597295 as cited in SEQ ID NO 63743
  misc_feature (1)..(1215): Ortholog of  Ceres SEQ ID NO 12617090 as cited in SEQ ID NO 64005
  misc_feature (1)..(1215): Ortholog of  Ceres SEQ ID NO 13597439 as cited in SEQ ID NO 64081
  misc_feature (1)..(1215): Ortholog of  Ceres SEQ ID NO 13597233 as cited in SEQ ID NO 64370
  misc_feature (1)..(1215): Ortholog of  Ceres SEQ ID NO 13599438 as cited in SEQ ID NO 0
  misc_feature (1)..(1215): Ortholog of  Ceres SEQ ID NO 13623850 as cited in SEQ ID NO 0
  misc_feature (1)..(1215): Ortholog of  Ceres SEQ ID NO 14309162 as cited in SEQ ID NO 0
acatcaaagcaattaacaaatacacaacttgtaacttcaaatagattactttcaaagaagagagagagaaagaaagatggagaagaacatgaagtttccagtagtagacttgtccaagctcaatggggaagagagagaccaaaccatggctctaatcaatgaagcttgtgagaattggggcttctttgagatagtgaaccatggattaccacatgacttaatggacaagatcgagaagatgacaaaggaccattacaagacatgccaagaacaaaagttcaatgacatgctcaagtccaaaggtttggataatcttgagacagaagtcgaagatgtcgattgggaaagcactttctacgttcgtcacctccctcaatccaatctcaatgacatttcagatgtgtctgatgaatacaggacggccatgaaagactttggtaagagactggagaatcttgctgaggatttgttggatctactgtgtgagaatctagggttagagaaagggtatttgaagaaagtgtttcatggaacaaaaggcccaacctttgggacaaaggtgagcaattatccaccatgtcctaaaccagagatgatcaaaggtcttagggcccacactgatgcaggaggcatcatcttgttgtttcaagacgacaaggtcagtggtctccagcttcttaaagatggtgactggattgatgttcctcctctcaaccactctattgtcatcaatcttggtgaccaacttgaggtgataaccaacgggaagtataagagtgtgctgcaccgtgtggtgactcaacaagaaggaaacaggatgtcggttgcatcgttttacaacccgggaagcgatgcggagatctcaccagctacttcgcttgtcgagaaagattccgagtacccgagtttcgtctttgatgactacatgaagctttatgcaggggtcaagtttcagcccaaggagccacggttcgcagcaatgaagaatgcttctgcagttacagaactgaatcctacagcagccgtagagactttctaaaaatggatttgagattcaagtgaagcagagaaagaaagatgagtttgtgttgtgtgttatggcaataagttaaaacttgtattagtgttgattaattgttggtcaattggtgtgttttaaagtgtggggtgtttatgtttatggaagatgataataattataaaaatctaaattct

SEQ ID NO: 21706 - protein, 320 aa, Arabidopsis thaliana
  peptide (1)..(320): Ceres Seq. ID no. 12651615
MEKNMKFPVVDLSKLNGEERDQTMALINEACENWGFFEIVNHGLPHDLMDKIEKMTKDHYKTCQEQKFNDMLKSKGLDNLETEVEDVDWESTFYVRHLPQSNLNDISDVSDEYRTAMKDFGKRLENLAEDLLDLLCENLGLEKGYLKKVFHGTKGPTFGTKVSNYPPCPKPEMIKGLRAHTDAGGIILLFQDDKVSGLQLLKDGDWIDVPPLNHSIVINLGDQLEVITNGKYKSVLHRVVTQQEGNRMSVASFYNPGSDAEISPATSLVEKDSEYPSFVFDDYMKLYAGVKFQPKEPRFAAMKNASAVTELNPTAAVETF

SEQ ID NO: 21707 - protein, 316 aa, Arabidopsis thaliana
  peptide (1)..(316): Ceres Seq. ID no. 12651616
MKFPVVDLSKLNGEERDQTMALINEACENWGFFEIVNHGLPHDLMDKIEKMTKDHYKTCQEQKFNDMLKSKGLDNLETEVEDVDWESTFYVRHLPQSNLNDISDVSDEYRTAMKDFGKRLENLAEDLLDLLCENLGLEKGYLKKVFHGTKGPTFGTKVSNYPPCPKPEMIKGLRAHTDAGGIILLFQDDKVSGLQLLKDGDWIDVPPLNHSIVINLGDQLEVITNGKYKSVLHRVVTQQEGNRMSVASFYNPGSDAEISPATSLVEKDSEYPSFVFDDYMKLYAGVKFQPKEPRFAAMKNASAVTELNPTAAVETF

SEQ ID NO: 21708 - protein, 297 aa, Arabidopsis thaliana
  peptide (1)..(297): Ceres Seq. ID no. 12651617
MALINEACENWGFFEIVNHGLPHDLMDKIEKMTKDHYKTCQEQKFNDMLKSKGLDNLETEVEDVDWESTFYVRHLPQSNLNDISDVSDEYRTAMKDFGKRLENLAEDLLDLLCENLGLEKGYLKKVFHGTKGPTFGTKVSNYPPCPKPEMIKGLRAHTDAGGIILLFQDDKVSGLQLLKDGDWIDVPPLNHSIVINLGDQLEVITNGKYKSVLHRVVTQQEGNRMSVASFYNPGSDAEISPATSLVEKDSEYPSFVFDDYMKLYAGVKFQPKEPRFAAMKNASAVTELNPTAAVETF

SEQ ID NO: 21709 - DNA, 617 bp, Arabidopsis thaliana
  misc_feature (1)..(617): Ceres Seq. ID no. 12321434
  misc_feature (1)..(617): Ortholog of  Ceres SEQ ID NO 13595818 as cited in SEQ ID NO 56698
gtcttctgctgatttctgagcttcggagctatcgaaaattctgaatctgaaaggtttgagtgaagatgtcttcagatcggaaggttctaagttttgaagaagtttcaaagcacaacaaaactaaggattgttggcttattatttccggcaaggtgtatgatgtgactccattcatggatgatcatcctggaggcgatgaagtcttgttgtcctcaacagggaaagatgctacaaatgattttgaagacgttggtcacagcgacactgcaagggacatgatggacaaatatttcattggtgagattgattcgtctagtgttccagcaactaggacatacgttgcaccacagcaaccagcctacaaccaagacaagacaccagaattcattatcaagattcttcagttccttgttccgatcttgatcttgggattggctcttgtcgtccgtcactataccaagaaagactagaagaagccaaaggcttgctttgatgcttgtcattgaatatctctaccgatctctgtctatctctcttgcgaaaaaaagtactgttactgttgtttggtcttagactgattcttgttgaaattacgaaccaaaaatcattgtgttgct

SEQ ID NO: 21710 - protein, 134 aa, Arabidopsis thaliana
  peptide (1)..(134): Ceres Seq. ID no. 12321435
MSSDRKVLSFEEVSKHNKTKDCWLIISGKVYDVTPFMDDHPGGDEVLLSSTGKDATNDFEDVGHSDTARDMMDKYFIGEIDSSSVPATRTYVAPQQPAYNQDKTPEFIIKILQFLVPILILGLALVVRHYTKKD

SEQ ID NO: 21711 - protein, 98 aa, Arabidopsis thaliana
  peptide (1)..(98): Ceres Seq. ID no. 12321436
MDDHPGGDEVLLSSTGKDATNDFEDVGHSDTARDMMDKYFIGEIDSSSVPATRTYVAPQQPAYNQDKTPEFIIKILQFLVPILILGLALVVRHYTKKD

SEQ ID NO: 21712 - DNA, 839 bp, Arabidopsis thaliana
  misc_feature (1)..(839): Ceres Seq. ID no. 12385067
  misc_feature (1)..(839): Ortholog of  Ceres SEQ ID NO 12611008 as cited in SEQ ID NO 56180
  misc_feature (1)..(839): Ortholog of  Ceres SEQ ID NO 15179480 as cited in SEQ ID NO 0
atataagtctttctcactccttctctttcctttgtgattcatatccttcttcttctccaagaacctctctctctttctgcttctctatattttaacactttcttccgaatttgcccctcaagttttattttaattgctaaaatggctggaaccctagttaactccgccgggagattctcaccgggaaattgtattcttcctcaacagagaacagccagattctacagcggaaccgcgagatttcccaccggagctccttcgtttaaggcttcagctcagacgcttaacgccgagccagctgtaacggaatccgttcgtcggagagtttctagcctctacgaattactgaaagtgaatgaaacggcgtccttgacggagatcaagacggcgtaccggagcttagctaaagtatatcatccagatgcgtcggaatcggacggtcgagatttcatggagattcacaaagcttacgcgacacttgcggatccgactacaagagcgatttacgactcgacgcttagagtaccacggagacgggtacacgccggagcgatgggtcggtcggggcgggtttacgctacgacccggagatgggagacggatcagtgttggtgattttaggcttcctatgattttgcagcagcgaaagggcactttttgacttactttcccctttgattacgttttttttttccttgtcatatctttggaaaattaaggggaaattaagtttaatccgctctttttttttttttttgtttttcttttaacttaagcagttaacaatgtataaagaagttatgagtagagaaatgtatatgattttagttttctccttt

SEQ ID NO: 21713 - protein, 157 aa, Arabidopsis thaliana
  peptide (1)..(157): Ceres Seq. ID no. 12385068
MAGTLVNSAGRFSPGNCILPQQRTARFYSGTARFPTGAPSFKASAQTLNAEPAVTESVRRRVSSLYELLKVNETASLTEIKTAYRSLAKVYHPDASESDGRDFMEIHKAYATLADPTTRAIYDSTLRVPRRRVHAGAMGRSGRVYATTRRWETDQCW

SEQ ID NO: 21714 - protein, 79 aa, Arabidopsis thaliana
  peptide (1)..(79): Ceres Seq. ID no. 12385069
MRRNRTVEISWRFTKLTRHLRIRLQERFTTRRLEYHGDGYTPERWVGRGGFTLRPGDGRRISVGDFRLPMILQQRKGTF

SEQ ID NO: 21715 - DNA, 640 bp, Arabidopsis thaliana
  misc_feature (1)..(640): Ceres Seq. ID no. 12323094
  misc_feature (1)..(640): Ortholog of  Ceres SEQ ID NO 12610679 as cited in SEQ ID NO 56077
aatcgtcgtctctccccaattcaaaaaaagaaataacctaaacgtgttcacacagagatctcgagatgaaagataaccaaacggaagttgaatcgaggagcactgatgatagattgaaagttagagggaacaaagttggaaagaaaacaaaggatccaaacaggcctaagaaaccaccaagtcctttcttcgtcttcctggacgatttccgaaaggagtttaatctggctaaccctgacaacaaatccgtcggtaatgttggtagagcagctggaaagaaatggaaaaccatgactgaagaagaaagagcaccttttgtagcaaaatcacagagcaaaaagactgagtatgctgtgactatgcaacagtataacatggaactggctaatggaaacaagacaactggagatgatgagaaacaagagaaagctgctgatgattaggaagttggatcagtgatttgtgtatcaactatatctgttgttttatgtcaacttttagctagcttttagggagaacaattgttacattcctgttttatcctttctgtcaactgtgggattattcagatgtaactttggatttagctttgagcttcaattccaccttttatgagatcatatcatatgtttgcaatctt

SEQ ID NO: 21716 - protein, 125 aa, Arabidopsis thaliana
  peptide (1)..(125): Ceres Seq. ID no. 12323095
MKDNQTEVESRSTDDRLKVRGNKVGKKTKDPNRPKKPPSPFFVFLDDFRKEFNLANPDNKSVGNVGRAAGKKWKTMTEEERAPFVAKSQSKKTEYAVTMQQYNMELANGNKTTGDDEKQEKAADD

SEQ ID NO: 21717 - DNA, 982 bp, Arabidopsis thaliana
  misc_feature (1)..(982): Ceres Seq. ID no. 12332364
  misc_feature (1)..(982): Ortholog of  Ceres SEQ ID NO 14305022 as cited in SEQ ID NO 53586
  misc_feature (1)..(982): Ortholog of  Ceres SEQ ID NO 12506279 as cited in SEQ ID NO 55440
  misc_feature (1)..(982): Ortholog of  Ceres SEQ ID NO 13654847 as cited in SEQ ID NO 62459
  misc_feature (1)..(982): Ortholog of  Ceres SEQ ID NO 15174357 as cited in SEQ ID NO 0
aaggtaaaaaaaagctttgtgcagagagagagagaagaagaaaaatgggtttgcttacgaacaagattgagagagaagagctaaagccaggagatcacatctatacttacagagcaatcttcgcttattctcaccacggaatctttgtcggtgggtccaaagttgttcatttcagacctgaacacaaccccatggattcatcaacatcatcaatatcatcatcttcctctgaagatatctgttccatatttcctgattgcggtttcagacaaccggacagtggagtagtcctttcttgcttagactgtttcctcaagaacggctcactctactgcttcgaatatggagtcagtccatcggttttcctaaccaaagtccgcggagggacttgcacaaccgcgcaatctgatacaactgattcagtcatccacagggcaatgtaccttctccaaaacggatttggcaactacgacattttcaagaacaactgtgaggatttcgcgctctattgcaagaccggtttgcttataatggataagctcggtgtagggagaagcggtcaagcttcttcaattgttggtgctcctttggctgcactcctctcttctccttccaaattgcttattccaagtcccattggtgtggcaacagttactgctggtatgtactgtatgagtcgctatgctaccgatattggtgttagaagcgacgtcattaaggtctcagttgaggatttggctctcaaccttgacgtaaagaccattgagcaaggtgaagaagaagaagaagacgaagaagaagattctgataccgactatgttaggtgacaaacagatacctatcacctttgttcacgaatttcgatatacataagaaaacatttcagttagaatcctcatgttggttttatgttccctttattgcatttgttggcctattttctgtctgtacaaaatgaaaacgcagacgttttggtttgggt

SEQ ID NO: 21718 - protein, 274 aa, Arabidopsis thaliana
  peptide (1)..(274): Ceres Seq. ID no. 12332365
GKKKLCAERERRRKMGLLTNKIEREELKPGDHIYTYRAIFAYSHHGIFVGGSKVVHFRPEHNPMDSSTSSISSSSSEDICSIFPDCGFRQPDSGVVLSCLDCFLKNGSLYCFEYGVSPSVFLTKVRGGTCTTAQSDTTDSVIHRAMYLLQNGFGNYDIFKNNCEDFALYCKTGLLIMDKLGVGRSGQASSIVGAPLAALLSSPSKLLIPSPIGVATVTAGMYCMSRYATDIGVRSDVIKVSVEDLALNLDVKTIEQGEEEEEDEEEDSDTDYVR

SEQ ID NO: 21719 - protein, 260 aa, Arabidopsis thaliana
  peptide (1)..(260): Ceres Seq. ID no. 12332366
MGLLTNKIEREELKPGDHIYTYRAIFAYSHHGIFVGGSKVVHFRPEHNPMDSSTSSISSSSSEDICSIFPDCGFRQPDSGVVLSCLDCFLKNGSLYCFEYGVSPSVFLTKVRGGTCTTAQSDTTDSVIHRAMYLLQNGFGNYDIFKNNCEDFALYCKTGLLIMDKLGVGRSGQASSIVGAPLAALLSSPSKLLIPSPIGVATVTAGMYCMSRYATDIGVRSDVIKVSVEDLALNLDVKTIEQGEEEEEDEEEDSDTDYVR

SEQ ID NO: 21720 - protein, 211 aa, Arabidopsis thaliana
  peptide (1)..(211): Ceres Seq. ID no. 12332367
MDSSTSSISSSSSEDICSIFPDCGFRQPDSGVVLSCLDCFLKNGSLYCFEYGVSPSVFLTKVRGGTCTTAQSDTTDSVIHRAMYLLQNGFGNYDIFKNNCEDFALYCKTGLLIMDKLGVGRSGQASSIVGAPLAALLSSPSKLLIPSPIGVATVTAGMYCMSRYATDIGVRSDVIKVSVEDLALNLDVKTIEQGEEEEEDEEEDSDTDYVR

SEQ ID NO: 21721 - DNA, 925 bp, Arabidopsis thaliana
  misc_feature (1)..(925): Ceres Seq. ID no. 13497033
  misc_feature (1)..(925): Ortholog of  Ceres SEQ ID NO 14314838 as cited in SEQ ID NO 52573
catcgctgtctggaacagcgatgaccgagaaaggcaatggagtcggctaaatcaatcatcggtggccaccaaaatgtcatcctgatgcgtcatggtgatcgactcgacaatttcgagccactctggacttcaacagctgcgagaccgtgggatccaccgcttgctcaagacggtaaggatcgggcctttagaactggtcagagaatccggtctcaacttggggttccgattcaccgtgtcttcgtctcccctttcctccgctgcatccagaccgcttccgaagtcgttgccgccctctcagccgtcgatttcgatcccattgctatgtcatctaaagacgtgctttccatcgacaatactaagatcaaggtggctattgaatttggattgtccgagataccgcacccaatctttattaagagtgaagttgctcccaaagatgggaaatttgatttcaagatttcagatcttgaagctatgtttcctgaaggaacagtggattctaatgtggatatggtttataaagaggtgccagaatggggagaatctgcacaagcctttgaggatcgatattataagacagtgaagattcttgcggagaagtatccttctgagaacttgctcttagtcactcattggggagcagtaagtgttgcattttacaactacttcaaagacgcaactaagtacgtggtagattattgtggtagtgttgaaatgagaaggcagattttgaatggtgatgggtttggtaaatttgaggtagttactagtcatggagtatcttataagtacaccaaaatcccagtccatgatcatgtagttgtaagccgccaatctcccctttaaccggtttatatgtgaatatctggtttaacgggttgcttcaataaaaaaaaatatataagaataatggttcagttag

SEQ ID NO: 21722 - protein, 270 aa, Arabidopsis thaliana
  peptide (1)..(270): Ceres Seq. ID no. 13497034
MESAKSIIGGHQNVILMRHGDRLDNFEPLWTSTAARPWDPPLAQDGKDRAFRTGQRIRSQLGVPIHRVFVSPFLRCIQTASEVVAALSAVDFDPIAMSSKDVLSIDNTKIKVAIEFGLSEIPHPIFIKSEVAPKDGKFDFKISDLEAMFPEGTVDSNVDMVYKEVPEWGESAQAFEDRYYKTVKILAEKYPSENLLLVTHWGAVSVAFYNYFKDATKYVVDYCGSVEMRRQILNGDGFGKFEVVTSHGVSYKYTKIPVHDHVVVSRQSPL

SEQ ID NO: 21723 - protein, 254 aa, Arabidopsis thaliana
  peptide (1)..(254): Ceres Seq. ID no. 13497035
MRHGDRLDNFEPLWTSTAARPWDPPLAQDGKDRAFRTGQRIRSQLGVPIHRVFVSPFLRCIQTASEVVAALSAVDFDPIAMSSKDVLSIDNTKIKVAIEFGLSEIPHPIFIKSEVAPKDGKFDFKISDLEAMFPEGTVDSNVDMVYKEVPEWGESAQAFEDRYYKTVKILAEKYPSENLLLVTHWGAVSVAFYNYFKDATKYVVDYCGSVEMRRQILNGDGFGKFEVVTSHGVSYKYTKIPVHDHVVVSRQSPL

SEQ ID NO: 21724 - protein, 174 aa, Arabidopsis thaliana
  peptide (1)..(174): Ceres Seq. ID no. 13497036
MSSKDVLSIDNTKIKVAIEFGLSEIPHPIFIKSEVAPKDGKFDFKISDLEAMFPEGTVDSNVDMVYKEVPEWGESAQAFEDRYYKTVKILAEKYPSENLLLVTHWGAVSVAFYNYFKDATKYVVDYCGSVEMRRQILNGDGFGKFEVVTSHGVSYKYTKIPVHDHVVVSRQSPL

SEQ ID NO: 21725 - DNA, 736 bp, Arabidopsis thaliana
  misc_feature (1)..(736): Ceres Seq. ID no. 12397229
  misc_feature (1)..(736): Ortholog of  Ceres SEQ ID NO 15174384 as cited in SEQ ID NO 0
cttttttgttttctctcacactttcttaagatttttttcttcggctcggacgcagatgactaacagttacgctctgtcaccggcgattatcgccgccgttcgtcctccggcatctcaagactatctagttgctgcttctcttagtggacgcaaatcgatcaactcttcatcttcgtccattttcgtacctatctcattatctacttcctacggtcgaagcaaatgcgccttctcaatctcgcggaagaatccaaaatcgacgattcgttgcgatattgctgtgaaatcggcggcttctgtagacgcggacgctgatctatcgtcatctacgtcgttggagacggaggaagacgagaaagcgaaggagaagattggagctagggttagggttacggttccgttgaaagtttaccatgtggttcgtgtaccggaggttgaattgatgggaatggaaggttttatcaaagattacgtcgttctttggaaaggaaagaaaatctcagctaatctgccgtttaaggtacagttcgtgaaagagatcgaaggtcgtggtcctgtcaaattcttcacgcatcttaaggaagacgagttcgagttaattgatccgtgattgaattgaaaaaggcaaaaacttttcttctctttctgatattagacttgaaaaatcttttgtgaatggtttgtttgtatgtacttttgtatacatttagcttattatatacataagatttcaccc

SEQ ID NO: 21726 - protein, 202 aa, Arabidopsis thaliana
  peptide (1)..(202): Ceres Seq. ID no. 12397230
FFVFSHTFLRFFSSARTQMTNSYALSPAIIAAVRPPASQDYLVAASLSGRKSINSSSSSIFVPISLSTSYGRSKCAFSISRKNPKSTIRCDIAVKSAASVDADADLSSSTSLETEEDEKAKEKIGARVRVTVPLKVYHVVRVPEVELMGMEGFIKDYVVLWKGKKISANLPFKVQFVKEIEGRGPVKFFTHLKEDEFELIDP

SEQ ID NO: 21727 - protein, 184 aa, Arabidopsis thaliana
  peptide (1)..(184): Ceres Seq. ID no. 12397231
MTNSYALSPAIIAAVRPPASQDYLVAASLSGRKSINSSSSSIFVPISLSTSYGRSKCAFSISRKNPKSTIRCDIAVKSAASVDADADLSSSTSLETEEDEKAKEKIGARVRVTVPLKVYHVVRVPEVELMGMEGFIKDYVVLWKGKKISANLPFKVQFVKEIEGRGPVKFFTHLKEDEFELIDP

SEQ ID NO: 21728 - DNA, 925 bp, Arabidopsis thaliana
  misc_feature (1)..(925): Ceres Seq. ID no. 12384569
  misc_feature (1)..(925): Ortholog of  Ceres SEQ ID NO 13658400 as cited in SEQ ID NO 66403
aaacctccaacttttttttgttttatcagattgtagaattagggaagagactttcgcaagcaatctagaagcaaatcgatcgccaaatctccggattatttgcaagaatcattcccagataatcttccccagattctccacttctccaggtattaatttcgtattgagtggattagattagatttcaagatatgagagcctcactggcgttctaatgtcactgtttcgtattttcattaatcagcttgaagaagacgacgaagatatggctacttcgaagaaaatgattacacgtgaagagtgggagaagaaactaaatgctgtgaagcttaggaaagaagatatgaatactttggtgatgaattttcttgtgactgaaggatatgttgaagctgctgagaaattccaaagggagtctggaaccaaaccagagatagatcttgcgaccatcactgatcgaatggctgttaaaaaggctgttcaaaacggaaatgtcgaggatgcgattgaaaaagttaatgatttgaatcctgagatactagacacgaatccggagctcttttttcatcttcagcagcaaaggttgatagaattaattcgacaagggaagacagaagaggccttggagtttgctcaagaggaacttgcaccacgtggcggaagaaaaccaagcgtttctagaagaaaatnggaaaaaactgtagccctacttgtttttgacgatgcctctacctgcccggttaaagagcttcttgatctttcccaccgtcttaagacagcaagtgaagtaaatgcagcgattcttacaagccagagccacgaaaaagatcctaaacttccaagcttgttgaagatgttgatttgggctcaaaatcaactggacgagaaagcagtgtatcctcacattaatgatttgtctaccggt

SEQ ID NO: 21729 - protein, 237 aa, Arabidopsis thaliana
  peptide (1)..(237): Ceres Seq. ID no. 12384570
  misc_feature (159)..(159): Xaa is any aa, unknown or other
MSLFRIFINQLEEDDEDMATSKKMITREEWEKKLNAVKLRKEDMNTLVMNFLVTEGYVEAAEKFQRESGTKPEIDLATITDRMAVKKAVQNGNVEDAIEKVNDLNPEILDTNPELFFHLQQQRLIELIRQGKTEEALEFAQEELAPRGGRKPSVSRRKXEKTVALLVFDDASTCPVKELLDLSHRLKTASEVNAAILTSQSHEKDPKLPSLLKMLIWAQNQLDEKAVYPHINDLSTG

SEQ ID NO: 21730 - protein, 220 aa, Arabidopsis thaliana
  peptide (1)..(220): Ceres Seq. ID no. 12384571
  misc_feature (142)..(142): Xaa is any aa, unknown or other
MATSKKMITREEWEKKLNAVKLRKEDMNTLVMNFLVTEGYVEAAEKFQRESGTKPEIDLATITDRMAVKKAVQNGNVEDAIEKVNDLNPEILDTNPELFFHLQQQRLIELIRQGKTEEALEFAQEELAPRGGRKPSVSRRKXEKTVALLVFDDASTCPVKELLDLSHRLKTASEVNAAILTSQSHEKDPKLPSLLKMLIWAQNQLDEKAVYPHINDLSTG

SEQ ID NO: 21731 - protein, 214 aa, Arabidopsis thaliana
  peptide (1)..(214): Ceres Seq. ID no. 12384572
  misc_feature (136)..(136): Xaa is any aa, unknown or other
MITREEWEKKLNAVKLRKEDMNTLVMNFLVTEGYVEAAEKFQRESGTKPEIDLATITDRMAVKKAVQNGNVEDAIEKVNDLNPEILDTNPELFFHLQQQRLIELIRQGKTEEALEFAQEELAPRGGRKPSVSRRKXEKTVALLVFDDASTCPVKELLDLSHRLKTASEVNAAILTSQSHEKDPKLPSLLKMLIWAQNQLDEKAVYPHINDLSTG

SEQ ID NO: 21732 - DNA, 651 bp, Arabidopsis thaliana
  misc_feature (1)..(651): Ceres Seq. ID no. 12340144
  misc_feature (1)..(651): Ortholog of  Ceres SEQ ID NO 13595433 as cited in SEQ ID NO 56659
atatttgaagttcgtggattttgaaggatttgattggtttccatgatctagagttttgagaatggcgatggtatcaggaagacgatctactctaaaccccgacgcacctctttttattccggcagctgtacgacaagtggaagatttctcaccggagtggtggcaattggtgacaacttcgacttggtaccctgattactggatcagtcagcagcagcaaggcgcggatggtttctatgacaacggagagaatgagaatggtggaggtcatatcgatgtagctgatcttcttccagaatcattttattttgatgatatggaagatttctttgacactgatgctgctgagtttgatcaaggattcgatggaagaatgtattaccaagcaccttccgaatttggctttggaaagaatggtgagatggttaagaaatcaagtggaaacaggagcccgagatcgattgtggaaccagctaagtatgcggaaaagccagcgaaatggggaaaccagagggttgctgctgctccgagaaacatccaccagcctcgctgaagagatatgttgttaactagtcagagaagtcagagcagttcggtctgtgtatctttagccaccactgtacctttgtaatttttagtatttgcttccac

SEQ ID NO: 21733 - protein, 163 aa, Arabidopsis thaliana
  peptide (1)..(163): Ceres Seq. ID no. 12340145
MAMVSGRRSTLNPDAPLFIPAAVRQVEDFSPEWWQLVTTSTWYPDYWISQQQQGADGFYDNGENENGGGHIDVADLLPESFYFDDMEDFFDTDAAEFDQGFDGRMYYQAPSEFGFGKNGEMVKKSSGNRSPRSIVEPAKYAEKPAKWGNQRVAAAPRNIHQPR

SEQ ID NO: 21734 - protein, 161 aa, Arabidopsis thaliana
  peptide (1)..(161): Ceres Seq. ID no. 12340146
MVSGRRSTLNPDAPLFIPAAVRQVEDFSPEWWQLVTTSTWYPDYWISQQQQGADGFYDNGENENGGGHIDVADLLPESFYFDDMEDFFDTDAAEFDQGFDGRMYYQAPSEFGFGKNGEMVKKSSGNRSPRSIVEPAKYAEKPAKWGNQRVAAAPRNIHQPR

SEQ ID NO: 21735 - protein, 85 aa, Arabidopsis thaliana; identical to SEQ ID NO: 20803
  peptide (1)..(85): Ceres Seq. ID no. 12340147

SEQ ID NO: 21736 - DNA, 2530 bp, Arabidopsis thaliana
  misc_feature (1)..(2530): Ceres Seq. ID no. 12422840
  misc_feature (1)..(2530): Ortholog of  Ceres SEQ ID NO 14302891 as cited in SEQ ID NO 66282
aaccatctcactttcttttttctgtcttacactccaagatcggtctcgatggcttcgttcatagatcttttcgccggcgacatcacgacgcaactcttaaagctgctcgctctagtagctaacacagtctacagttgcaaaggaatcgccgaacgactgatcacgatgatcagagacgttcaaccaacgatcagggagatccaatacagtggcgcggagctgagtaaccatcaccaaactcaactgggagtattctatgagatcttggagaaagcaagaaagctatgtgaaaaggttttaagatgcaataggtggaaccttaaacatgtgtaccacgcgaataagatgaaggatctcgagaaaaaaatatctcgtttcctcaacagccagattttgctctttgttcttgctgaggtatgtcatctacgggtcaatggtgacaggattgagaggaatatggatagactgttgactgagcggaatgattctttgtcgtttccggagactatgatggagattgagacggtaagcgatccggagattcagacggtattggaattggggaagaaaaaggtgaaggagatgatgtttaagtttacggatacacatttgtttgggatctctggaatgagcggttcagggaaaaccactcttgcaatagagctttcaaaggacgatgatgttcgaggactctttaagaataaggttttgtttttgactgtgtcacggtctccgaattttgagaatttggagtcttgtatacgagaatttctttatgatggagttcatcaacggaagctagtgattcttgatgatgtttggacaagggagtccttggacaggctgatgtctaaaattcgtggaagcactactttagtagtgtcacggtccaagcttgcagatcctagaaccacctacaatgtggaattattaaagaaagatgaagcaatgtctcttttgtgtctctgtgctttcgaacaaaagtccccgccttctccattcaacaaatatttggtgaagcaggttgttgatgagtgtaaaggtttacctttatctttgaaagttcttggtgcttcgttaaaaaacaaacctgaaagatattgggaaggcgtagtgaagaggttattaagaggagaagctgctgatgaaactcatgagagcagagtgtttgctcatatggaagaaagtctagaaaacctcgacccgaaaatccgagactgtttcttggatatgggtgctttccctgaagacaagaagatccctcttgatcttctcacgagcgtgtgggttgagaggcatgatgttgacgaggaaactgcgttttcctttgttcttcgtttagctgacaagaatctccttactatagtgaacaatccgaggtttggcgatgtgcacattggctactatgatgtatttgtgacgcaacacgatgttttgagagacctagcccttcatatgtccaatcgtgtggacgtaaataggagagagcggttattaatgccaaaaacagagccaatgcttccaagagaatgggaaaagaataaagatgagccatttgatgccaagatagtttcccttcatacagtggaaatggatgaaatgaattggtttgacatggacctccctaaggcagaagttttaatactgaacttctcttcggacaactacgtcttgccaccatttattggtaagatgagtagactcagggtgctcgtgattatcaacaatggcatgtctcctgcgcgtctacatggcttctccatctttgccaatttggccaaactgaggagtctctggctcaagagggtacatgtccctgaactcaccagctgcaccattccactgaaaaacctgcacaagatgcatctaatcttttgtaaggtcaagaacagctttgttcagacgtcattcgacatctcgaaaatattcccaagcttgtctgatctcactattgatcactgtgatgatcttttggaactaaaatccatatttggaataacctctctcaactctctcagcataaccaactgtccacggattcttgaattgcccaagaatttgagtaacgtacagtcccttgaacgtctaaggttatatgcctgccccgagctgatatccctcccggtcgaagtttgtgagctgccatgtctaaagtacgttgacatttcacagtgtgtcagcctggtttctcttcctgaaaagtttggaaagctagggagtcttgagaaaattgacatgagagaatgcagtttattgggtttaccaagttctgtagctgcacttgtgtctctacgccatgtcatttgcgatgaggagacttcgtctatgtgggaaatggtcaagaaggtggttcctgaactttgcattgaagtcgccaaaaaatgcttcaccgtggattggcttgacgattaggcttcttgttccttcaaactcttgataaccccttgtattaatcattgatcagcagtaattagagcgagttatttgaagtttggaatgtttctctctatatataagatcatttttagct

SEQ ID NO: 21737 - protein, 803 aa, Arabidopsis thaliana
  peptide (1)..(803): Ceres Seq. ID no. 12422841
NHLTFFFLSYTPRSVSMASFIDLFAGDITTQLLKLLALVANTVYSCKGIAERLITMIRDVQPTIREIQYSGAELSNHHQTQLGVFYEILEKARKLCEKVLRCNRWNLKHVYHANKMKDLEKKISRFLNSQILLFVLAEVCHLRVNGDRIERNMDRLLTERNDSLSFPETMMEIETVSDPEIQTVLELGKKKVKEMMFKFTDTHLFGISGMSGSGKTTLAIELSKDDDVRGLFKNKVLFLTVSRSPNFENLESCIREFLYDGVHQRKLVILDDVWTRESLDRLMSKIRGSTTLVVSRSKLADPRTTYNVELLKKDEAMSLLCLCAFEQKSPPSPFNKYLVKQVVDECKGLPLSLKVLGASLKNKPERYWEGVVKRLLRGEAADETHESRVFAHMEESLENLDPKIRDCFLDMGAFPEDKKIPLDLLTSVWVERHDVDEETAFSFVLRLADKNLLTIVNNPRFGDVHIGYYDVFVTQHDVLRDLALHMSNRVDVNRRERLLMPKTEPMLPREWEKNKDEPFDAKIVSLHTVEMDEMNWFDMDLPKAEVLILNFSSDNYVLPPFIGKMSRLRVLVIINNGMSPARLHGFSIFANLAKLRSLWLKRVHVPELTSCTIPLKNLHKMHLIFCKVKNSFVQTSFDISKIFPSLSDLTIDHCDDLLELKSIFGITSLNSLSITNCPRILELPKNLSNVQSLERLRLYACPELISLPVEVCELPCLKYVDISQCVSLVSLPEKFGKLGSLEKIDMRECSLLGLPSSVAALVSLRHVICDEETSSMWEMVKKVVPELCIEVAKKCFTVDWLDD

SEQ ID NO: 21738 - protein, 787 aa, Arabidopsis thaliana
  peptide (1)..(787): Ceres Seq. ID no. 12422842
MASFIDLFAGDITTQLLKLLALVANTVYSCKGIAERLITMIRDVQPTIREIQYSGAELSNHHQTQLGVFYEILEKARKLCEKVLRCNRWNLKHVYHANKMKDLEKKISRFLNSQILLFVLAEVCHLRVNGDRIERNMDRLLTERNDSLSFPETMMEIETVSDPEIQTVLELGKKKVKEMMFKFTDTHLFGISGMSGSGKTTLAIELSKDDDVRGLFKNKVLFLTVSRSPNFENLESCIREFLYDGVHQRKLVILDDVWTRESLDRLMSKIRGSTTLVVSRSKLADPRTTYNVELLKKDEAMSLLCLCAFEQKSPPSPFNKYLVKQVVDECKGLPLSLKVLGASLKNKPERYWEGVVKRLLRGEAADETHESRVFAHMEESLENLDPKIRDCFLDMGAFPEDKKIPLDLLTSVWVERHDVDEETAFSFVLRLADKNLLTIVNNPRFGDVHIGYYDVFVTQHDVLRDLALHMSNRVDVNRRERLLMPKTEPMLPREWEKNKDEPFDAKIVSLHTVEMDEMNWFDMDLPKAEVLILNFSSDNYVLPPFIGKMSRLRVLVIINNGMSPARLHGFSIFANLAKLRSLWLKRVHVPELTSCTIPLKNLHKMHLIFCKVKNSFVQTSFDISKIFPSLSDLTIDHCDDLLELKSIFGITSLNSLSITNCPRILELPKNLSNVQSLERLRLYACPELISLPVEVCELPCLKYVDISQCVSLVSLPEKFGKLGSLEKIDMRECSLLGLPSSVAALVSLRHVICDEETSSMWEMVKKVVPELCIEVAKKCFTVDWLDD

SEQ ID NO: 21739 - protein, 748 aa, Arabidopsis thaliana
  peptide (1)..(748): Ceres Seq. ID no. 12422843
MIRDVQPTIREIQYSGAELSNHHQTQLGVFYEILEKARKLCEKVLRCNRWNLKHVYHANKMKDLEKKISRFLNSQILLFVLAEVCHLRVNGDRIERNMDRLLTERNDSLSFPETMMEIETVSDPEIQTVLELGKKKVKEMMFKFTDTHLFGISGMSGSGKTTLAIELSKDDDVRGLFKNKVLFLTVSRSPNFENLESCIREFLYDGVHQRKLVILDDVWTRESLDRLMSKIRGSTTLVVSRSKLADPRTTYNVELLKKDEAMSLLCLCAFEQKSPPSPFNKYLVKQVVDECKGLPLSLKVLGASLKNKPERYWEGVVKRLLRGEAADETHESRVFAHMEESLENLDPKIRDCFLDMGAFPEDKKIPLDLLTSVWVERHDVDEETAFSFVLRLADKNLLTIVNNPRFGDVHIGYYDVFVTQHDVLRDLALHMSNRVDVNRRERLLMPKTEPMLPREWEKNKDEPFDAKIVSLHTVEMDEMNWFDMDLPKAEVLILNFSSDNYVLPPFIGKMSRLRVLVIINNGMSPARLHGFSIFANLAKLRSLWLKRVHVPELTSCTIPLKNLHKMHLIFCKVKNSFVQTSFDISKIFPSLSDLTIDHCDDLLELKSIFGITSLNSLSITNCPRILELPKNLSNVQSLERLRLYACPELISLPVEVCELPCLKYVDISQCVSLVSLPEKFGKLGSLEKIDMRECSLLGLPSSVAALVSLRHVICDEETSSMWEMVKKVVPELCIEVAKKCFTVDWLDD

SEQ ID NO: 21740 - DNA, 704 bp, Arabidopsis thaliana
  misc_feature (1)..(704): Ceres Seq. ID no. 12337877
  misc_feature (1)..(704): Ortholog of  Ceres SEQ ID NO 15176099 as cited in SEQ ID NO 59451
aaaaaatcgaatcaaaatctctaaagtttcaatttttttgttctgttctttttttttttttaaagaatggcttcaatttctgcaactttgccttcgccattgttactcacacagagaaaatccaatctcacatcgattcaaaaactcccattttctctaactcgaggtacgaatgatctttctccattatctcttactcgaaaccctagcagcatcagtctgatggtgaaagctagtggagaaagctcagattcatcgactgatctcgacgttgttagtacgattcagaatgtttgggataagtctgaaaataggttaggtcttattggtttgggttttgctggtattgtagctctttgggcatcattgaatctcatcacggcaattgacaaattgcccgttatctcgagcggattcgaactagttggtatcttgttctccacgtggttcacatatcgatatctcttgttcaaaccggacagacaggagctttcgaaaattgtcaagaaatcagtagcggatatacttggcacagtgaaccttgtgtgtgtgataatacttcatctttggaagatgatttgtttgcaagtttgtaaaattacatgacagggtggttgttgtttctagtccaataatgtcatgcatttgaaacctgtaaatactttattgttggtttttggttgtgagcaaaatcaatcttttct

SEQ ID NO: 21741 - protein, 179 aa, Arabidopsis thaliana
  peptide (1)..(179): Ceres Seq. ID no. 12337878
MASISATLPSPLLLTQRKSNLTSIQKLPFSLTRGTNDLSPLSLTRNPSSISLMVKASGESSDSSTDLDVVSTIQNVWDKSENRLGLIGLGFAGIVALWASLNLITAIDKLPVISSGFELVGILFSTWFTYRYLLFKPDRQELSKIVKKSVADILGTVNLVCVIILHLWKMICLQVCKIT

SEQ ID NO: 21742 - protein, 127 aa, Arabidopsis thaliana
  peptide (1)..(127): Ceres Seq. ID no. 12337879
MVKASGESSDSSTDLDVVSTIQNVWDKSENRLGLIGLGFAGIVALWASLNLITAIDKLPVISSGFELVGILFSTWFTYRYLLFKPDRQELSKIVKKSVADILGTVNLVCVIILHLWKMICLQVCKIT

SEQ ID NO: 21743 - DNA, 845 bp, Arabidopsis thaliana
  misc_feature (1)..(845): Ceres Seq. ID no. 12396872
  misc_feature (1)..(845): Ortholog of  Ceres SEQ ID NO 13599189 as cited in SEQ ID NO 637
cgtataatttccccaatttctcagagagactcaaaatcaccaccaccaccaaatcgccgccatgtttaaacaagcttctcgtctcctctcccgatctgtcgccgccgcatcttccaaatcggtgacgactcgtgccttttcaacggaacttccatcgacgctcgattccactttcgtcgaggcatggaagaaagtcgcaccgaatatggacccaccgcagactccttctgctttcatgaaacctcgtccttccactccttcttctatcccgacgaagctcaccgtcaattttgtcctcccttacacatctgagcttaccgggaaagaggtcgacatggtcatcattcccgcatcaacaggacaaatgggtgtcttgcccggacacgttccaacaattgctgagctaaaacctggcatcatgtccgtccatgaaggcactgacgtgaagaaatacttcttgagcagtggttttgcattcctccacgcaaattccgtcgctgacataatcgcggtggaagctgtgccgcttgaccacattgaccctagccaagtccaaaagggtttagctgagttccaacagaaacttgcttctgccacaacagatcttgagaaagcagaggcacagattggtgttgaagttcacagtgccatcaacgcagctctctcgggctaaaagaaggtttctttctttatttcttcgaagaaacaaaaaaaaaactaaatcatttggcttttcaagtgattagtgaagtccctttttactactgcaaaggatggaataaactagaatttgattcttcttgtttaatcgtgttggacttttgtttgaataaatgattttgttt

SEQ ID NO: 21744 - protein, 203 aa, Arabidopsis thaliana
  peptide (1)..(203): Ceres Seq. ID no. 12396873
MFKQASRLLSRSVAAASSKSVTTRAFSTELPSTLDSTFVEAWKKVAPNMDPPQTPSAFMKPRPSTPSSIPTKLTVNFVLPYTSELTGKEVDMVIIPASTGQMGVLPGHVPTIAELKPGIMSVHEGTDVKKYFLSSGFAFLHANSVADIIAVEAVPLDHIDPSQVQKGLAEFQQKLASATTDLEKAEAQIGVEVHSAINAALSG

SEQ ID NO: 21745 - protein, 155 aa, Arabidopsis thaliana
  peptide (1)..(155): Ceres Seq. ID no. 12396874
MDPPQTPSAFMKPRPSTPSSIPTKLTVNFVLPYTSELTGKEVDMVIIPASTGQMGVLPGHVPTIAELKPGIMSVHEGTDVKKYFLSSGFAFLHANSVADIIAVEAVPLDHIDPSQVQKGLAEFQQKLASATTDLEKAEAQIGVEVHSAINAALSG

SEQ ID NO: 21746 - protein, 145 aa, Arabidopsis thaliana
  peptide (1)..(145): Ceres Seq. ID no. 12396875
MKPRPSTPSSIPTKLTVNFVLPYTSELTGKEVDMVIIPASTGQMGVLPGHVPTIAELKPGIMSVHEGTDVKKYFLSSGFAFLHANSVADIIAVEAVPLDHIDPSQVQKGLAEFQQKLASATTDLEKAEAQIGVEVHSAINAALSG

SEQ ID NO: 21747 - DNA, 1777 bp, Arabidopsis thaliana
  misc_feature (1)..(1777): Ceres Seq. ID no. 12377345
  misc_feature (1)..(1777): Ortholog of  Ceres SEQ ID NO 15169670 as cited in SEQ ID NO 62085
  misc_feature (1)..(1777): Ortholog of  Ceres SEQ ID NO 13599262 as cited in SEQ ID NO 0
atatttcttctcgctcagtaggtctttagggttttagtttcttctcctcaaaaaatggcgatgtatgttatctacgagtcttcttccggctatggtctcttcgaggttcacggactagatgagatcggacagaacactgaggcggttcggacttctgtctccgacctcagtcgctttggccgtgttgttcagctcacagcgtttcatccctttgagtctgctctcgatgctctcaaccaagtcaacgccgtctctgaaggtgttatgactgatgagcttagaagttttctggagttgaatcttcctaaggtcaaggagggaaagaaacccaagttcagtttaggattggctgagcctaaactcggttcacatatatttgaagctactaaaatcccatgccagagcaatgagtttgttcttgagcttctcagaggtgttcgccagcattttgataggtttatcaaggacttaaagcctggtgatcttgaaaaatctcagcttggattagctcacagctacagcagagccaaggtgaagttcaatgttaaccgagtggataacatggttattcaagctatcttcatgcttgacacgcttgataaggatatcaattcctttgccatgagagtcagggaatggtattcgtggcacttccccgaactagtgaagatagtcaatgacaactatctttacgcccgtgtttcaaagatgattgatgacaagtcaaagttgactgaagatcacatccccatgcttactgaagtcttaggggatgaagataaggcaaaggaggtcatcgaagctggaaaagcatccatgggctcggatttatcaccgcttgacttaatcaacgtacagacctttgctcagaaagttatggaccttgctgactacaggaagaagctctatgattatcttgtcactaagatgagcgacattgcccctaatttggctgctttgattggagaaatggtcggtgcccgtttgatttcacatgctggaagtctgactaaccttgctaaatgcccatcttccaccctccagattcttggagccgagaaggctcttttcagggcacttaaaacacgtggaaacactcccaagtatggattgattttccattcttccttcattggccgagcatctgctaagaacaagggccgtatcgctcgttatcttgcaaacaagtgctctatagcatcccggattgattgttttgctgatggtgcaactactgcttttggtgagaagcttcgcgaacaagttgaggaaaggctagaattttatgacaaaggtgttgccccacgcaagaacgtggatgtaatgaaggaggtgatagagaatctaaagcaagaagaggaagggaaggagccagttgatgcctcggtgaagaaaagcaagaagaagaaggcaaagggtgaagaagaagaagaggtggtggcaatggaggaggacaagtcagagaaaaagaagaagaaagagaagaggaagatggagactgcagaggagaacgagaaatcagagaagaagaagacaaagaagagtaaagctggaggagaagaggagactgatgatggtcacagcaccaagaagaagaagaagaagtctaagagcgctgaatagaaagggatgcaacattaacaaaccctgtattgtattttttttttgagctaaattaatgtcgtctgtttttcgtagtgaacatcggagaatttttgttttggtctggaaacgattcaaggtttggcaatatcttaagtttgtttaggttttccct

SEQ ID NO: 21748 - protein, 522 aa, Arabidopsis thaliana
  peptide (1)..(522): Ceres Seq. ID no. 12377346
MAMYVIYESSSGYGLFEVHGLDEIGQNTEAVRTSVSDLSRFGRVVQLTAFHPFESALDALNQVNAVSEGVMTDELRSFLELNLPKVKEGKKPKFSLGLAEPKLGSHIFEATKIPCQSNEFVLELLRGVRQHFDRFIKDLKPGDLEKSQLGLAHSYSRAKVKFNVNRVDNMVIQAIFMLDTLDKDINSFAMRVREWYSWHFPELVKIVNDNYLYARVSKMIDDKSKLTEDHIPMLTEVLGDEDKAKEVIEAGKASMGSDLSPLDLINVQTFAQKVMDLADYRKKLYDYLVTKMSDIAPNLAALIGEMVGARLISHAGSLTNLAKCPSSTLQILGAEKALFRALKTRGNTPKYGLIFHSSFIGRASAKNKGRIARYLANKCSIASRIDCFADGATTAFGEKLREQVEERLEFYDKGVAPRKNVDVMKEVIENLKQEEEGKEPVDASVKKSKKKKAKGEEEEEVVAMEEDKSEKKKKKEKRKMETAEENEKSEKKKTKKSKAGGEEETDDGHSTKKKKKKSKSAE

SEQ ID NO: 21749 - protein, 520 aa, Arabidopsis thaliana
  peptide (1)..(520): Ceres Seq. ID no. 12377347
MYVIYESSSGYGLFEVHGLDEIGQNTEAVRTSVSDLSRFGRVVQLTAFHPFESALDALNQVNAVSEGVMTDELRSFLELNLPKVKEGKKPKFSLGLAEPKLGSHIFEATKIPCQSNEFVLELLRGVRQHFDRFIKDLKPGDLEKSQLGLAHSYSRAKVKFNVNRVDNMVIQAIFMLDTLDKDINSFAMRVREWYSWHFPELVKIVNDNYLYARVSKMIDDKSKLTEDHIPMLTEVLGDEDKAKEVIEAGKASMGSDLSPLDLINVQTFAQKVMDLADYRKKLYDYLVTKMSDIAPNLAALIGEMVGARLISHAGSLTNLAKCPSSTLQILGAEKALFRALKTRGNTPKYGLIFHSSFIGRASAKNKGRIARYLANKCSIASRIDCFADGATTAFGEKLREQVEERLEFYDKGVAPRKNVDVMKEVIENLKQEEEGKEPVDASVKKSKKKKAKGEEEEEVVAMEEDKSEKKKKKEKRKMETAEENEKSEKKKTKKSKAGGEEETDDGHSTKKKKKKSKSAE

SEQ ID NO: 21750 - protein, 452 aa, Arabidopsis thaliana
  peptide (1)..(452): Ceres Seq. ID no. 12377348
MTDELRSFLELNLPKVKEGKKPKFSLGLAEPKLGSHIFEATKIPCQSNEFVLELLRGVRQHFDRFIKDLKPGDLEKSQLGLAHSYSRAKVKFNVNRVDNMVIQAIFMLDTLDKDINSFAMRVREWYSWHFPELVKIVNDNYLYARVSKMIDDKSKLTEDHIPMLTEVLGDEDKAKEVIEAGKASMGSDLSPLDLINVQTFAQKVMDLADYRKKLYDYLVTKMSDIAPNLAALIGEMVGARLISHAGSLTNLAKCPSSTLQILGAEKALFRALKTRGNTPKYGLIFHSSFIGRASAKNKGRIARYLANKCSIASRIDCFADGATTAFGEKLREQVEERLEFYDKGVAPRKNVDVMKEVIENLKQEEEGKEPVDASVKKSKKKKAKGEEEEEVVAMEEDKSEKKKKKEKRKMETAEENEKSEKKKTKKSKAGGEEETDDGHSTKKKKKKSKSAE

SEQ ID NO: 21751 - DNA, 675 bp, Arabidopsis thaliana
  misc_feature (1)..(675): Ceres Seq. ID no. 12423260
  misc_feature (1)..(675): Ortholog of  Ceres SEQ ID NO 13655108 as cited in SEQ ID NO 62996
aaaataaacatcgtttcttaaaagttcaaacagatcacaccatgaacctttcctctaacgaccaaccaagccaaggccgtatcaaggccaaggattggtcgactgatttgtgtgaatgttggatggacataaactcatgctgcttgacttgttggtgcccttgtgttgcctttggacgcatcgcggaggttgtagacagaggttccacatcgtgtggtgtgagcggagcgatgtacatgatcatattcatgttgaccgggtatggaggaagcagtctctactcttgcttttaccgaaccaaacttagagcccaatacaatctcaaggagagaccttgttgtgactgttgtgtccacttttgttgcgagccatgcgctctttgtcaagagtataggcaacttcaacacaaccgcgatttggacttggtcatcgggtggcatgggaatatggaacgacatgcacgacttgctgcctctacaccttcggctcctccacttcaagcacccatgtctagattggtttaacaatgagttacatatatctcgataaactatgcatatctattttagttgttttgatatcgtacgtgatgtaatttgtattcctttacatttgtcactcatctggtgtattgaatatttcggattaattattaatattctcttcgtgtgtgtc

SEQ ID NO: 21752 - protein, 173 aa, Arabidopsis thaliana
  peptide (1)..(173): Ceres Seq. ID no. 12423261
NKHRFLKVQTDHTMNLSSNDQPSQGRIKAKDWSTDLCECWMDINSCCLTCWCPCVAFGRIAEVVDRGSTSCGVSGAMYMIIFMLTGYGGSSLYSCFYRTKLRAQYNLKERPCCDCCVHFCCEPCALCQEYRQLQHNRDLDLVIGWHGNMERHARLAASTPSAPPLQAPMSRLV

SEQ ID NO: 21753 - protein, 160 aa, Arabidopsis thaliana
  peptide (1)..(160): Ceres Seq. ID no. 12423262
MNLSSNDQPSQGRIKAKDWSTDLCECWMDINSCCLTCWCPCVAFGRIAEVVDRGSTSCGVSGAMYMIIFMLTGYGGSSLYSCFYRTKLRAQYNLKERPCCDCCVHFCCEPCALCQEYRQLQHNRDLDLVIGWHGNMERHARLAASTPSAPPLQAPMSRLV

SEQ ID NO: 21754 - protein, 133 aa, Arabidopsis thaliana
  peptide (1)..(133): Ceres Seq. ID no. 12423263
MDINSCCLTCWCPCVAFGRIAEVVDRGSTSCGVSGAMYMIIFMLTGYGGSSLYSCFYRTKLRAQYNLKERPCCDCCVHFCCEPCALCQEYRQLQHNRDLDLVIGWHGNMERHARLAASTPSAPPLQAPMSRLV

SEQ ID NO: 21755 - DNA, 873 bp, Arabidopsis thaliana
  misc_feature (1)..(873): Ceres Seq. ID no. 13497760
  misc_feature (1)..(873): Ortholog of  Ceres SEQ ID NO 14306406 as cited in SEQ ID NO 1412
  misc_feature (1)..(873): Ortholog of  Ceres SEQ ID NO 15178824 as cited in SEQ ID NO 0
attataacttggatcagattcttcttctcctctaaacaacaacaaagtctctcttccttctgtctttcacatttcctcttcccctaaaaacagaactcaaaaccaaaacaaaatgactcgctcctctagattccttggtacggcgtcgcctccaccaccggaagaaatcctcgccgccgaaaccgacatggttgtgattctctcagcacttctctgcgctctcgtatgcgtagccggtttagccgccgtagctcgctgcgcttggctccgccgtctcaccggagttaatcccgccgccgtcggagaagctccaccgcctaacaaaggcctcaagaaaaaagcacttcaagctctccctaaatcaacttacaccgcctctgcctctaccgccgccgccgctgacgatctaccgtgctcttcagtcggagacggagattcatccaccgagtgtgcaatatgcataacggaattttcggagggcgaagaaatcagaatcttaccgctgtgtagtcacgccttccacgtggcgtgtatagacaagtggttgacttcacggtcgtcgtgtccgtcttgtcgtcggatattggtgccggtgaagtgtgataggtgtgggcaccatgcttcgacggcggagactcaggtcaaagatcaacctcctcatcaccaacatccttcacagttcacttccgccattattcctgcttttcttccttgaaatgttttcactttattaaatttttataatttgctaaaaatatcggcatgattaaaagtaaagtattaattaattaggaattagtaatctttagttaagtacttttatatttctcctctgtaatcctctgttctgaattaatcagatgaaatttcgat

SEQ ID NO: 21756 - protein, 200 aa, Arabidopsis thaliana
  peptide (1)..(200): Ceres Seq. ID no. 13497761
MTRSSRFLGTASPPPPEEILAAETDMVVILSALLCALVCVAGLAAVARCAWLRRLTGVNPAAVGEAPPPNKGLKKKALQALPKSTYTASASTAAAADDLPCSSVGDGDSSTECAICITEFSEGEEIRILPLCSHAFHVACIDKWLTSRSSCPSCRRILVPVKCDRCGHHASTAETQVKDQPPHHQHPSQFTSAIIPAFLP

SEQ ID NO: 21757 - protein, 175 aa, Arabidopsis thaliana
  peptide (1)..(175): Ceres Seq. ID no. 13497762
MVVILSALLCALVCVAGLAAVARCAWLRRLTGVNPAAVGEAPPPNKGLKKKALQALPKSTYTASASTAAAADDLPCSSVGDGDSSTECAICITEFSEGEEIRILPLCSHAFHVACIDKWLTSRSSCPSCRRILVPVKCDRCGHHASTAETQVKDQPPHHQHPSQFTSAIIPAFLP

SEQ ID NO: 21758 - DNA, 945 bp, Arabidopsis thaliana
  misc_feature (1)..(945): Ceres Seq. ID no. 12348709
  misc_feature (1)..(945): Ortholog of  Ceres SEQ ID NO 13590699 as cited in SEQ ID NO 65085
aatcttgaccacagcaaagagaaacaaacaatggcggcttctctgcaatcagcaaaccctacattgtcacgaaccctagcttctccgaacaaaccttcctccttcgccaccttccgatctccatttctcagattcaattcaacatccgtcgcttccaatttcaaacccctagtttctcgagaagcatcctcatcgttcgtcactcgctccgccgccgagccacaagaaagaaaaaccttccatggactgtgctatgtcgtcggcgacaacatcgacactgaccaaatcattcccgcggagtttctcactctcgtcccttcgaatccagaggaatacgagaaactcggttcttacgctttagttggtcttccagcttcttacaaggaacgattcgttcagccaggtgagatgaagacgaagtactcaatcatcattggcggtgaaaactttggatgtggatcgtcacgtgaacatgctccggtttgtttaggagcagcgggagctaaagcagtggtggctcagtcttatgctagaatctttttcaggaactctgttgctactggtgaggtttatcctttggattctgaagttagggtttgtgatgagtgtacaactggtgatgttgcgactgttgagttgagggaaggagatagtattttgatcaatcatacgactgggaaagagtacaagcttaagccgattggtgatgctggaccagtgattgatgctggtggtatatttgcttatgctaggaaagctggaatgattccatctgctgctgcttgattttgacttcaggtgtcaatggaagtgcatgagagtcacttcaaggatcttgatccaataataagaatatgtaatgtttccaaaagcttatgaacctaatctatgttttatgaatatatatgactatcggctttagtcttcagtatcagtttcttgttt

SEQ ID NO: 21759 - protein, 261 aa, Arabidopsis thaliana
  peptide (1)..(261): Ceres Seq. ID no. 12348710
NLDHSKEKQTMAASLQSANPTLSRTLASPNKPSSFATFRSPFLRFNSTSVASNFKPLVSREASSSFVTRSAAEPQERKTFHGLCYVVGDNIDTDQIIPAEFLTLVPSNPEEYEKLGSYALVGLPASYKERFVQPGEMKTKYSIIIGGENFGCGSSREHAPVCLGAAGAKAVVAQSYARIFFRNSVATGEVYPLDSEVRVCDECTTGDVATVELREGDSILINHTTGKEYKLKPIGDAGPVIDAGGIFAYARKAGMIPSAAA

SEQ ID NO: 21760 - protein, 251 aa, Arabidopsis thaliana
  peptide (1)..(251): Ceres Seq. ID no. 12348711
MAASLQSANPTLSRTLASPNKPSSFATFRSPFLRFNSTSVASNFKPLVSREASSSFVTRSAAEPQERKTFHGLCYVVGDNIDTDQIIPAEFLTLVPSNPEEYEKLGSYALVGLPASYKERFVQPGEMKTKYSIIIGGENFGCGSSREHAPVCLGAAGAKAVVAQSYARIFFRNSVATGEVYPLDSEVRVCDECTTGDVATVELREGDSILINHTTGKEYKLKPIGDAGPVIDAGGIFAYARKAGMIPSAAA

SEQ ID NO: 21761 - DNA, 995 bp, Arabidopsis thaliana
  misc_feature (1)..(995): Ceres Seq. ID no. 12332006
  misc_feature (1)..(995): Ortholog of  Ceres SEQ ID NO 13594974 as cited in SEQ ID NO 56010
  misc_feature (1)..(995): Ortholog of  Ceres SEQ ID NO 13661512 as cited in SEQ ID NO 61464
gtatcaacaaagctctgtttcaagctctctgtttctcagatcttctctctgtttttttcttctcataaaataagagttgtgattcaacagttatggtgagaatattccttctctacaatatactaaattcgtttcttctctctttagtaccaaagaagctacgaactcttttccctctttcttggttcgacaaaactctccacaagaactcaccaccgtctccgtcaacgatgttaccttctccatcatcttcttcagcgccgacgaaaagaatagatccgtccgagctcaaacgcgttttccagatgttcgacaagaacggtgacggtcgaatcacaaaggaagagctcaacgactcgcttgagaatcttggaatctacataccagacaaagatctgactcaaatgatccacaagatcgatgctaacggtgatggatgcgtcgacatagacgagtttgagtcgctgtacagctcgattgtggatgagcatcacaacgatggcgaaacagaggaagaggatatgaaagatgcgtttaacgtgtttgaccaagacggagatgggtttatcactgtggaggagttgaaatctgtgatggcttccttgggactcaagcaagggaagaccctagatggttgtaagaagatgattatgcaagttgatgcagatggtgatggtagagtcaattacaaagagtttcttcagatgatgaaaggtggtggctttagcagcagtaattgatctttaactagggtttgatttgacagaagagaagtgtgtttattcgattgattggtttgtttttcttgtttttcctctgtaaataaattttctgatgacaaatcaaaacatcgtgtaatcgaggaaggtgtgtaatctttgttttttagggtatctctgagcttatgtaagattcaccttctcatctattctgattgttaagtgttcttaagtagattgttaactgtttcctatcaatatagtatattgcagaac

SEQ ID NO: 21762 - protein, 215 aa, Arabidopsis thaliana
  peptide (1)..(215): Ceres Seq. ID no. 12332007
MVRIFLLYNILNSFLLSLVPKKLRTLFPLSWFDKTLHKNSPPSPSTMLPSPSSSSAPTKRIDPSELKRVFQMFDKNGDGRITKEELNDSLENLGIYIPDKDLTQMIHKIDANGDGCVDIDEFESLYSSIVDEHHNDGETEEEDMKDAFNVFDQDGDGFITVEELKSVMASLGLKQGKTLDGCKKMIMQVDADGDGRVNYKEFLQMMKGGGFSSSN

SEQ ID NO: 21763 - protein, 169 aa, Arabidopsis thaliana
  peptide (1)..(169): Ceres Seq. ID no. 12332008
MLPSPSSSSAPTKRIDPSELKRVFQMFDKNGDGRITKEELNDSLENLGIYIPDKDLTQMIHKIDANGDGCVDIDEFESLYSSIVDEHHNDGETEEEDMKDAFNVFDQDGDGFITVEELKSVMASLGLKQGKTLDGCKKMIMQVDADGDGRVNYKEFLQMMKGGGFSSSN

SEQ ID NO: 21764 - protein, 144 aa, Arabidopsis thaliana
  peptide (1)..(144): Ceres Seq. ID no. 12332009
MFDKNGDGRITKEELNDSLENLGIYIPDKDLTQMIHKIDANGDGCVDIDEFESLYSSIVDEHHNDGETEEEDMKDAFNVFDQDGDGFITVEELKSVMASLGLKQGKTLDGCKKMIMQVDADGDGRVNYKEFLQMMKGGGFSSSN

SEQ ID NO: 21765 - DNA, 1172 bp, Arabidopsis thaliana
  misc_feature (1)..(1172): Ceres Seq. ID no. 12332002
  misc_feature (1)..(1172): Ortholog of  Ceres SEQ ID NO 13599316 as cited in SEQ ID NO 0
atacatttctccaaaatctccgagttctacaattgtgtgatcaatcaatcttctccgatttcaagcttctcgatcaaaagaatcatcatgggaggaggaagagctatggcgacggcggcgaaggttgctggaatcggagttggtaaaggaggattcaagggatttggatttcctccggcgactgagcagtttcgtgttaaaaccgcggcggctgcggcgtcgtctaaaccggtttcggcttcgattacatcggcggttcatccttctgttgaagaagatgggatgattatgcagagaccggtttgggatgattgggaatttgctgaagaagaaccgattcctagggttgtttttagcaaacctcctagtcttgaagaagctaaagaagctactgaagatcttaaagaagcaattaatttggtgtatatgtcatctccaaagtcgtctgctgctatggaaggatcaaatgatggtggctctgtttccaaaatgctctctggttttcaatcttctgagaacagagctgttgaatcagctgttccacaagttgctcttcaagcatttgcttttctaagtgagaacactgctgcgcagactgttgttgcttccattgcgagtgacccaaaagtatgggatgctgttatggagaataaggatctcatgaaatttcttcagaccaacaaaaccgctgtttcctctcaagttgaatctgacaatgacgaccaatctgaacgttcgagcacgactgagtgtgaagtcgtggaaactaagccaatggaactcttagagattctgcaggacatgaagctaaaagctgttcggttgatggaaaatgtatcttcctactttggtgacttgtttgggttaggatcagttacagaagatggaaaagacaagaagcagacgttgttcaatgaccctcgttctctgtttggattagctgtggttgttatcttcatggtagttttaaaacgtgcttaagatctcttgttcctgaattcgccgatatagcggaaaaacaactacgtactctgtgttatcgtttaaactctgtttcattcctttgctttgttatcgtttaaactctgttttttgtttgattggaatgatttggaaccgtcattggatcttttcataatttataaataaaaagatcctttggatgttttatt

SEQ ID NO: 21766 - protein, 326 aa, Arabidopsis thaliana
  peptide (1)..(326): Ceres Seq. ID no. 12332003
IHFSKISEFYNCVINQSSPISSFSIKRIIMGGGRAMATAAKVAGIGVGKGGFKGFGFPPATEQFRVKTAAAAASSKPVSASITSAVHPSVEEDGMIMQRPVWDDWEFAEEEPIPRVVFSKPPSLEEAKEATEDLKEAINLVYMSSPKSSAAMEGSNDGGSVSKMLSGFQSSENRAVESAVPQVALQAFAFLSENTAAQTVVASIASDPKVWDAVMENKDLMKFLQTNKTAVSSQVESDNDDQSERSSTTECEVVETKPMELLEILQDMKLKAVRLMENVSSYFGDLFGLGSVTEDGKDKKQTLFNDPRSLFGLAVVVIFMVVLKRA

SEQ ID NO: 21767 - protein, 297 aa, Arabidopsis thaliana
  peptide (1)..(297): Ceres Seq. ID no. 12332004
MGGGRAMATAAKVAGIGVGKGGFKGFGFPPATEQFRVKTAAAAASSKPVSASITSAVHPSVEEDGMIMQRPVWDDWEFAEEEPIPRVVFSKPPSLEEAKEATEDLKEAINLVYMSSPKSSAAMEGSNDGGSVSKMLSGFQSSENRAVESAVPQVALQAFAFLSENTAAQTVVASIASDPKVWDAVMENKDLMKFLQTNKTAVSSQVESDNDDQSERSSTTECEVVETKPMELLEILQDMKLKAVRLMENVSSYFGDLFGLGSVTEDGKDKKQTLFNDPRSLFGLAVVVIFMVVLKRA

SEQ ID NO: 21768 - protein, 291 aa, Arabidopsis thaliana
  peptide (1)..(291): Ceres Seq. ID no. 12332005
MATAAKVAGIGVGKGGFKGFGFPPATEQFRVKTAAAAASSKPVSASITSAVHPSVEEDGMIMQRPVWDDWEFAEEEPIPRVVFSKPPSLEEAKEATEDLKEAINLVYMSSPKSSAAMEGSNDGGSVSKMLSGFQSSENRAVESAVPQVALQAFAFLSENTAAQTVVASIASDPKVWDAVMENKDLMKFLQTNKTAVSSQVESDNDDQSERSSTTECEVVETKPMELLEILQDMKLKAVRLMENVSSYFGDLFGLGSVTEDGKDKKQTLFNDPRSLFGLAVVVIFMVVLKRA

SEQ ID NO: 21769 - DNA, 1367 bp, Arabidopsis thaliana
  misc_feature (1)..(1367): Ceres Seq. ID no. 13499495
  misc_feature (1)..(1367): Ortholog of  Ceres SEQ ID NO 14311407 as cited in SEQ ID NO 54067
  misc_feature (1)..(1367): Ortholog of  Ceres SEQ ID NO 14313107 as cited in SEQ ID NO 58915
  misc_feature (1)..(1367): Ortholog of  Ceres SEQ ID NO 15226556 as cited in SEQ ID NO 67908
gacgggtcaattcacatacttgtttaacggcaacaaaaacctaccgataaatgctaaactaacgaaatcggatcatagctcgacgaagtctcgatcttttctattctctctttctgggtattcgtgggttttacccagatttcgaaattgaatggcggacgaactggaattgtcgccgttggttccaccgtcgccgatggtcgagccttccgagatcgatctcgaagctggaggacctggtgaacaaattcagtgccgaatctgccttgaaactgatggtagggatttcattgccccatgcaaatgcaaaggaacatcaaagtatgtacatcgtgattgcttggatcattggagagctataaaggaaggtttcgcgtttgcgcactgcacaacttgcaaggctccatattatctgagagttcacagtgctggagataggaaatggcggacattgaagtttcgcttctttgttactcgagacattttatccatatttcttgctgttcagcttgtgattgctgcattggcctacatggtctatttcatagatagttaccagcaatcatggcttcgtcatatatggggttttgacagtgaggtcacgttttattacatgtgtggagctttattattctttgctctgctgggtctatctggatgcgtcataacctgctatgatcgaagggttcgcaatgacttagcacagccttgccgtgaattgtgtctctgttgttgccagcctgggatatgcacagactgccatctaccaggaactatttgtatgtgggcagattgcaccgcatgtactgaaggctgtgcaagtgcagttagtgagtgtggaggttgccttggaggtgcaggggaagccggattgccattactcttcataacggcattagtaattctcggtctatttacagttatcggtatattctatagcgtattggttgcaaccatggttggacagcgcatttggcagcgccattaccacattctcgccaaaagaatgctaacaaaggagtatgtggtcgaggatgtagatggcgaaatgacggggtcagaatggtctcccccggctttaccaactgagcatgtccagcagctgaagacgcttggccttctgtgaaactatatggcttttgattaaaactatgggagatttttaactgcacgcagggaaatgcatttgacaagtggtgagagagagaactcacagaacgatgaaatctaatagatcttttgtatttgtaaagaaaagactccaacttattaaagagtccgtgatctctcccattgagtcagagacctctccaattcacgaactgagcttgtgttgaatgtttgtttctaatataggtaaatatccg

SEQ ID NO: 21770 - protein, 324 aa, Arabidopsis thaliana
  peptide (1)..(324): Ceres Seq. ID no. 13499496
MADELELSPLVPPSPMVEPSEIDLEAGGPGEQIQCRICLETDGRDFIAPCKCKGTSKYVHRDCLDHWRAIKEGFAFAHCTTCKAPYYLRVHSAGDRKWRTLKFRFFVTRDILSIFLAVQLVIAALAYMVYFIDSYQQSWLRHIWGFDSEVTFYYMCGALLFFALLGLSGCVITCYDRRVRNDLAQPCRELCLCCCQPGICTDCHLPGTICMWADCTACTEGCASAVSECGGCLGGAGEAGLPLLFITALVILGLFTVIGIFYSVLVATMVGQRIWQRHYHILAKRMLTKEYVVEDVDGEMTGSEWSPPALPTEHVQQLKTLGLL

SEQ ID NO: 21771 - protein, 309 aa, Arabidopsis thaliana
  peptide (1)..(309): Ceres Seq. ID no. 13499497
MVEPSEIDLEAGGPGEQIQCRICLETDGRDFIAPCKCKGTSKYVHRDCLDHWRAIKEGFAFAHCTTCKAPYYLRVHSAGDRKWRTLKFRFFVTRDILSIFLAVQLVIAALAYMVYFIDSYQQSWLRHIWGFDSEVTFYYMCGALLFFALLGLSGCVITCYDRRVRNDLAQPCRELCLCCCQPGICTDCHLPGTICMWADCTACTEGCASAVSECGGCLGGAGEAGLPLLFITALVILGLFTVIGIFYSVLVATMVGQRIWQRHYHILAKRMLTKEYVVEDVDGEMTGSEWSPPALPTEHVQQLKTLGLL

SEQ ID NO: 21772 - protein, 197 aa, Arabidopsis thaliana
  peptide (1)..(197): Ceres Seq. ID no. 13499498
MVYFIDSYQQSWLRHIWGFDSEVTFYYMCGALLFFALLGLSGCVITCYDRRVRNDLAQPCRELCLCCCQPGICTDCHLPGTICMWADCTACTEGCASAVSECGGCLGGAGEAGLPLLFITALVILGLFTVIGIFYSVLVATMVGQRIWQRHYHILAKRMLTKEYVVEDVDGEMTGSEWSPPALPTEHVQQLKTLGLL

SEQ ID NO: 21773 - DNA, 1070 bp, Arabidopsis thaliana
  misc_feature (1)..(1070): Ceres Seq. ID no. 12421966
  misc_feature (1)..(1070): Ortholog of  Ceres SEQ ID NO 15178931 as cited in SEQ ID NO 1125
  misc_feature (1)..(1070): Ortholog of  Ceres SEQ ID NO 13596648 as cited in SEQ ID NO 63080
aatttcccacaccaatcgcataatctatttcttccaacgaaaccctaattttgcttcctcatcttgttcagaaaattactcaaattcctattagattactctctcttcgacctccgatagctcacatggcgtctcgaaactatcggtgggagctcttcgcagcttcgttaaccctaaccttagctttgattcacctggtcgaagcaaactccgaaggagatgctctctacgctcttcgccggagtttgacagatccagaccatgtcctccagagctgggatccaactcttgttaatccttgtacctggttccatgtcacctgtaaccaagacaaccgcgtcactcgtgtggatttgggaaattcaaacctctctggacatcttgcgcctgagcttgggaagcttgaacatttacagtatctagagctctacaaaaacaacatccaaggaactataccttccgaacttggaaatctgaagaatctcatcagcttggatctgtacaacaacaatcttacagggatagttcccacttctttgggaaaattgaagtctctggtctttttacggcttaatgacaaccgattgaccggtccaatccctagagcactcacggcaatcccaagccttaaagttgttgacgtctcaagcaatgatttgtgtggaacaatcccaacaaacggaccctttgctcacattcctttacagaactttgagaacaacccgagattggagggaccggaattactcggtcttgcaagctacgacactaactgcacctgaaacaactggcaaaacctgaaaatgaagaattggggggtgaccttgtaagaacacttcaccactttatcaaatatcacatctattatgtaataagtatatatatgtagtaaaaacaaaaaaaatgaagaatcgaatcggtaatatcatctggtctcaattgagaacttcgaggtctgtatgtaaaatttctaaatgcgattttcgcttactgtaatgttcggttgtgggattctgagaagtaacatttgtattggtatggtatcaagttgttctgccttgtctgcattt

SEQ ID NO: 21774 - protein, 218 aa, Arabidopsis thaliana
  peptide (1)..(218): Ceres Seq. ID no. 12421967
MASRNYRWELFAASLTLTLALIHLVEANSEGDALYALRRSLTDPDHVLQSWDPTLVNPCTWFHVTCNQDNRVTRVDLGNSNLSGHLAPELGKLEHLQYLELYKNNIQGTIPSELGNLKNLISLDLYNNNLTGIVPTSLGKLKSLVFLRLNDNRLTGPIPRALTAIPSLKVVDVSSNDLCGTIPTNGPFAHIPLQNFENNPRLEGPELLGLASYDTNCT

SEQ ID NO: 21775 - DNA, 1468 bp, Arabidopsis thaliana
  misc_feature (1)..(1468): Ceres Seq. ID no. 12396245
  misc_feature (1)..(1468): Ortholog of  Ceres SEQ ID NO 14304969 as cited in SEQ ID NO 53193
  misc_feature (1)..(1468): Ortholog of  Ceres SEQ ID NO 14314851 as cited in SEQ ID NO 54014
  misc_feature (1)..(1468): Ortholog of  Ceres SEQ ID NO 14307442 as cited in SEQ ID NO 54239
  misc_feature (1)..(1468): Ortholog of  Ceres SEQ ID NO 15227214 as cited in SEQ ID NO 55368
  misc_feature (1)..(1468): Ortholog of  Ceres SEQ ID NO 13638897 as cited in SEQ ID NO 55839
  misc_feature (1)..(1468): Ortholog of  Ceres SEQ ID NO 14302561 as cited in SEQ ID NO 56543
  misc_feature (1)..(1468): Ortholog of  Ceres SEQ ID NO 15177710 as cited in SEQ ID NO 59217
  misc_feature (1)..(1468): Ortholog of  Ceres SEQ ID NO 15173484 as cited in SEQ ID NO 61804
  misc_feature (1)..(1468): Ortholog of  Ceres SEQ ID NO 13596958 as cited in SEQ ID NO 63319
  misc_feature (1)..(1468): Ortholog of  Ceres SEQ ID NO 12614573 as cited in SEQ ID NO 68344
  misc_feature (1)..(1468): Ortholog of  Ceres SEQ ID NO 12614814 as cited in SEQ ID NO 68816
  misc_feature (1)..(1468): Ortholog of  Ceres SEQ ID NO 13624040 as cited in SEQ ID NO 0
aaattttaatctcggctacgagtttctgggtgatgataattaagctttttttttctgctttaatggaaggaccttgacacttctctctctctttctctttgctattcatcttctacagtttcttaaaaattatactcttcttctccaaaatatctcagactctcttatttttgatcgtcttcttcttcttcgttgtgagcttccatttttcatccaggatttgttttttccgtttgaggtaaagcagctttgcagttaaagaaaccttgagtatccaatgtccccggaagaggagctacagagcaatgtatcggtggctagttcttcacctactagcaattgcatctccaggaacactctaggaggacttaaagagcataactacttgggtctctctgattgttcttctgttggaagctctactctctctccccttgctgaagatgacaaagctactatcagcctcaaggctacggagctgacacttggtcttcctggatcacaatctcctgcgagagacacagagcttaaccttttgagcccagcaaagctagatgagaagccattctttcctttgcttccttctaaagatgagatatgctcctcctcgcaaaagaacaatgcatcgggaaacaaaagaggcttttctgacacaatggatcagtttgctgaagctaaaagttcagtgtatactgagaaaaactggatgttccctgaagcagcagccacccagtctgtaacaaagaaagatgtgccacaaaacatacccaaaggacagtctagcactacaaacaatagctctagtccacctgcagccaaggcacaaattgtcggttggcctccagtgagatcctacaggaagaacacattggccactacttgtaagaacagtgacgaagttgatgggaggccaggttctggggctctcttcgtgaaggtcagtatggatggtgctccttatctgaggaaagttgacctgaggagctacactaactacggggagctttcttcagccttggagaaaatgttcaccactttcactcttggtcaatgtggatctaatggagctgctgggaaggatatgcttagtgagaccaagctcaaggatcttttgaatggaaaagactatgtgctcacttatgaggataaggatggtgactggatgcttgttggagatgttccgtgggagatgtttattgatgtctgcaagaagctgaagataatgaaagggtgtgatgctattgggttagctgcagctccgagagcaatggagaaatcgaagatgagagcttaaaagatggaacatgacaaagctttctaactatacaaaatatgtgcgatcttttggtggtgtttttaaatttcaaaacatcaatatctttagtttctgaatttttaaaatgaagtaagtaagactacgaatgtaaggaaatgaagaagaattaaaaatgatctatttttgttgttt

SEQ ID NO: 21776 - protein, 338 aa, Arabidopsis thaliana
  peptide (1)..(338): Ceres Seq. ID no. 12396246
MSPEEELQSNVSVASSSPTSNCISRNTLGGLKEHNYLGLSDCSSVGSSTLSPLAEDDKATISLKATELTLGLPGSQSPARDTELNLLSPAKLDEKPFFPLLPSKDEICSSSQKNNASGNKRGFSDTMDQFAEAKSSVYTEKNWMFPEAAATQSVTKKDVPQNIPKGQSSTTNNSSSPPAAKAQIVGWPPVRSYRKNTLATTCKNSDEVDGRPGSGALFVKVSMDGAPYLRKVDLRSYTNYGELSSALEKMFTTFTLGQCGSNGAAGKDMLSETKLKDLLNGKDYVLTYEDKDGDWMLVGDVPWEMFIDVCKKLKIMKGCDAIGLAAAPRAMEKSKMRA

SEQ ID NO: 21777 - protein, 212 aa, Arabidopsis thaliana
  peptide (1)..(212): Ceres Seq. ID no. 12396247
MDQFAEAKSSVYTEKNWMFPEAAATQSVTKKDVPQNIPKGQSSTTNNSSSPPAAKAQIVGWPPVRSYRKNTLATTCKNSDEVDGRPGSGALFVKVSMDGAPYLRKVDLRSYTNYGELSSALEKMFTTFTLGQCGSNGAAGKDMLSETKLKDLLNGKDYVLTYEDKDGDWMLVGDVPWEMFIDVCKKLKIMKGCDAIGLAAAPRAMEKSKMRA

SEQ ID NO: 21778 - protein, 195 aa, Arabidopsis thaliana
  peptide (1)..(195): Ceres Seq. ID no. 12396248
MFPEAAATQSVTKKDVPQNIPKGQSSTTNNSSSPPAAKAQIVGWPPVRSYRKNTLATTCKNSDEVDGRPGSGALFVKVSMDGAPYLRKVDLRSYTNYGELSSALEKMFTTFTLGQCGSNGAAGKDMLSETKLKDLLNGKDYVLTYEDKDGDWMLVGDVPWEMFIDVCKKLKIMKGCDAIGLAAAPRAMEKSKMRA

SEQ ID NO: 21779 - DNA, 1293 bp, Arabidopsis thaliana
  misc_feature (1)..(1293): Ceres Seq. ID no. 12370578
  misc_feature (1)..(1293): Ortholog of  Ceres SEQ ID NO 15171943 as cited in SEQ ID NO 54306
  misc_feature (1)..(1293): Ortholog of  Ceres SEQ ID NO 13655812 as cited in SEQ ID NO 64743
  misc_feature (1)..(1293): Ortholog of  Ceres SEQ ID NO 15178828 as cited in SEQ ID NO 0
aatctgaaagttcttaagtggttccacgatgtttccattttgttctgacttccgaggccaacgagatgagtccaataaacaaagggcacggaaacattctttttaaattaggtttgttttttatttttggtttttggtttttcccggaaattgtatgaagtcttcgttacagtttctctctctcacattctctgtataaagtcttcttgagatcgaaggataacttcaattcgattcttttccaagctacacacagctgattttattataagaagattgattgtgatgggtactagagctctgcagattcctttacttgaaggtgagactgataattacgatggtgttactgtaaccatggtggaacctatggattctgaggtttttactgaaagtcttagggcttcgctttcgcattggagagaagaggggaagaagggaatttggataaagctgcctcttggattggctaatcttgtggaggctgcagttagtgaaggatttagatatcaccacgcggagcctgagtacttgatgcttgtatcttggatctctgaaactcctgatacaatcccagccaatgcttctcatgttgtaggtgctggtgctttggtcatcaacaaaaatactaaagaggtcctcgttgtccaggagaggagtgggtttttcaaagataaaaatgtgtggaagctgcctactggtgttatcaacgagggcgaggatatatggactggagtagctagggaagtggaagaagaaactggaattattgcagattttgtcgaagtactggctttcaggcaaagccacaaagccatcttaaaaaagaaaacagatatgtttttcctgtgtgtcttaagtccgcgctcttacgatattactgaacaaaaatctgagatcttgcaagctaagtggatgccgatccaagagtatgtagaccaaccatggaacaagaagaacgagatgttcaagttcatggctaacatttgccaaaagaagtgtgaggaagaatacttgggattcgccattgtgccaactaccacatcatctggtaaagagagctttatctactgcaatgcggatcatgccaagcgccttaaagtatcgcgtgaccaagcctctgcttctctctgaaaacattctcatctgattctgtttgatctcggcatgtgtgtgtccagtgtgtacaaaacaggatactttcttctatattattccgattctacaaaattgcgtctaaatatttaagtttataccatctctatgagccactgtaaaacttgccatcgactt

SEQ ID NO: 21780 - protein, 282 aa, Arabidopsis thaliana
  peptide (1)..(282): Ceres Seq. ID no. 12370579
MGTRALQIPLLEGETDNYDGVTVTMVEPMDSEVFTESLRASLSHWREEGKKGIWIKLPLGLANLVEAAVSEGFRYHHAEPEYLMLVSWISETPDTIPANASHVVGAGALVINKNTKEVLVVQERSGFFKDKNVWKLPTGVINEGEDIWTGVAREVEEETGIIADFVEVLAFRQSHKAILKKKTDMFFLCVLSPRSYDITEQKSEILQAKWMPIQEYVDQPWNKKNEMFKFMANICQKKCEEEYLGFAIVPTTTSSGKESFIYCNADHAKRLKVSRDQASASL

SEQ ID NO: 21781 - protein, 258 aa, Arabidopsis thaliana
  peptide (1)..(258): Ceres Seq. ID no. 12370580
MVEPMDSEVFTESLRASLSHWREEGKKGIWIKLPLGLANLVEAAVSEGFRYHHAEPEYLMLVSWISETPDTIPANASHVVGAGALVINKNTKEVLVVQERSGFFKDKNVWKLPTGVINEGEDIWTGVAREVEEETGIIADFVEVLAFRQSHKAILKKKTDMFFLCVLSPRSYDITEQKSEILQAKWMPIQEYVDQPWNKKNEMFKFMANICQKKCEEEYLGFAIVPTTTSSGKESFIYCNADHAKRLKVSRDQASASL

SEQ ID NO: 21782 - protein, 254 aa, Arabidopsis thaliana
  peptide (1)..(254): Ceres Seq. ID no. 12370581
MDSEVFTESLRASLSHWREEGKKGIWIKLPLGLANLVEAAVSEGFRYHHAEPEYLMLVSWISETPDTIPANASHVVGAGALVINKNTKEVLVVQERSGFFKDKNVWKLPTGVINEGEDIWTGVAREVEEETGIIADFVEVLAFRQSHKAILKKKTDMFFLCVLSPRSYDITEQKSEILQAKWMPIQEYVDQPWNKKNEMFKFMANICQKKCEEEYLGFAIVPTTTSSGKESFIYCNADHAKRLKVSRDQASASL

SEQ ID NO: 21783 - DNA, 1725 bp, Arabidopsis thaliana
  misc_feature (1)..(1725): Ceres Seq. ID no. 12371079
  misc_feature (1)..(1725): Ortholog of  Ceres SEQ ID NO 15170666 as cited in SEQ ID NO 63386
aatttttagtctccctccgcgtagaagcttctccgagacttgtctctgctttgattgaagaagacgcttgatcgaaaattcccttagatttcgtaaatagggttttacagaaggtgagattacacagagatcggatttgcgaaaaaaaaaaatgggaagtccaaagaagaacgagaacaaaggcttcttcgccgccatgacttctggcttctccatgttcggtaccgccgtgtcgagatccgttaacggcgtgcaaggtaatgaaggagttgaggtcataaatccagaaggtggcaaggaagatgctgaagaggaagctcagaaaggaaggtggaaggacgaggaacgagatagttactggaagatgatgcagaaatatataggttcggatattacgtcaatggtgactcttcctgttgttatatttgagcctatgactatgctccagaagatggctgagataatggagtattctcatttgttggatcaagcagatgaatgcgaagatccatacttgcgtttagtatatgcttcatcatgggctatatctgtttactatgccttccaacgaacttggaagcctttcaatcctattcttggggagacatatgagatggtcaaccatggtgggatttcttttatttctgagcaggttagccatcatccaccaatgagtgctggtcatgccgagaacgagcacttcatttacgacatcacatcaaagttgaaaactaaacttttgggtaactctgttgatgtttaccctgtgggaagaacgcgtgtaaccctcaagaaagatggtgtggttctggatttggtgccgcctctcactaagattcacaatctaatatttggacgaacctgggttgactcacctggggaaatggtcatgacaaatttaaccactggagacaaagttgtgctttatttccagccatgtggctggttcggttctggccgctatgaagttgatggctacgtttacagcgcagctgaagaaccgaaaatcatgatgacaggaaaatggaatgagaaaatgagctaccaaccttgtgatgccgaaggggaaccccttccaggaacagagctgaaagaggtgtggcatttggctgatgtccccaaaaacgacaactttcagtacactcactttgctcacaagataaacagcttcgacacagcgcctgctaagctcttggcttcagactcacgtatccgtcctgatagatattcccttgagcagggtgacctttctaaagctggttccgagaaacacagccttgaggagagacaaagggccgaaaagaggaccagagagacaaagggacaaaagttcactccaagatggttcgatctaacggatgagatcacacctactccatggggagatattgaagtataccaatacaacgggaagtacaatgaacaccgagacacggcagagagctcaagtagtgcctccaacgaaacggacctcaaatcgatcgagtttaatccttggcaatatggtaatatctcaaccgaatgaagtaactcttatagtttaatttgttatctctatatacgaatgctgtgattcatgttcacttgaaagtgagtcccatgttgtttttaactttgtttcagactgaaaaatctgattatgtagtttgagtgataaaacataagttttgtgtttctgtctcattgtatctttgttccatttcgatcaatagtaattatgtttgt

SEQ ID NO: 21784 - protein, 457 aa, Arabidopsis thaliana
  peptide (1)..(457): Ceres Seq. ID no. 12371080
MGSPKKNENKGFFAAMTSGFSMFGTAVSRSVNGVQGNEGVEVINPEGGKEDAEEEAQKGRWKDEERDSYWKMMQKYIGSDITSMVTLPVVIFEPMTMLQKMAEIMEYSHLLDQADECEDPYLRLVYASSWAISVYYAFQRTWKPFNPILGETYEMVNHGGISFISEQVSHHPPMSAGHAENEHFIYDITSKLKTKLLGNSVDVYPVGRTRVTLKKDGVVLDLVPPLTKIHNLIFGRTWVDSPGEMVMTNLTTGDKVVLYFQPCGWFGSGRYEVDGYVYSAAEEPKIMMTGKWNEKMSYQPCDAEGEPLPGTELKEVWHLADVPKNDNFQYTHFAHKINSFDTAPAKLLASDSRIRPDRYSLEQGDLSKAGSEKHSLEERQRAEKRTRETKGQKFTPRWFDLTDEITPTPWGDIEVYQYNGKYNEHRDTAESSSSASNETDLKSIEFNPWQYGNISTE

SEQ ID NO: 21785 - protein, 442 aa, Arabidopsis thaliana
  peptide (1)..(442): Ceres Seq. ID no. 12371081
MTSGFSMFGTAVSRSVNGVQGNEGVEVINPEGGKEDAEEEAQKGRWKDEERDSYWKMMQKYIGSDITSMVTLPVVIFEPMTMLQKMAEIMEYSHLLDQADECEDPYLRLVYASSWAISVYYAFQRTWKPFNPILGETYEMVNHGGISFISEQVSHHPPMSAGHAENEHFIYDITSKLKTKLLGNSVDVYPVGRTRVTLKKDGVVLDLVPPLTKIHNLIFGRTWVDSPGEMVMTNLTTGDKVVLYFQPCGWFGSGRYEVDGYVYSAAEEPKIMMTGKWNEKMSYQPCDAEGEPLPGTELKEVWHLADVPKNDNFQYTHFAHKINSFDTAPAKLLASDSRIRPDRYSLEQGDLSKAGSEKHSLEERQRAEKRTRETKGQKFTPRWFDLTDEITPTPWGDIEVYQYNGKYNEHRDTAESSSSASNETDLKSIEFNPWQYGNISTE

SEQ ID NO: 21786 - protein, 436 aa, Arabidopsis thaliana
  peptide (1)..(436): Ceres Seq. ID no. 12371082
MFGTAVSRSVNGVQGNEGVEVINPEGGKEDAEEEAQKGRWKDEERDSYWKMMQKYIGSDITSMVTLPVVIFEPMTMLQKMAEIMEYSHLLDQADECEDPYLRLVYASSWAISVYYAFQRTWKPFNPILGETYEMVNHGGISFISEQVSHHPPMSAGHAENEHFIYDITSKLKTKLLGNSVDVYPVGRTRVTLKKDGVVLDLVPPLTKIHNLIFGRTWVDSPGEMVMTNLTTGDKVVLYFQPCGWFGSGRYEVDGYVYSAAEEPKIMMTGKWNEKMSYQPCDAEGEPLPGTELKEVWHLADVPKNDNFQYTHFAHKINSFDTAPAKLLASDSRIRPDRYSLEQGDLSKAGSEKHSLEERQRAEKRTRETKGQKFTPRWFDLTDEITPTPWGDIEVYQYNGKYNEHRDTAESSSSASNETDLKSIEFNPWQYGNISTE

SEQ ID NO: 21787 - DNA, 1890 bp, Arabidopsis thaliana
  misc_feature (1)..(1890): Ceres Seq. ID no. 12324805
  misc_feature (1)..(1890): Ortholog of  Ceres SEQ ID NO 14315146 as cited in SEQ ID NO 52929
  misc_feature (1)..(1890): Ortholog of  Ceres SEQ ID NO 14302263 as cited in SEQ ID NO 64701
  misc_feature (1)..(1890): Ortholog of  Ceres SEQ ID NO 13584538 as cited in SEQ ID NO 64739
  misc_feature (1)..(1890): Ortholog of  Ceres SEQ ID NO 15169643 as cited in SEQ ID NO 64826
  misc_feature (1)..(1890): Ortholog of  Ceres SEQ ID NO 15169647 as cited in SEQ ID NO 64930
aaactcataaatctctcattctttctcagattctctctctctgttttccttgttctccaagccagatctctctccataaatctctcttcatctctctctttccaccaaacatccgcgatcctcgattctcaattccgtgtctgttttttttcttcacttagcgatggcgatgatagagcaaaggccgaagacgaagatcgtttgtactctaggtccagcttccagatctgttccgatggtcgagaagcttcttagggctggtatgaacgttgctcgtttcaatttctctcatggatctcatgaataccatcaagagactctcgataatcttcatcaagctatgcttaacactgggattctctgtgccgtcatgctcgacaccaagggtccagaaatccgaaccgggttcttgaaagatgggaaaccaatccagctgaaacaaggacaagagatcactatttcgactgactatgacttgaagggtgacgagaacacgatttgcatgagctacaaaaagttggctgttgatgtgaacccaggaatggtcattctttgtgctgatggtacaatctccttactggttctctcttgtgacaaagagaacggtacagtccgttgccggtgtgagaactctgcgatgctcggtgagagaaagaacgttaatctcccaggtgttgttgtggatctcccaactctaactgagaaagacaaagaagacatcatgcaatggggagtcccgaatcaaatcgacatgattgctctgtcttttgtcaggaaaggttcagacttggttcaagtccggaaacttctaggaaagcacgccaaaaacattcttctcatgtctaaggtcgagaaccaagaaggtgtggcaaattttgatgacattttggtcaattcagacgctttcatgattgctagaggagatctgggcatggaaatcccgattgagaagatcttcttagctcagaaggtgatgatctacaaatgcaacatccagggaaaacctgtggtcacagcaactcagatgctcgagtccatgatcaaatctcctagacccacaagagccgaagctacggatgtagcaaacgcagtccttgatggtacagactgtgtcatgctcagtggtgaaactgcagctggagcataccctgaactagccgtccgtacaatggctaagatctgcgtggaagccgagagcacccttgactacggtgatgtcttcaagaggatcatgctgtactctccagttccaatgagtccactcgagtcacttgcatcttcagctgtcagaactgctaactcagctagagccactctcatcatggtcctaaccagaggaggaagcacagcaagacttgtggctaagtacagaccaggaatgcctattctatccgtcgttgttcctgagatcaaaaccgacttctttgactggtcttgcagcgatgaatcccccgcgagacacagccttatcttccgtggtctgatcccagtgctctacgctggatccgcaagagcctcacacgatgaatcaacagaagaagctatcgagtttgctactcagtacgggaaagagaaagagctatgcaagactggagattccgttgttgctctactccgagtcggtaatgcttccgtgatcaagatcttgaccgtcaagtgatgattccactcaaaaattcacgtttttggcgtttggggaacgctactttaaacgttttattatgaaactattcaagattgtgattaaaatcttgagatagaaaactcaagttctattttttgcttattaccacaactactgtgaccggtgaatccacttaacagctccttttgggatattttggttgtattgaaacctattggatcattcatacacgtatcaattatcat

SEQ ID NO: 21788 - protein, 498 aa, Arabidopsis thaliana
  peptide (1)..(498): Ceres Seq. ID no. 12324806
MAMIEQRPKTKIVCTLGPASRSVPMVEKLLRAGMNVARFNFSHGSHEYHQETLDNLHQAMLNTGILCAVMLDTKGPEIRTGFLKDGKPIQLKQGQEITISTDYDLKGDENTICMSYKKLAVDVNPGMVILCADGTISLLVLSCDKENGTVRCRCENSAMLGERKNVNLPGVVVDLPTLTEKDKEDIMQWGVPNQIDMIALSFVRKGSDLVQVRKLLGKHAKNILLMSKVENQEGVANFDDILVNSDAFMIARGDLGMEIPIEKIFLAQKVMIYKCNIQGKPVVTATQMLESMIKSPRPTRAEATDVANAVLDGTDCVMLSGETAAGAYPELAVRTMAKICVEAESTLDYGDVFKRIMLYSPVPMSPLESLASSAVRTANSARATLIMVLTRGGSTARLVAKYRPGMPILSVVVPEIKTDFFDWSCSDESPARHSLIFRGLIPVLYAGSARASHDESTEEAIEFATQYGKEKELCKTGDSVVALLRVGNASVIKILTVK

SEQ ID NO: 21789 - protein, 496 aa, Arabidopsis thaliana
  peptide (1)..(496): Ceres Seq. ID no. 12324807
MIEQRPKTKIVCTLGPASRSVPMVEKLLRAGMNVARFNFSHGSHEYHQETLDNLHQAMLNTGILCAVMLDTKGPEIRTGFLKDGKPIQLKQGQEITISTDYDLKGDENTICMSYKKLAVDVNPGMVILCADGTISLLVLSCDKENGTVRCRCENSAMLGERKNVNLPGVVVDLPTLTEKDKEDIMQWGVPNQIDMIALSFVRKGSDLVQVRKLLGKHAKNILLMSKVENQEGVANFDDILVNSDAFMIARGDLGMEIPIEKIFLAQKVMIYKCNIQGKPVVTATQMLESMIKSPRPTRAEATDVANAVLDGTDCVMLSGETAAGAYPELAVRTMAKICVEAESTLDYGDVFKRIMLYSPVPMSPLESLASSAVRTANSARATLIMVLTRGGSTARLVAKYRPGMPILSVVVPEIKTDFFDWSCSDESPARHSLIFRGLIPVLYAGSARASHDESTEEAIEFATQYGKEKELCKTGDSVVALLRVGNASVIKILTVK

SEQ ID NO: 21790 - protein, 474 aa, Arabidopsis thaliana
  peptide (1)..(474): Ceres Seq. ID no. 12324808
MVEKLLRAGMNVARFNFSHGSHEYHQETLDNLHQAMLNTGILCAVMLDTKGPEIRTGFLKDGKPIQLKQGQEITISTDYDLKGDENTICMSYKKLAVDVNPGMVILCADGTISLLVLSCDKENGTVRCRCENSAMLGERKNVNLPGVVVDLPTLTEKDKEDIMQWGVPNQIDMIALSFVRKGSDLVQVRKLLGKHAKNILLMSKVENQEGVANFDDILVNSDAFMIARGDLGMEIPIEKIFLAQKVMIYKCNIQGKPVVTATQMLESMIKSPRPTRAEATDVANAVLDGTDCVMLSGETAAGAYPELAVRTMAKICVEAESTLDYGDVFKRIMLYSPVPMSPLESLASSAVRTANSARATLIMVLTRGGSTARLVAKYRPGMPILSVVVPEIKTDFFDWSCSDESPARHSLIFRGLIPVLYAGSARASHDESTEEAIEFATQYGKEKELCKTGDSVVALLRVGNASVIKILTVK

SEQ ID NO: 21791 - DNA, 2067 bp, Arabidopsis thaliana
  misc_feature (1)..(2067): Ceres Seq. ID no. 12678932
  misc_feature (1)..(2067): Ortholog of  Ceres SEQ ID NO 13597269 as cited in SEQ ID NO 63932
gaagcatcttatagtatttttagcttcattccttcttttgctctgatcaaagtcttctccttcccttctctctctctttcctcctctgcacatttctgggttcttctcttcttatgctctgtttcttttaagacacagaagaaacagtacagagttgagattttcttaaacaaaagtgaaaagagaagaaacaagtgacagctcaaacggacaaaaaccactcttgggtctttcttgcttctgattctttctcttctctaatagaagaaaacatctagaagctaaaaaaatgtcggaaggagtagaagcgatagtagcaaatgacaacggaacagatcaggtaaacggaaaccgtaccgggaaagataacgaagaacacgacggctccaccggttctaacctaagcaatttcctatggcacggtggctctgtctgggacgcttggttcagctgcgcatctaaccaagtggctcaagtgttattgacattaccgtactcgtttagtcaactaggaatgttatcaggaatagtacttcagatcttctatggtttactaggaagctggactgcttatctcatctctgttctctacgtcgaatacagagctcgtaaagaaaaagaaggcaaaagcttcaaaaaccacgtcattcagtggtttgaagtacttgatggattacttggttcatactggaaagcactaggactcgcatttaattgcactttcctcttgtttggatctgttatccaactcattgcttgtgccagtaacatttattacataaacgatcatctggacaagagaacatggacttacatatttggcgcgtgttgtgcaaccactgtctttataccgtcgtttcacaattaccgaatttggtcattccttggccttggaatgaccacttacaccgcttggtacttagccattgcctccatcatccacggccaggcggaaggtgtgaaacattcaggtccaacaaagctagtgctttattttacgggagccacaaatattttgtacacctttggaggtcacgcggttactgttgagattatgcatgctatgtggaaaccacagaagtttaagtacatttacttgatggcgacgttatacgtgttcacgctaacgattccgtcagctgccgccgtttactgggctttcggagacgcacttctcgaccactccaacgctttctctcttatgcccaagaacgcgtggcgtgacgccgctgttatcctcatgctcattcatcagtttataacgttcgggttcgcttgtacacctttgtactttgtgtgggagaaagtgattgggatgcatgacacaaagagcatttgcttaagggctttggctagattgcctgtggtcatacctatttggttcttagctattatcttcccctttttcggtccaatcaattccgctgtcggtgctcttcttgttagcttcaccgtctatatcatcccatctctcgctcacatgctcacttaccgatctgcctccgctcgtcagaatgcggcggagaagccaccgttctttatgccgagctggacggcgatgtacgtgttgaatgctttcgtggtggtttgggttcttatagtcggatttgggttcggtggatgggctagtgtaaccaactttgttcgtcaagtcgacacttttggtctctttgccaagtgttaccaatgtaaaccagctgcagccgccgcacatgccccggtctccgctttacaccaccgtctttgagagatcgagtcagggttcttctaatgcgtttgtggagggttcttaaaattatttgttcttcttttgtgttttgtgttcgtatacgtgaagggagtaaaagtcacgaaaatagtgtactttttacacacccctttaaatgcgtgctaagctcttaattatttttttctcttttggggttttgtatttttgttttcactccttagttttttttttaaaattgaatagtcgataatatgtagtgtgtgatttcttaatttggtattgttaaaacaataggctaagaaaatgtatcgtcttctctccttttacttgtctttagt

SEQ ID NO: 21792 - protein, 485 aa, Arabidopsis thaliana
  peptide (1)..(485): Ceres Seq. ID no. 12678933
MSEGVEAIVANDNGTDQVNGNRTGKDNEEHDGSTGSNLSNFLWHGGSVWDAWFSCASNQVAQVLLTLPYSFSQLGMLSGIVLQIFYGLLGSWTAYLISVLYVEYRARKEKEGKSFKNHVIQWFEVLDGLLGSYWKALGLAFNCTFLLFGSVIQLIACASNIYYINDHLDKRTWTYIFGACCATTVFIPSFHNYRIWSFLGLGMTTYTAWYLAIASIIHGQAEGVKHSGPTKLVLYFTGATNILYTFGGHAVTVEIMHAMWKPQKFKYIYLMATLYVFTLTIPSAAAVYWAFGDALLDHSNAFSLMPKNAWRDAAVILMLIHQFITFGFACTPLYFVWEKVIGMHDTKSICLRALARLPVVIPIWFLAIIFPFFGPINSAVGALLVSFTVYIIPSLAHMLTYRSASARQNAAEKPPFFMPSWTAMYVLNAFVVVWVLIVGFGFGGWASVTNFVRQVDTFGLFAKCYQCKPAAAAAHAPVSALHHRL

SEQ ID NO: 21793 - protein, 410 aa, Arabidopsis thaliana
  peptide (1)..(410): Ceres Seq. ID no. 12678934
MLSGIVLQIFYGLLGSWTAYLISVLYVEYRARKEKEGKSFKNHVIQWFEVLDGLLGSYWKALGLAFNCTFLLFGSVIQLIACASNIYYINDHLDKRTWTYIFGACCATTVFIPSFHNYRIWSFLGLGMTTYTAWYLAIASIIHGQAEGVKHSGPTKLVLYFTGATNILYTFGGHAVTVEIMHAMWKPQKFKYIYLMATLYVFTLTIPSAAAVYWAFGDALLDHSNAFSLMPKNAWRDAAVILMLIHQFITFGFACTPLYFVWEKVIGMHDTKSICLRALARLPVVIPIWFLAIIFPFFGPINSAVGALLVSFTVYIIPSLAHMLTYRSASARQNAAEKPPFFMPSWTAMYVLNAFVVVWVLIVGFGFGGWASVTNFVRQVDTFGLFAKCYQCKPAAAAAHAPVSALHHRL

SEQ ID NO: 21794 - protein, 283 aa, Arabidopsis thaliana
  peptide (1)..(283): Ceres Seq. ID no. 12678935
MTTYTAWYLAIASIIHGQAEGVKHSGPTKLVLYFTGATNILYTFGGHAVTVEIMHAMWKPQKFKYIYLMATLYVFTLTIPSAAAVYWAFGDALLDHSNAFSLMPKNAWRDAAVILMLIHQFITFGFACTPLYFVWEKVIGMHDTKSICLRALARLPVVIPIWFLAIIFPFFGPINSAVGALLVSFTVYIIPSLAHMLTYRSASARQNAAEKPPFFMPSWTAMYVLNAFVVVWVLIVGFGFGGWASVTNFVRQVDTFGLFAKCYQCKPAAAAAHAPVSALHHRL

SEQ ID NO: 21795 - DNA, 918 bp, Arabidopsis thaliana
  misc_feature (1)..(918): Ceres Seq. ID no. 13490449
  misc_feature (1)..(918): Ortholog of  Ceres SEQ ID NO 12610718 as cited in SEQ ID NO 56596
tcaacccaccagtccaagtcaaacctcctcaagccatcccctaatcctatatatcagtttcttctcgcaaaccacctcacaatctatcaacagttttaaaaaaagacataactcaaccaatctcactttgaaaaagacatgaacaaaacccgccttcgtgctctctccccaccttccggtatgcaacaccgtaagagatgtcgattgagaggtcgaaactacgtaaggccagaagttaaacaacgcaacttctcaaaagatgaagacgatctcatcctcaagcttcatgcacttcttggcaatagatggtcattgatagcgggaagattgccaggacgaaccgacaacgaagttaggatccattgggaaacttacctaaaaaggaagctcgtaaaaatgggaatcgacccaaccaatcatcgtctccaccatcacaccaactacatttctagacgtcacctccattcttcacataaggaacatgaaaccaagattattagtgatcaatcttcttcggtatccgaatcatgtggtgtaacaattttgcccattccaagtaccaattgctcggaggatagtactagtaccggacgaagtcatttgcctgacctaaacattggtctcatcccggccgtgacttctttgccagctctttgccttcaggactctagcgaatcctctaccaatggttcaacaggtcaagaaacgcttcttctattccgatgagaaatggtgtatttgtttgtacacatttgttatattacaaatgcacatattataatattcactagagagatggtataacgatgtttgaaatatgttaatcctgaattggaccggctggtcattgaacaactattctcttaaatgtccggttctgttttcagtgattagtattatagtagatcgttaataact

SEQ ID NO: 21796 - protein, 195 aa, Arabidopsis thaliana
  peptide (1)..(195): Ceres Seq. ID no. 13490450
MNKTRLRALSPPSGMQHRKRCRLRGRNYVRPEVKQRNFSKDEDDLILKLHALLGNRWSLIAGRLPGRTDNEVRIHWETYLKRKLVKMGIDPTNHRLHHHTNYISRRHLHSSHKEHETKIISDQSSSVSESCGVTILPIPSTNCSEDSTSTGRSHLPDLNIGLIPAVTSLPALCLQDSSESSTNGSTGQETLLLFR

SEQ ID NO: 21797 - protein, 181 aa, Arabidopsis thaliana
  peptide (1)..(181): Ceres Seq. ID no. 13490451
MQHRKRCRLRGRNYVRPEVKQRNFSKDEDDLILKLHALLGNRWSLIAGRLPGRTDNEVRIHWETYLKRKLVKMGIDPTNHRLHHHTNYISRRHLHSSHKEHETKIISDQSSSVSESCGVTILPIPSTNCSEDSTSTGRSHLPDLNIGLIPAVTSLPALCLQDSSESSTNGSTGQETLLLFR

SEQ ID NO: 21798 - protein, 109 aa, Arabidopsis thaliana
  peptide (1)..(109): Ceres Seq. ID no. 13490452
MGIDPTNHRLHHHTNYISRRHLHSSHKEHETKIISDQSSSVSESCGVTILPIPSTNCSEDSTSTGRSHLPDLNIGLIPAVTSLPALCLQDSSESSTNGSTGQETLLLFR

SEQ ID NO: 21799 - DNA, 914 bp, Arabidopsis thaliana
  misc_feature (1)..(914): Ceres Seq. ID no. 12332703
  misc_feature (1)..(914): Ortholog of  Ceres SEQ ID NO 13597679 as cited in SEQ ID NO 65073
agtcacacacacaacacaacaatggatattaacaggtggagtcttcaaggtatgactgctcttgtaaccggtggatcaaagggaattgggtatgcaatagtggaggaacttgtaggctttggtgcaagagttcacatctgtgacatagacgaaactctgctaaacgaatgcttaagtggatggcatgcaaaagggtttgaagtgagtggttcaatctgtgatgtttcctctcgacctcagagagtgcaattgatgcagactgtttcttctctatttggtgccaaactcaacatccttataaacaatgttggcaagtacatattaaagccaactttagaaagtacagctgaagatttctcaagtttaatggctaccaatttggaatctgcttactacatctcccaattggcacatcctttacttaaagcctcgggaaatgggaatatcgtgtttatttcctcggtaacgggggttgtctctggcacatctaccatatatggtgtaacaaaaggagccttgaatcaactggcaagagatttggcgtgtgaatgggccagtgacaacataagggctaactctgtagctccttgggtcactgcaacttctcttgtccaaaaatatcttgaagacgagatatttgcggaagctatgttctcaagaaccccattaggacgtgcatgtgagccacgtgaggttgcgtcgctggtgacatttctctgtctccctgcagcttcttatataacaggacaaaccatttgtattgatggtggtttcactgttaatggattctcctataagccatagggtcaaaccctagaaaacacttctacaattaacaatttctatgatgtatgaacatttggtcaagttttactacattatgtcaaaaataaatgaggtcaagcttatatatg

SEQ ID NO: 21800 - protein, 267 aa, Arabidopsis thaliana
  peptide (1)..(267): Ceres Seq. ID no. 12332704
SHTHNTTMDINRWSLQGMTALVTGGSKGIGYAIVEELVGFGARVHICDIDETLLNECLSGWHAKGFEVSGSICDVSSRPQRVQLMQTVSSLFGAKLNILINNVGKYILKPTLESTAEDFSSLMATNLESAYYISQLAHPLLKASGNGNIVFISSVTGVVSGTSTIYGVTKGALNQLARDLACEWASDNIRANSVAPWVTATSLVQKYLEDEIFAEAMFSRTPLGRACEPREVASLVTFLCLPAASYITGQTICIDGGFTVNGFSYKP

SEQ ID NO: 21801 - protein, 260 aa, Arabidopsis thaliana
  peptide (1)..(260): Ceres Seq. ID no. 12332705
MDINRWSLQGMTALVTGGSKGIGYAIVEELVGFGARVHICDIDETLLNECLSGWHAKGFEVSGSICDVSSRPQRVQLMQTVSSLFGAKLNILINNVGKYILKPTLESTAEDFSSLMATNLESAYYISQLAHPLLKASGNGNIVFISSVTGVVSGTSTIYGVTKGALNQLARDLACEWASDNIRANSVAPWVTATSLVQKYLEDEIFAEAMFSRTPLGRACEPREVASLVTFLCLPAASYITGQTICIDGGFTVNGFSYKP

SEQ ID NO: 21802 - protein, 250 aa, Arabidopsis thaliana
  peptide (1)..(250): Ceres Seq. ID no. 12332706
MTALVTGGSKGIGYAIVEELVGFGARVHICDIDETLLNECLSGWHAKGFEVSGSICDVSSRPQRVQLMQTVSSLFGAKLNILINNVGKYILKPTLESTAEDFSSLMATNLESAYYISQLAHPLLKASGNGNIVFISSVTGVVSGTSTIYGVTKGALNQLARDLACEWASDNIRANSVAPWVTATSLVQKYLEDEIFAEAMFSRTPLGRACEPREVASLVTFLCLPAASYITGQTICIDGGFTVNGFSYKP

SEQ ID NO: 21803 - DNA, 839 bp, Arabidopsis thaliana
  misc_feature (1)..(839): Ceres Seq. ID no. 12601485
  misc_feature (1)..(839): Ortholog of  Ceres SEQ ID NO 15178424 as cited in SEQ ID NO 1107
  misc_feature (1)..(839): Ortholog of  Ceres SEQ ID NO 13661185 as cited in SEQ ID NO 61118
  misc_feature (1)..(839): Ortholog of  Ceres SEQ ID NO 14309350 as cited in SEQ ID NO 0
  misc_feature (1)..(839): Ortholog of  Ceres SEQ ID NO 15175181 as cited in SEQ ID NO 0
acacgaaacgattccgcttctccgcttccttcataaatatctcactcatcgtcactacattgttctttcacacgcaattttcatttctctcttaaccgtaaacgaatctctcttctcaaagttttattttctctctgcgatggctcaagaagatgttactgctgttgctactaacggtgctggtccggtggagacgcatcttgtcttcactgagttcaagcagatgttgctcgttgaagctcaaaaggtcggtgacgctgttactttctacaaatctgcttttggtgcgatcgagtctggtcattctctttaccctaagcgtaagcttgaccaagagcttcctcatgttctctcttctgagcttaatctcgctggctcttccttcgttgtttgcgacgtttcctctctccctggtttttctactgcgaaatcggaaggttcgggagtgacttttcttctcggaactaaggatgctgaagccgccgttgcgaaagctgttgacgccggagctgtgaaagtggaggttacggaggcagaagttgaactgggattcaaaggaaaagttacggatccttttggtgtcacttggatcttcgcggagaagaagaccgtgatcaccgacgagaacaaagaggtttagaatctgtcgtcggatctaattcttcgtcggtttctgaacaaaaaaaactatctattatcctaggtttatgcttttattttgtcttttgtggaatccggtaatcagtaaaccggatcgagtaggctaatgactttcggattctaatttcaccccttttgacaaactctaatcttggtgaaattgcatattaatctcgggc

SEQ ID NO: 21804 - protein, 212 aa, Arabidopsis thaliana
  peptide (1)..(212): Ceres Seq. ID no. 12601486
HETIPLLRFLHKYLTHRHYIVLSHAIFISLLTVNESLFSKFYFLSAMAQEDVTAVATNGAGPVETHLVFTEFKQMLLVEAQKVGDAVTFYKSAFGAIESGHSLYPKRKLDQELPHVLSSELNLAGSSFVVCDVSSLPGFSTAKSEGSGVTFLLGTKDAEAAVAKAVDAGAVKVEVTEAEVELGFKGKVTDPFGVTWIFAEKKTVITDENKEV

SEQ ID NO: 21805 - protein, 166 aa, Arabidopsis thaliana
  peptide (1)..(166): Ceres Seq. ID no. 12601487
MAQEDVTAVATNGAGPVETHLVFTEFKQMLLVEAQKVGDAVTFYKSAFGAIESGHSLYPKRKLDQELPHVLSSELNLAGSSFVVCDVSSLPGFSTAKSEGSGVTFLLGTKDAEAAVAKAVDAGAVKVEVTEAEVELGFKGKVTDPFGVTWIFAEKKTVITDENKEV

SEQ ID NO: 21806 - protein, 138 aa, Arabidopsis thaliana
  peptide (1)..(138): Ceres Seq. ID no. 12601488
MLLVEAQKVGDAVTFYKSAFGAIESGHSLYPKRKLDQELPHVLSSELNLAGSSFVVCDVSSLPGFSTAKSEGSGVTFLLGTKDAEAAVAKAVDAGAVKVEVTEAEVELGFKGKVTDPFGVTWIFAEKKTVITDENKEV

SEQ ID NO: 21807 - DNA, 551 bp, Arabidopsis thaliana
  misc_feature (1)..(551): Ceres Seq. ID no. 12331957
  misc_feature (1)..(551): Ortholog of  Ceres SEQ ID NO 12590628 as cited in SEQ ID NO 0
agatcagtgattgttcgatgaacgaagaggagccagacaaagaacacgtggcggattctactatgtcggcggcggcgattgatggtgtggcggctctgagatcggtgtttcagcgggtaaaccaggcggcggagaaagcgggtcgtgggtcggatcagatacgggtcgtagcggtgagtaagacgaaaccagtttctctgattcgccaagtatacgacgctggtcagaggtcttttggagagaattatgtgcaagagatcattgagaaggcacctcagcttccagaagatatagagtggcatttcattgggaatttgcagagcaacaaagtgaagcctttgctatgtaaattgactttgctatttcaaagtcctcatctttagtttttttgtattgagttactaaattgggtgtaaaactccacacttgagttctattcttaattctttggtttgatcagctggtgttcctaaccttgtgaccgtggaaagtgttgatgatgaaaaggtaaaagtttctcttttgtatatttaaagagaaattggtttgtt

SEQ ID NO: 21808 - protein, 126 aa, Arabidopsis thaliana
  peptide (1)..(126): Ceres Seq. ID no. 12331958
ISDCSMNEEEPDKEHVADSTMSAAAIDGVAALRSVFQRVNQAAEKAGRGSDQIRVVAVSKTKPVSLIRQVYDAGQRSFGENYVQEIIEKAPQLPEDIEWHFIGNLQSNKVKPLLCKLTLLFQSPHL

SEQ ID NO: 21809 - protein, 121 aa, Arabidopsis thaliana
  peptide (1)..(121): Ceres Seq. ID no. 12331959
MNEEEPDKEHVADSTMSAAAIDGVAALRSVFQRVNQAAEKAGRGSDQIRVVAVSKTKPVSLIRQVYDAGQRSFGENYVQEIIEKAPQLPEDIEWHFIGNLQSNKVKPLLCKLTLLFQSPHL

SEQ ID NO: 21810 - protein, 106 aa, Arabidopsis thaliana
  peptide (1)..(106): Ceres Seq. ID no. 12331960
MSAAAIDGVAALRSVFQRVNQAAEKAGRGSDQIRVVAVSKTKPVSLIRQVYDAGQRSFGENYVQEIIEKAPQLPEDIEWHFIGNLQSNKVKPLLCKLTLLFQSPHL

SEQ ID NO: 21811 - DNA, 1299 bp, Arabidopsis thaliana
  misc_feature (1)..(1299): Ceres Seq. ID no. 12389208
  misc_feature (1)..(1299): Ortholog of  Ceres SEQ ID NO 14308278 as cited in SEQ ID NO 55403
  misc_feature (1)..(1299): Ortholog of  Ceres SEQ ID NO 12618176 as cited in SEQ ID NO 64489
  misc_feature (1)..(1299): Ortholog of  Ceres SEQ ID NO 15179231 as cited in SEQ ID NO 0
aaagcgtcgtctcttgttccttccgctgccaacaaaatggagctgtcgtctgcgtccgccatattaagccactcctcctccgccgctcagcttctcagacctaagctcgggtttattgatttgcttcctcgtcgagcgatgatcgtttcttctccttcttcttcgcttcctcgatttttgcggatggaatctcaatctcagcttcgccaatctatctcttgctctgcttcttcttcttcttctatggcattaggtagaattggagaagtaaagagagtaacaaagaagaaggagaagaaacgatcatcgctcgacgaggaagcaaatcaataaacccgagcttaggtctcggaaactgcccgacggaggcgagtcctttagttatggctgacgacgagaagtacggtaacaaaatggttatcagtctcactcctcgcctttatgactatgtcctcaacaaccttcgtgagcatgagattttgaagcaacttcgagaagaaactgccattagtcaaattcaggtgtcacctgatcaagcgcaattgcttgcaatgcttgtagagattcttggagctaaacgatgtattgaagttggagtttacacgggatattcatcactggctgtggcgttggttctaccagaatcagggcgtcttgttgcctgtgataaagatgctaacgctcttgaagttgctaagaggtactacgagcttgccggagtgtctcacaaggtcactgtgaaacatggtcttgcagcagaatctttgatgtctatgattcagaacggtgaagagtccagctatgattttgcatttcttgatgctgataaggcgatgtatcaggagtacttcgaatcgctacttcgactcgtcagggttggtggagtcattgtgattgataatgttctttggcatggatgggttgcggattctacggtgaatgatgagaggaccatcagcctaagaaatttcaacaaaaaattaatggatgatcaacgtgtaagcattagtatggtatcaatcggcgatggtatgaccatatgccgcaagaggtaatcatccgtaaaaaccactcagctcgcagtgaaacctgttccaagatagaagaagtcttcaaacataaaaggattgatgaagccaagatatccagtctcacaaacactaaagactcatcaacttttcccttttcagtcaaaaataagttgaataattgataaaccaatgtgtgggcctattgggctttgatatgtactgttttctatgtccgtttgaggccttttataaaatcgtcttacgaccc

SEQ ID NO: 21812 - protein, 223 aa, Arabidopsis thaliana
  peptide (1)..(223): Ceres Seq. ID no. 12389209
MADDEKYGNKMVISLTPRLYDYVLNNLREHEILKQLREETAISQIQVSPDQAQLLAMLVEILGAKRCIEVGVYTGYSSLAVALVLPESGRLVACDKDANALEVAKRYYELAGVSHKVTVKHGLAAESLMSMIQNGEESSYDFAFLDADKAMYQEYFESLLRLVRVGGVIVIDNVLWHGWVADSTVNDERTISLRNFNKKLMDDQRVSISMVSIGDGMTICRKR

SEQ ID NO: 21813 - protein, 213 aa, Arabidopsis thaliana
  peptide (1)..(213): Ceres Seq. ID no. 12389210
MVISLTPRLYDYVLNNLREHEILKQLREETAISQIQVSPDQAQLLAMLVEILGAKRCIEVGVYTGYSSLAVALVLPESGRLVACDKDANALEVAKRYYELAGVSHKVTVKHGLAAESLMSMIQNGEESSYDFAFLDADKAMYQEYFESLLRLVRVGGVIVIDNVLWHGWVADSTVNDERTISLRNFNKKLMDDQRVSISMVSIGDGMTICRKR

SEQ ID NO: 21814 - protein, 167 aa, Arabidopsis thaliana
  peptide (1)..(167): Ceres Seq. ID no. 12389211
MLVEILGAKRCIEVGVYTGYSSLAVALVLPESGRLVACDKDANALEVAKRYYELAGVSHKVTVKHGLAAESLMSMIQNGEESSYDFAFLDADKAMYQEYFESLLRLVRVGGVIVIDNVLWHGWVADSTVNDERTISLRNFNKKLMDDQRVSISMVSIGDGMTICRKR

SEQ ID NO: 21815 - DNA, 627 bp, Arabidopsis thaliana
  misc_feature (1)..(627): Ceres Seq. ID no. 12388514
  misc_feature (1)..(627): Ortholog of  Ceres SEQ ID NO 15179445 as cited in SEQ ID NO 0
aatttatttttgtttagtttgttacttcgccgtgcgcggcgggagagaacgctggcggaaaaaagaaatcggaaaatcggaaaattggagaaaccctattcgacgaaaaggagagacctttgaatcgaagcttggtgtgtttatactatgaagagtcaatggtctaattttcatcagattgggagaaactctttcttagctgcttctactgtttacgtttcaaacgaattcaacttcttaaacacttctcttcttaatcgaagaagcttctgttttgcagaaggagatcgatccagctttgtagtgttgaaatcggaagcagagttcaacagtgcattgagtaaagctcgagatggatctttgccatcggttttctatttcactgccgcatggtgtggaccttgcaggcttatctctcctgtgatattggagctcagtaataaatatcctgatgtaacaacgtataaggtcgacattgacgagggcggtctatcaaatgctattgggaagttaaatgtatctgctgtgccaacactgcaattcttcaaaggtggcgtgaagaaagcagagattgtaggcgttgatgtggtgaggctgaagagtgtcatggaacaactctacaagtga

SEQ ID NO: 21816 - protein, 159 aa, Arabidopsis thaliana
  peptide (1)..(159): Ceres Seq. ID no. 12388515
MKSQWSNFHQIGRNSFLAASTVYVSNEFNFLNTSLLNRRSFCFAEGDRSSFVVLKSEAEFNSALSKARDGSLPSVFYFTAAWCGPCRLISPVILELSNKYPDVTTYKVDIDEGGLSNAIGKLNVSAVPTLQFFKGGVKKAEIVGVDVVRLKSVMEQLYK

SEQ ID NO: 21817 - DNA, 766 bp, Arabidopsis thaliana
  misc_feature (1)..(766): Ceres Seq. ID no. 12384599
  misc_feature (1)..(766): Ortholog of  Ceres SEQ ID NO 13595021 as cited in SEQ ID NO 55815
ataccaataagcaatttgctcattagagaacagagaaaaaaaaaaaacaatggcaactcaagccgccgggatcttcaactccgccataacaaccgccgcaacctccggcgtcaagaaactccactttttctcaacaacccaccgtcccaaatccctctccttcaccaaaaccgcaatccgcgccgagaaaacagattcctccgccgccgctgctgcagcccccgccacgaaagaagctcccgtgggattcacgccaccgcagctagacccaaacacaccgtctccgatcttcgctggaagcaccggtggtcttctacgtaaagcgcaagtggaagagttctacgttatcacgtggaactcaccgaaagaacagatctttgagatgccgacaggaggagcagcgatcatgagagaaggtccgaatcttctgaagctagcgaggaaagagcagtgtttagctttggggacaaggcttagatccaagtacaagatcacttaccagttttacagagtgtttcctaacggtgaggttcaatatcttcatcctaaagatggtgtttatccagagaaggcgaatccaggaagagaaggtgttggtctcaacatgagatctattgggaaaaatgttagtcccattgaagttaagtttactggcaaacaaagttatgatttgtaagatctgtaaactaaaaaaaaccaaaaactatgtgcatgtggtgatgattatgactatgtttcatgttaatttttaatggattttgttttg

SEQ ID NO: 21818 - protein, 208 aa, Arabidopsis thaliana; identical to SEQ ID NO: 21188
  peptide (1)..(208): Ceres Seq. ID no. 12384600

SEQ ID NO: 21819 - protein, 106 aa, Arabidopsis thaliana
  peptide (1)..(106): Ceres Seq. ID no. 12384601
IPISNLLIREQRKKKNNGNSSRRDLQLRHNNRRNLRRQETPLFLNNPPSQIPLLHQNRNPRRENRFLRRRCCSPRHERSSRGIHATAARPKHTVSDLRWKHRWSST

SEQ ID NO: 21820 - DNA, 707 bp, Arabidopsis thaliana
  misc_feature (1)..(707): Ceres Seq. ID no. 13489159
  misc_feature (1)..(707): Ortholog of  Ceres SEQ ID NO 13581902 as cited in SEQ ID NO 52223
  misc_feature (1)..(707): Ortholog of  Ceres SEQ ID NO 12585528 as cited in SEQ ID NO 62991
ttcactacaaaatttctcattcgcatcctccacaagaagaaaattcgatcggtcgattagtctttgtttgatttcgaaatggctcgtactaagcaaaccgcgaggaaatccacaggaggcaaagcaccaagaaagcaactcgcaaccaaggcggcaaggaaatctgctccggccaccggaggagtgaagaagccgcatagattccgtccaggaactgttgccttgagagagatcaggaagtatcagaagagcactgagcttctgatccgtaagcttcctttccagcgtctggttcgtgagatagctcaggatttcaagacggatctgaggtttcagagcagtgctgttgctgctttacaagaggctgctgaggcttaccttgttggtttgtttgaagacactaatctttgcgccattcacgctaagagggtcaccatcatgcctaaggatatccagctcgcgaggagaatcagaggagaaagagcttgaagactgttgttatggtttatatcttttgatttagttcgtcaatggaactctatttctggattttgatttgcgttttagtagtaatgggttcttgtaagtgttgagctttggctcgttttaattttcagttgttaggtactttggtttagttagccttgaagtgttcgatgaaataccccaacgaaactctctcctgtttaatagaacttattttcctt

SEQ ID NO: 21821 - protein, 136 aa, Arabidopsis thaliana; identical to SEQ ID NO: 8709
  peptide (1)..(136): Ceres Seq. ID no. 13489160

SEQ ID NO: 21822 - DNA, 1410 bp, Arabidopsis thaliana
  misc_feature (1)..(1410): Ceres Seq. ID no. 12348573
  misc_feature (1)..(1410): Ortholog of  Ceres SEQ ID NO 14316239 as cited in SEQ ID NO 54472
  misc_feature (1)..(1410): Ortholog of  Ceres SEQ ID NO 13654809 as cited in SEQ ID NO 62798
aaaaaagctcttttaggtcactctctatttttcgctccctcgccggactttgctgacgccgccggttatatcttctagtctcattcgtcgacatgaagctcactgttaagactctcaagggtagccattttgagattagggttcttcccaccgacacgataatggcggtgaagaagaatattgaagattcacaaagcaaagacaactatccttgtgggcagcaattactgattcacaatggaaaggttttgaaagatgaaactaccttggtggagaacaaggttaccgaggagggttttcttgtcgtgatgcttagcaagagcaaaactgcaagttcagctggtccctcttctactcagcctacttctaccacgacatctaccatatcttcaaccacgcttgcagctccgtcgacaacccagtctattgctgtgccggcttcaaattctactcccgttcaagaacaaccaacggcacaaagtgacacctatggtcaagctgcttcaactttagttagtggcagtagtattgagcaaatggttcaacaaataatggaaatgggaggaggcagttgggacaaagaaacggttactcgtgcacttcgtgcagcatataacaaccctgagagagcagtggattatctatattctggaattcctgaaacagtaaccattccagcaactaatttatctggagtaggatctggtagagaacttactgctcctcctccctctggaggccctaattcatctcctctggatttgtttccccaggaagcagtttctgatgcagcaggtggagatcttggaacgcttgaattcctcagaggcaatgatcagttccaacaattacgctccatggtcaattccaacccccagattctgcagcctatgcttcaagagctcggaaagcagaacccccaacttctgaggctaattcaagagaaccaagccgaatttcttcagttactaaacgagccctacgaaggatctgacggggatgtggatatcttcgatcaacctgatcaagaaatgccccactcagtcaacgttacccctgaagagcaagaatcaattgaacggcttgaggcaatggggtttgatagagcaatagtcatagaagccttcctttcctgtgaccgtaacgaggaattggctgcaaactatctactagagcactcagcagattttgaagactgaattccgagccttttaacctgaacaaagcacaagattttgttttgtttctccaccccttttatctgaactgttactatgctcagagaatcaaatgattatatcttacacctccatatttaccttgaagaataatctgcgttttccacactgtaaacacaattcattgtgtttctctctactgaaatgattattaacaatatgatatggtttt

SEQ ID NO: 21823 - protein, 368 aa, Arabidopsis thaliana
  peptide (1)..(368): Ceres Seq. ID no. 12348574
MKLTVKTLKGSHFEIRVLPTDTIMAVKKNIEDSQSKDNYPCGQQLLIHNGKVLKDETTLVENKVTEEGFLVVMLSKSKTASSAGPSSTQPTSTTTSTISSTTLAAPSTTQSIAVPASNSTPVQEQPTAQSDTYGQAASTLVSGSSIEQMVQQIMEMGGGSWDKETVTRALRAAYNNPERAVDYLYSGIPETVTIPATNLSGVGSGRELTAPPPSGGPNSSPLDLFPQEAVSDAAGGDLGTLEFLRGNDQFQQLRSMVNSNPQILQPMLQELGKQNPQLLRLIQENQAEFLQLLNEPYEGSDGDVDIFDQPDQEMPHSVNVTPEEQESIERLEAMGFDRAIVIEAFLSCDRNEELAANYLLEHSADFED

SEQ ID NO: 21824 - protein, 345 aa, Arabidopsis thaliana
  peptide (1)..(345): Ceres Seq. ID no. 12348575
MAVKKNIEDSQSKDNYPCGQQLLIHNGKVLKDETTLVENKVTEEGFLVVMLSKSKTASSAGPSSTQPTSTTTSTISSTTLAAPSTTQSIAVPASNSTPVQEQPTAQSDTYGQAASTLVSGSSIEQMVQQIMEMGGGSWDKETVTRALRAAYNNPERAVDYLYSGIPETVTIPATNLSGVGSGRELTAPPPSGGPNSSPLDLFPQEAVSDAAGGDLGTLEFLRGNDQFQQLRSMVNSNPQILQPMLQELGKQNPQLLRLIQENQAEFLQLLNEPYEGSDGDVDIFDQPDQEMPHSVNVTPEEQESIERLEAMGFDRAIVIEAFLSCDRNEELAANYLLEHSADFED

SEQ ID NO: 21825 - protein, 296 aa, Arabidopsis thaliana
  peptide (1)..(296): Ceres Seq. ID no. 12348576
MLSKSKTASSAGPSSTQPTSTTTSTISSTTLAAPSTTQSIAVPASNSTPVQEQPTAQSDTYGQAASTLVSGSSIEQMVQQIMEMGGGSWDKETVTRALRAAYNNPERAVDYLYSGIPETVTIPATNLSGVGSGRELTAPPPSGGPNSSPLDLFPQEAVSDAAGGDLGTLEFLRGNDQFQQLRSMVNSNPQILQPMLQELGKQNPQLLRLIQENQAEFLQLLNEPYEGSDGDVDIFDQPDQEMPHSVNVTPEEQESIERLEAMGFDRAIVIEAFLSCDRNEELAANYLLEHSADFED

SEQ ID NO: 21826 - DNA, 946 bp, Arabidopsis thaliana
  misc_feature (1)..(946): Ceres Seq. ID no. 13646022
  misc_feature (1)..(946): Ortholog of  Ceres SEQ ID NO 13599287 as cited in SEQ ID NO 338
ctcggtttcactattgaacgtgtaacactggtcgaaagaagacgaacataaactcgtctccatgactacttcatcttcttcgtacggaacattctctacagtcttcaacagttctagacctaattcctcagcaacctttctcgtcccttccttgaaattctccaccggaatatcgaatttcgcgaatctgagtaatgggttttctctaaaatctccaattaatcctgggtttctcttcaagtctcgtcctttcactgtccaagctagagctgctgcagaaaaaaccgttcacgatttcaccgttaaggacattgatgggaaggatgttgctttgaacaaattcaaggggaaagttatgttgattgtcaatgttgcttcaagatgtggtttgacatcatcaaattactcagagctttcacatctgtacgagaaatacaaaactcaaggatttgagattctagcttttccctgcaatcagtttggtttccaagagcccgggtcaaactccgagatcaaacaattcgcttgcacccggtttaaagcagagttccctatatttgataaggttgacgtgaatggaccaagcacaagcgccgatctacgagttcttgaaatcaaacgcaggaggattcttgggtggtctcattaaatggaactttgagaagttcttgattgataaaaagggaaaggtcgttgagaggtaccctcccaccacatcccctttccaaatcgagaaagacatccagaagttgcttgccgcttaaaaacttttgctcatgagtgagcatatagagactgatggttaaagtaaccgtaaattgtgacataaagtttccggttattgcttgtataccttcttacattctaagttgtactaatcgcttaataatttgcgtataatggtaatgttatatacattatattataaaaatggtgttatatatgc

SEQ ID NO: 21827 - protein, 195 aa, Arabidopsis thaliana
  peptide (1)..(195): Ceres Seq. ID no. 13646023
MTTSSSSYGTFSTVFNSSRPNSSATFLVPSLKFSTGISNFANLSNGFSLKSPINPGFLFKSRPFTVQARAAAEKTVHDFTVKDIDGKDVALNKFKGKVMLIVNVASRCGLTSSNYSELSHLYEKYKTQGFEILAFPCNQFGFQEPGSNSEIKQFACTRFKAEFPIFDKVDVNGPSTSADLRVLEIKRRRILGWSH

SEQ ID NO: 21828 - protein, 97 aa, Arabidopsis thaliana
  peptide (1)..(97): Ceres Seq. ID no. 13646024
MLIVNVASRCGLTSSNYSELSHLYEKYKTQGFEILAFPCNQFGFQEPGSNSEIKQFACTRFKAEFPIFDKVDVNGPSTSADLRVLEIKRRRILGWSH

SEQ ID NO: 21829 - DNA, 1090 bp, Arabidopsis thaliana
  misc_feature (1)..(1090): Ceres Seq. ID no. 12394073
  misc_feature (1)..(1090): Ortholog of  Ceres SEQ ID NO 13594490 as cited in SEQ ID NO 51289
  misc_feature (1)..(1090): Ortholog of  Ceres SEQ ID NO 14309434 as cited in SEQ ID NO 0
acaattactgcctctgcctgttacttgttctgctccgtcgctcagataggatctcaacaagacaccacaaaccctaaatttcgtcaactccacagcgactcgattcgatcaaggaaatggcgtacgcttctcgttttctctccagatctaagcagctacaggggggtctggtcattttgcagcagcaacatgctattccagtccgagcttttgctaaggaagctgctcgtccaacctttaaaggagatgagatgttgaagggtgtcttttttgatatcaagaacaaattccaggctgctgttgatattctccgtaaggaaaagatcacccttgatccagaggacccagctgccgtaaaacagtatgcaaatgtaatgaagaccatcaggcaaaaggcagacatgttctcagaatctcagcgcattaaacatgacattgatactgagactcaagacattccagatgctcgtgcatacttgttgaagttgcaggaaattcgcaccaggagggggcttactgatgagcttggtgctgaggccatgatgttcgaggctttggagaaagtcgagaaggacataaagaagcctctcctgagaagtgacaagaaaggaatggatcttttggttgcagagtttgagaaaggcaacaaaaagcttgggattaggaaagaagatcttcctaagtacgaagaaaatttggagctcagcatggccaaagcacagttggatgagctgaagagtgatgctgttgaagctatggaatctcagaaaaagaaggaggaattccaggatgaggaaatgccggacgtgaagtctctagacatccgtaacttcatctaaggtttgatccttagaaacatttgatttgttgtaagaaaaggcaaagatctctcacttgattgtctttgaaagagaagatcgttcccttgctgctgttttggtttggcgttcaataaggtctctcacctggatttgagtctaactctctctgtggttattacgcttgagattcttagacacaaacgttgtttcatgtttttttgataatggtgatcactggaatttgagataattaataaaagttgtgatgg

SEQ ID NO: 21830 - protein, 240 aa, Arabidopsis thaliana
  peptide (1)..(240): Ceres Seq. ID no. 12394074
MAYASRFLSRSKQLQGGLVILQQQHAIPVRAFAKEAARPTFKGDEMLKGVFFDIKNKFQAAVDILRKEKITLDPEDPAAVKQYANVMKTIRQKADMFSESQRIKHDIDTETQDIPDARAYLLKLQEIRTRRGLTDELGAEAMMFEALEKVEKDIKKPLLRSDKKGMDLLVAEFEKGNKKLGIRKEDLPKYEENLELSMAKAQLDELKSDAVEAMESQKKKEEFQDEEMPDVKSLDIRNFI

SEQ ID NO: 21831 - protein, 195 aa, Arabidopsis thaliana
  peptide (1)..(195): Ceres Seq. ID no. 12394075
MLKGVFFDIKNKFQAAVDILRKEKITLDPEDPAAVKQYANVMKTIRQKADMFSESQRIKHDIDTETQDIPDARAYLLKLQEIRTRRGLTDELGAEAMMFEALEKVEKDIKKPLLRSDKKGMDLLVAEFEKGNKKLGIRKEDLPKYEENLELSMAKAQLDELKSDAVEAMESQKKKEEFQDEEMPDVKSLDIRNFI

SEQ ID NO: 21832 - protein, 154 aa, Arabidopsis thaliana
  peptide (1)..(154): Ceres Seq. ID no. 12394076
MKTIRQKADMFSESQRIKHDIDTETQDIPDARAYLLKLQEIRTRRGLTDELGAEAMMFEALEKVEKDIKKPLLRSDKKGMDLLVAEFEKGNKKLGIRKEDLPKYEENLELSMAKAQLDELKSDAVEAMESQKKKEEFQDEEMPDVKSLDIRNFI

SEQ ID NO: 21833 - DNA, 625 bp, Arabidopsis thaliana
  misc_feature (1)..(625): Ceres Seq. ID no. 12331135
  misc_feature (1)..(625): Ortholog of  Ceres SEQ ID NO 13599881 as cited in SEQ ID NO 1319
  misc_feature (1)..(625): Ortholog of  Ceres SEQ ID NO 13600163 as cited in SEQ ID NO 0
aaaccctaaggaaacttcggcaagctccagagaaacgagagttccgtaatcattttctcttgttgttcctgatcgcgtagctcaagcgaaaaaaatggcgtcgtttgatgaagcaccaccaggaaacgccaaggccggtgagaagatcttcaggaccaagtgtgctcagtgtcacaccgtcgaagcaggcgccggtcacaaacaaggacccaatctaaacggtctatttggaagacaatctggtacaactgctggttactcttactctgctgctaacaagaacaaagctgtggaatgggaagagaaggccttgtacgattacttgctcaaccccaagaagtacataccaggtaccaagatggtgttccctgggctaaagaagccgcaagaccgtgctgatctcatcgcctacttgaaggaatctactgcgcctaagtgaatctgatggtggattgattctgagttgttaagtctctctcagatgaggcttttttactttgctatattcttttgccaaataaaatctcaaactttttttgtttatcatcaattacgttcttggtgggaatttggctgtaatgtgtgctgaggctcactttatcgagtacatttgattttctgaggc

SEQ ID NO: 21834 - protein, 114 aa, Arabidopsis thaliana [sequence omitted]

SEQ ID NO: 21835 - DNA, 1233 bp, Arabidopsis thaliana
  misc_feature (1)..(1233): Ceres Seq. ID no. 12394458
  misc_feature (1)..(1233): Ortholog of  Ceres SEQ ID NO 15171268 as cited in SEQ ID NO 51297
  misc_feature (1)..(1233): Ortholog of  Ceres SEQ ID NO 15170521 as cited in SEQ ID NO 55668
  misc_feature (1)..(1233): Ortholog of  Ceres SEQ ID NO 13598249 as cited in SEQ ID NO 62509
  misc_feature (1)..(1233): Ortholog of  Ceres SEQ ID NO 13598595 as cited in SEQ ID NO 64671
  misc_feature (1)..(1233): Ortholog of  Ceres SEQ ID NO 13654241 as cited in SEQ ID NO 68348
atgagattagttgtcagatagatattcgcgagacgagaagctccaattaaaaaccctagagctcatctctctctccaggtacggccttttcgtttttggctttcaccggcgtggatctccggtgacggggagattcggaatttcggagagattttagatcatgtatagagagagaggtatggttggatcgaagtcggaggtggtcgatcggaaacgaataaacgagattcacgataacaggccttcgcattcgatgtctcagcctgtcaatggaaaaggcaaggtaacatcgacctccgttttgatggggaagcagcaattgcatgataaggaatcttcacgttctggttctatctctaagactaacatttccgacgctgtggatatatcagacacagacagcgaagaatcagaggtcagtggttctgatggagaggacacctcgtggatatcttggttctgcaaccttcgtgggaacgagttcttctgtgaagttgatgatgattacatccaggatgactttaacttgtgtggactcagccatcaagttccttactacgactatgcccttgatttgattttggatgtggagtcttcgcatggtgagatgtttacagaggaacagaatgaattgatcgagtcagcagcagagatgctatatggaatgattcatgctcgtttcatattgactagcaaagggctggcttctatgttagacaaatacaaaaactatgactttggaagatgcccaagagtttattgttgtggccaaccttgtttaccagttggtcaatccgatatccctagagcaagcaccgtaaagatatactgcccaaaatgtgaagatgtctattacccacgatcaaaataccaaggaaacatagatggagcttactttgggacaacgtttccacatctgttcttgatgacgtacgggcatctgaagccacaaaaggcatcacaaagctacactcaaagagtgtttgggttcaagctacacaagccgtgaaggaaacaaggaagaagaaatgcacccttgggttttgagaaacaagaaatgtgtgtaaacaaaacaaaaagaaaaagaccatttgtatcacagaaggtgaaactagttccatctctctctctctctctctttctttgtttttggtattgtgtttaggtttagataaaacattagcagcatggactggtgaactgaaatcccatattattgtaatactttacctt

SEQ ID NO: 21836 - protein, 282 aa, Arabidopsis thaliana
  peptide (1)..(282): Ceres Seq. ID no. 12394459
MYRERGMVGSKSEVVDRKRINEIHDNRPSHSMSQPVNGKGKVTSTSVLMGKQQLHDKESSRSGSISKTNISDAVDISDTDSEESEVSGSDGEDTSWISWFCNLRGNEFFCEVDDDYIQDDFNLCGLSHQVPYYDYALDLILDVESSHGEMFTEEQNELIESAAEMLYGMIHARFILTSKGLASMLDKYKNYDFGRCPRVYCCGQPCLPVGQSDIPRASTVKIYCPKCEDVYYPRSKYQGNIDGAYFGTTFPHLFLMTYGHLKPQKASQSYTQRVFGFKLHKP

SEQ ID NO: 21837 - protein, 276 aa, Arabidopsis thaliana
  peptide (1)..(276): Ceres Seq. ID no. 12394460
MVGSKSEVVDRKRINEIHDNRPSHSMSQPVNGKGKVTSTSVLMGKQQLHDKESSRSGSISKTNISDAVDISDTDSEESEVSGSDGEDTSWISWFCNLRGNEFFCEVDDDYIQDDFNLCGLSHQVPYYDYALDLILDVESSHGEMFTEEQNELIESAAEMLYGMIHARFILTSKGLASMLDKYKNYDFGRCPRVYCCGQPCLPVGQSDIPRASTVKIYCPKCEDVYYPRSKYQGNIDGAYFGTTFPHLFLMTYGHLKPQKASQSYTQRVFGFKLHKP

SEQ ID NO: 21838 - protein, 251 aa, Arabidopsis thaliana
  peptide (1)..(251): Ceres Seq. ID no. 12394461
MSQPVNGKGKVTSTSVLMGKQQLHDKESSRSGSISKTNISDAVDISDTDSEESEVSGSDGEDTSWISWFCNLRGNEFFCEVDDDYIQDDFNLCGLSHQVPYYDYALDLILDVESSHGEMFTEEQNELIESAAEMLYGMIHARFILTSKGLASMLDKYKNYDFGRCPRVYCCGQPCLPVGQSDIPRASTVKIYCPKCEDVYYPRSKYQGNIDGAYFGTTFPHLFLMTYGHLKPQKASQSYTQRVFGFKLHKP

SEQ ID NO: 21839 - DNA, 851 bp, Arabidopsis thaliana
  misc_feature (1)..(851): Ceres Seq. ID no. 12329604
  misc_feature (1)..(851): Ortholog of  Ceres SEQ ID NO 12619999 as cited in SEQ ID NO 66123
  misc_feature (1)..(851): Ortholog of  Ceres SEQ ID NO 13656436 as cited in SEQ ID NO 69154
ctctttccctctctctctctctccaaaccagtcctacttctctctctagaaacctagggaagaagaagaagacggtgaagcgagcgatgtcttcggacgacgaaggaagagaggagtatctcttcaagattgttgttatcggcgactctgccgtcggtaaatctaatcttctatctcgttacgcacgtaacgagttcagcgctaactccaaggcgacgatcggagtcgagtttcagacgcagagcatggagattgaaggtaaagaggtcaaggctcagatttgggacactgctggtcaggagcgtttccgtgccgtcacttccgcttattaccgtggcgctgtcggtgccctcgtcgtttacgacattacccgccgcaccactttcgaaagcgttggacgttggctcgatgagcttaagatccattcggatacgacggtggcgagaatgctggtggggaacaagtgtgatctagaaaacataagagcagtgagcgtggaggaaggaaaggctctagccgaagaggaaggactcttctttgtggaaacatcggctcttgattcgactaatgttaaaacagctttcgagatggtgatacttgatatctacaataacgtgagccgtaagcaactcaactcagatacttataaagacgaactcaccgtgaatcgggtaagtcttgttaaggatgataactctgcctccaaacaaagctctggtttctcttgttgttcttccacttgatgatataccacaccaaaataatccttttttatttctcacaactgtaactttattatataaatttttgtttttttctttgactcatggaagaaaagaaattcatgaact

SEQ ID NO: 21840 - protein, 246 aa, Arabidopsis thaliana
  peptide (1)..(246): Ceres Seq. ID no. 12329605
LSLSLSLQTSPTSLSRNLGKKKKTVKRAMSSDDEGREEYLFKIVVIGDSAVGKSNLLSRYARNEFSANSKATIGVEFQTQSMEIEGKEVKAQIWDTAGQERFRAVTSAYYRGAVGALVVYDITRRTTFESVGRWLDELKIHSDTTVARMLVGNKCDLENIRAVSVEEGKALAEEEGLFFVETSALDSTNVKTAFEMVILDIYNNVSRKQLNSDTYKDELTVNRVSLVKDDNSASKQSSGFSCCSST

SEQ ID NO: 21841 - protein, 218 aa, Arabidopsis thaliana
  peptide (1)..(218): Ceres Seq. ID no. 12329606
MSSDDEGREEYLFKIVVIGDSAVGKSNLLSRYARNEFSANSKATIGVEFQTQSMEIEGKEVKAQIWDTAGQERFRAVTSAYYRGAVGALVVYDITRRTTFESVGRWLDELKIHSDTTVARMLVGNKCDLENIRAVSVEEGKALAEEEGLFFVETSALDSTNVKTAFEMVILDIYNNVSRKQLNSDTYKDELTVNRVSLVKDDNSASKQSSGFSCCSST

SEQ ID NO: 21842 - protein, 165 aa, Arabidopsis thaliana
  peptide (1)..(165): Ceres Seq. ID no. 12329607
MEIEGKEVKAQIWDTAGQERFRAVTSAYYRGAVGALVVYDITRRTTFESVGRWLDELKIHSDTTVARMLVGNKCDLENIRAVSVEEGKALAEEEGLFFVETSALDSTNVKTAFEMVILDIYNNVSRKQLNSDTYKDELTVNRVSLVKDDNSASKQSSGFSCCSST

SEQ ID NO: 21843 - DNA, 730 bp, Arabidopsis thaliana
  misc_feature (1)..(730): Ceres Seq. ID no. 12329736
  misc_feature (1)..(730): Ortholog of  Ceres SEQ ID NO 15168553 as cited in SEQ ID NO 57750
acaaaccattaatcgatcaaacaactaaattaaaaaaaaatcttgagagattcttggaacacaagaaaaacatgaaacctagaatgtgtttaatcttgtttattgctttaatgagagtaatgtcgattgtttctgctcagtcgagttgcacaaatgttctaatcagcatggcgccgtgtctcagcttcatcactcaaaacacttctctcccgtctcaacaatgttgtaaccagttggctcatgttgtccggtattcttctgagtgtttgtgtcaggttctcgatggtggaggttctcagcttgggatcaatgttaatgagacacaagctcttgctttgcctaaagcttgtcatgttcaaactcctcctgctagtcgctgccatagtggttcttcggttaattcacattcagaacatggaaatggatcaaaaacaatcccaagagaaaagtcatcatctgatggttctattaagttctcattccctcttctcgccatcctattcacagcttcttacattacattaatctacgcaaaatactgacttattttaccaataaagcttttggcctctttgaagaacatattcatttttagtctctattaaatcgcggtgtattgtggtgaagtattttgtgctctaaatccctactttctaggtgatattggtttgtagtccaaagagtgtgattgtatatctttgatttatgcaataaacattattttctagcc

SEQ ID NO: 21844 - protein, 179 aa, Arabidopsis thaliana
  peptide (1)..(179): Ceres Seq. ID no. 12329737
KPLIDQTTKLKKNLERFLEHKKNMKPRMCLILFIALMRVMSIVSAQSSCTNVLISMAPCLSFITQNTSLPSQQCCNQLAHVVRYSSECLCQVLDGGGSQLGINVNETQALALPKACHVQTPPASRCHSGSSVNSHSEHGNGSKTIPREKSSSDGSIKFSFPLLAILFTASYITLIYAKY

SEQ ID NO: 21845 - protein, 156 aa, Arabidopsis thaliana
  peptide (1)..(156): Ceres Seq. ID no. 12329738
MKPRMCLILFIALMRVMSIVSAQSSCTNVLISMAPCLSFITQNTSLPSQQCCNQLAHVVRYSSECLCQVLDGGGSQLGINVNETQALALPKACHVQTPPASRCHSGSSVNSHSEHGNGSKTIPREKSSSDGSIKFSFPLLAILFTASYITLIYAKY

SEQ ID NO: 21846 - protein, 152 aa, Arabidopsis thaliana
  peptide (1)..(152): Ceres Seq. ID no. 12329739
MCLILFIALMRVMSIVSAQSSCTNVLISMAPCLSFITQNTSLPSQQCCNQLAHVVRYSSECLCQVLDGGGSQLGINVNETQALALPKACHVQTPPASRCHSGSSVNSHSEHGNGSKTIPREKSSSDGSIKFSFPLLAILFTASYITLIYAKY

SEQ ID NO: 21847 - DNA, 1004 bp, Arabidopsis thaliana
  misc_feature (1)..(1004): Ceres Seq. ID no. 13487085
  misc_feature (1)..(1004): Ortholog of  Ceres SEQ ID NO 13595263 as cited in SEQ ID NO 56712
  misc_feature (1)..(1004): Ortholog of  Ceres SEQ ID NO 13655622 as cited in SEQ ID NO 64213
tgggggaagaaaatttacagtgttgaaattggttaaaccctgacactagcaccttcctcagtcgcatcaccaccatgtcagagcgcgaccgccgcgaacgagagagggataaggaccgtgaaccagaccgtgatagacgccgaggtagagacgaccgtgaccgtgaccgtgatcgagaccgggaaagagatagagagcgcgaccgtgaccgagggcttagaaacaaaaaatcccgatctcgtactccagaccaccacgctcgtgctcgccacgtgcgctctccggagaggtatcgctctcgttcccgctcgattgaccgtgaccgggaccgggaccgtcaacgacaccacaggcgcaggtctccttctccagatgctccgtcgcgaaaacggcctcgccagggttcagtagacgatgagaaagaaaggaatcgcaaaagagtagtgactgattccgttgacgagaatgcgtctactattactaagaagaaggataaacaaccaagtgatgctgctgataatggcggaggcgaagatgaagaaggaatggatgtgaatgagattgagatgatgaagatgttagggattcctactggatttgattccacaaaaggcaaaccagttgctggtgctgatgttagtggtattagagctgtaactaagcgtcagccaagacagtacatgaaccgtcgcggtggatttaaccgtcctctaccggccgagcgtaatcgctagtcttctcaaggtccctctaacgctgtcttgaacactagtcaaaaagatgagggctagagctgcatttcccagatagtagttactagttactccaattcttccccagactctgttctgatgtcttatagagaacaaacttgtactctctgaatttggttggaaacaactcgtgagttatttctttttcgagatttaaaaatgttaatgtttgtgtgtaatctcccggctctaactgtcagactatggttcatttgaaatcaggcttattct

SEQ ID NO: 21848 - protein, 219 aa, Arabidopsis thaliana
  peptide (1)..(219): Ceres Seq. ID no. 13487086
MSERDRRERERDKDREPDRDRRRGRDDRDRDRDRDRERDRERDRDRGLRNKKSRSRTPDHHARARHVRSPERYRSRSRSIDRDRDRDRQRHHRRRSPSPDAPSRKRPRQGSVDDEKERNRKRVVTDSVDENASTITKKKDKQPSDAADNGGGEDEEGMDVNEIEMMKMLGIPTGFDSTKGKPVAGADVSGIRAVTKRQPRQYMNRRGGFNRPLPAERNR

SEQ ID NO: 21849 - DNA, 1287 bp, Arabidopsis thaliana
  misc_feature (1)..(1287): Ceres Seq. ID no. 12338075
  misc_feature (1)..(1287): Ortholog of  Ceres SEQ ID NO 13596433 as cited in SEQ ID NO 68721
  misc_feature (1)..(1287): Ortholog of  Ceres SEQ ID NO 13599169 as cited in SEQ ID NO 0
acaaagttttcgtttttagggttctctcatcgatctcggtttgtgatcttcttcttcatcaatggcgtctagtgataaacaaacaagcccaaagcctccaccttcaccgtctcctctccgtaattccaagttttgtcagtcaaatatgagaattttgatctcaggaggagctggattcattggctctcaccttgttgataagctgatggaaaacgaaaagaatgaggtgattgttgctgataactatttcaccggttcaaaggacaatctcaagaagtggattggtcatccgagatttgagcttatccgtcatgatgtcacagagccacttctgatcgaggttgatcagatttaccatcttgcatgtcctgcttctcctatcttctacaagtacaaccctgtgaagacaatcaagaccaatgtcattggcacactgaacatgctaggtcttgccaagcgtgttggagcaaggattttgcttacctcaacctcggaggtatatggagatcctcttatccatccccagcccgagagctattggggaaatgtcaacccaattggtgttaggagctgttatgatgaaggcaagcgtgttgctgagaccttgatgtttgactaccacaggcagcatggaattgaaatccgcattgccagaatcttcaacacttatggtccacgcatgaacattgatgatggacgtgttgtaagcaacttcattgctcaagcactccgtggtgaggcattgactgttcagaaaccagggacacagactcgcagtttctgttatgtatctgacatggttgatggacttatgcgcctcatggaaggagatgacactggtcccatcaacatcggtaacccaggtgagtttacaatggtggagttggctgagacagtgaaagagctgattaacccgagcatagagataaagatggttgagaacacaccggatgatccaagacagaggaagccagacatcacaaaggctaaagaagttttgggatgggaaccaaaggtgaagcttcgtgaaggcctgccccttatggaagaagacttcaggctaaggctcggagtccacaagaactaaaactccatcaccgatgatcacacgcaaacgtgaatgcactacataacccagttctacacttttcatattccttggtgcaagtggtttgtttcataaaatatgtttctactttccacagtcagaaattattcctagagaaaaataaagattatgaacgaatgctttttatatttaaggaagataaaaattactttcttgcc

SEQ ID NO: 21850 - protein, 341 aa, Arabidopsis thaliana
  peptide (1)..(341): Ceres Seq. ID no. 12338076
MASSDKQTSPKPPPSPSPLRNSKFCQSNMRILISGGAGFIGSHLVDKLMENEKNEVIVADNYFTGSKDNLKKWIGHPRFELIRHDVTEPLLIEVDQIYHLACPASPIFYKYNPVKTIKTNVIGTLNMLGLAKRVGARILLTSTSEVYGDPLIHPQPESYWGNVNPIGVRSCYDEGKRVAETLMFDYHRQHGIEIRIARIFNTYGPRMNIDDGRVVSNFIAQALRGEALTVQKPGTQTRSFCYVSDMVDGLMRLMEGDDTGPINIGNPGEFTMVELAETVKELINPSIEIKMVENTPDDPRQRKPDITKAKEVLGWEPKVKLREGLPLMEEDFRLRLGVHKN

SEQ ID NO: 21851 - protein, 313 aa, Arabidopsis thaliana
  peptide (1)..(313): Ceres Seq. ID no. 12338077
MRILISGGAGFIGSHLVDKLMENEKNEVIVADNYFTGSKDNLKKWIGHPRFELIRHDVTEPLLIEVDQIYHLACPASPIFYKYNPVKTIKTNVIGTLNMLGLAKRVGARILLTSTSEVYGDPLIHPQPESYWGNVNPIGVRSCYDEGKRVAETLMFDYHRQHGIEIRIARIFNTYGPRMNIDDGRVVSNFIAQALRGEALTVQKPGTQTRSFCYVSDMVDGLMRLMEGDDTGPINIGNPGEFTMVELAETVKELINPSIEIKMVENTPDDPRQRKPDITKAKEVLGWEPKVKLREGLPLMEEDFRLRLGVHKN

SEQ ID NO: 21852 - protein, 293 aa, Arabidopsis thaliana
  peptide (1)..(293): Ceres Seq. ID no. 12338078
MENEKNEVIVADNYFTGSKDNLKKWIGHPRFELIRHDVTEPLLIEVDQIYHLACPASPIFYKYNPVKTIKTNVIGTLNMLGLAKRVGARILLTSTSEVYGDPLIHPQPESYWGNVNPIGVRSCYDEGKRVAETLMFDYHRQHGIEIRIARIFNTYGPRMNIDDGRVVSNFIAQALRGEALTVQKPGTQTRSFCYVSDMVDGLMRLMEGDDTGPINIGNPGEFTMVELAETVKELINPSIEIKMVENTPDDPRQRKPDITKAKEVLGWEPKVKLREGLPLMEEDFRLRLGVHKN

SEQ ID NO: 21853 - DNA, 782 bp, Arabidopsis thaliana
  misc_feature (1)..(782): Ceres Seq. ID no. 12330117
  misc_feature (1)..(782): Ortholog of  Ceres SEQ ID NO 13583898 as cited in SEQ ID NO 63147
ttaacttcggtttagaaaaaaaaaaggagacgtcgtcgtcttctagcttctgattaagtctgataaattatgcccctaaatctgtaattctccaaggattcggattcgatcgatgaaagcttctcaagttttggcggctgcagcggcgagggttggaccggcgttaaggaagcaagtattaaccttaacggacgaagctgcttctagggttcaccatctcttgcaacagcgtcaaaaaccttttctccgattaggcgttaaggctcgtggctgcaacggcttgtcgtacactctcaattacgccgatgagaaaggtaaatttgacgagttggtagaagagaaaggtgtgaggatccttgttgaaccaaaggccttaatgcatgtgattggaacaaagatggattttgtagatgataaactcagatcagagtttgtgtttatcaatcctaactcacaaggacaatgcgggtgtggtgaatcgtttatgacaacatctacctctagtgctaagcagagtgctagttaacacacagtgatgcgtttacatttgtgattacactcatatattatactgttactggaattggcgttaatgagaaacaaatactttttaataagaattgagttttatgtttgtgcgctactttcaggcattagattggtcactttattgcatatacacattagaagctcatgttgttgcttagagatatttctgaagctatgtatttagtggaacggataatcttgagattaattaatgtattccttatccccaaagt

SEQ ID NO: 21854 - protein, 137 aa, Arabidopsis thaliana
  peptide (1)..(137): Ceres Seq. ID no. 12330118
MKASQVLAAAAARVGPALRKQVLTLTDEAASRVHHLLQQRQKPFLRLGVKARGCNGLSYTLNYADEKGKFDELVEEKGVRILVEPKALMHVIGTKMDFVDDKLRSEFVFINPNSQGQCGCGESFMTTSTSSAKQSAS

SEQ ID NO: 21855 - DNA, 867 bp, Arabidopsis thaliana
  misc_feature (1)..(867): Ceres Seq. ID no. 4998681
  misc_feature (1)..(867): Ortholog of  Ceres SEQ ID NO 12618524 as cited in SEQ ID NO 64447
agacagaaattagggttcattcatacatactcaaaaattaatagacgggaatggaactagagttcaagtgttccgatgttggagtatggaaggaggctctgtcttcgtacgattcccgaatcgaatcactgaacaaaccagaactcgtctctctcgaccaattctaccgcatcaaactcccttgtcttcttcacgaccgagaccctaacccttacctcactacttccgagctttctcaactcatgaaatggaagctctctcgtggaaaatggcggccgcgtctgctggacttcgtgtcgtctctagacgattcagtggtgaaatctgcttctgagaaagcttttaaatcgcttcctgacatctccaaggctgtgaaagagctcactgtgcttaagggcgttggtgctgccaccgcatccgccgttcttgctgcttacgcccctgacattgcaccatttatgtccgacgaggcaatggaggtggctcttgggaactcaaaggattactctttgaaacaatacttgttgtttgcaactaagctacaagataaagcaaaggaattaaagttgaagggagagtgggatgggccttcagatattgaaagagctctatggagttgtactgtgcgtgcaaagtcacagccagagaagagctcttccgggaagaaaagaaaacggtaggtgataatatttctatccagttcaccttccatccatttttaagatcaaccatatgtcagcagctcttctggaagtcatatccgtaattgttcaactgtagtaagtgttctcgaatgttttatcaaaatgctgagtatttagcggaatcatataacttgaagggaaaaaatggatactttacattttc

SEQ ID NO: 21856 - protein, 209 aa, Arabidopsis thaliana
  peptide (1)..(209): Ceres Seq. ID no. 4998682
MELEFKCSDVGVWKEALSSYDSRIESLNKPELVSLDQFYRIKLPCLLHDRDPNPYLTTSELSQLMKWKLSRGKWRPRLLDFVSSLDDSVVKSASEKAFKSLPDISKAVKELTVLKGVGAATASAVLAAYAPDIAPFMSDEAMEVALGNSKDYSLKQYLLFATKLQDKAKELKLKGEWDGPSDIERALWSCTVRAKSQPEKSSSGKKRKR

SEQ ID NO: 21857 - protein, 145 aa, Arabidopsis thaliana
  peptide (1)..(145): Ceres Seq. ID no. 4998683
MKWKLSRGKWRPRLLDFVSSLDDSVVKSASEKAFKSLPDISKAVKELTVLKGVGAATASAVLAAYAPDIAPFMSDEAMEVALGNSKDYSLKQYLLFATKLQDKAKELKLKGEWDGPSDIERALWSCTVRAKSQPEKSSSGKKRKR

SEQ ID NO: 21858 - DNA, 728 bp, Arabidopsis thaliana
  misc_feature (1)..(728): Ceres Seq. ID no. 13496884
  misc_feature (1)..(728): Ortholog of  Ceres SEQ ID NO 13596404 as cited in SEQ ID NO 61966
aacgttcccttcgttgttcatcggaatccctagaacactcgatttcagcaaaatcaaatcggattcagtgatcaaaagtcaatttggtcgagaagaaattgagcgttgaagatgacggaggcgatgataagaaataagccaggaatggcgagtgtgaaggatatgccgctgcttcaggatggtccgccaccgggtgggttcgcaccggtccgatatgcccgccggatatccaatacgggtcctagtgcaatggccatgttccttgccgtttctggtgcctttgcttggggaatgtaccaggtcggccagggaaacaaaatccgcagggcattgaaggaagagaaatatgctgctcgtagaacaatacttcccattcttcaagcagaagaagatgaaaggtttgtgtctgagtggaaaaagtatctggaatatgaggctgatgtaatgaaagatgttccgggatggaaagttggcgagaatgtgtacaattctggtcgctggatgcctccggctactggggaactccgtcctgatgtgtggtgatttcctagtttctctcaaatgcatatgatgatgatgaatgatgtttcgctgaggattgatatgttcttgttatatctttttttcttcgggtaataagagaatgattcaacagacagtattcttcttgtattggttttctcttaagtgtttcaatcgtaatatgaggcaaaaacagtttcatgatt

SEQ ID NO: 21859 - protein, 143 aa, Arabidopsis thaliana
  peptide (1)..(143): Ceres Seq. ID no. 13496885
MTEAMIRNKPGMASVKDMPLLQDGPPPGGFAPVRYARRISNTGPSAMAMFLAVSGAFAWGMYQVGQGNKIRRALKEEKYAARRTILPILQAEEDERFVSEWKKYLEYEADVMKDVPGWKVGENVYNSGRWMPPATGELRPDVW

SEQ ID NO: 21860 - protein, 139 aa, Arabidopsis thaliana
  peptide (1)..(139): Ceres Seq. ID no. 13496886
MIRNKPGMASVKDMPLLQDGPPPGGFAPVRYARRISNTGPSAMAMFLAVSGAFAWGMYQVGQGNKIRRALKEEKYAARRTILPILQAEEDERFVSEWKKYLEYEADVMKDVPGWKVGENVYNSGRWMPPATGELRPDVW

SEQ ID NO: 21861 - protein, 132 aa, Arabidopsis thaliana
  peptide (1)..(132): Ceres Seq. ID no. 13496887
MASVKDMPLLQDGPPPGGFAPVRYARRISNTGPSAMAMFLAVSGAFAWGMYQVGQGNKIRRALKEEKYAARRTILPILQAEEDERFVSEWKKYLEYEADVMKDVPGWKVGENVYNSGRWMPPATGELRPDVW

SEQ ID NO: 21862 - DNA, 577 bp, Arabidopsis thaliana
  misc_feature (1)..(577): Ceres Seq. ID no. 12339058
  misc_feature (1)..(577): Ortholog of  Ceres SEQ ID NO 14301686 as cited in SEQ ID NO 61373
  misc_feature (1)..(577): Ortholog of  Ceres SEQ ID NO 15173983 as cited in SEQ ID NO 0
aatcacaatcaataaacctcaaaccctaaaataaattaaacgagttctacgtaagaaggagagagagaagaatgggtcgccaaaacattgtcgtcgtggttgccctcgtcttcatggccatccttggccttgccgcagctgcctcctctccatctccttcagcgtctccctccaaagctccagctgcctccaaaaccgatcatgtcgaggctccagtcaccgatgaccaaatcggaaccaccgatgacgatgcagctcctactcctggtgacggtgacgttgcagtggctggtcctctaggaagtgactcctcgtacgacaatgcgcctacaggctctgctgattctgccaaaagcggtgcggcagctcttggcgtctctgcggtcgtcgttggtgttacatccattgctggttctttcttgttactctaagttgggcattgttttatgataagaaggttattttaaacgaagattatttatatgtaatgatgattgtgatgatcttgttgtaatttgtttctcctttgttaggagaaacgttgtctttgtaataatactgaaaaaaaaaacttttc

SEQ ID NO: 21863 - protein, 119 aa, Arabidopsis thaliana
  peptide (1)..(119): Ceres Seq. ID no. 12339059
MGRQNIVVVVALVFMAILGLAAAASSPSPSASPSKAPAASKTDHVEAPVTDDQIGTTDDDAAPTPGDGDVAVAGPLGSDSSYDNAPTGSADSAKSGAAALGVSAVVVGVTSIAGSFLLL

SEQ ID NO: 21864 - protein, 105 aa, Arabidopsis thaliana
  peptide (1)..(105): Ceres Seq. ID no. 12339060
MAILGLAAAASSPSPSASPSKAPAASKTDHVEAPVTDDQIGTTDDDAAPTPGDGDVAVAGPLGSDSSYDNAPTGSADSAKSGAAALGVSAVVVGVTSIAGSFLLL

SEQ ID NO: 21865 - DNA, 974 bp, Arabidopsis thaliana
  misc_feature (1)..(974): Ceres Seq. ID no. 13489807
  misc_feature (1)..(974): Ortholog of  Ceres SEQ ID NO 13638599 as cited in SEQ ID NO 51866
ataaatgctcttctcctccgatctctccgccataaaatctactctttcttcttctgggtgttcaaagaattagtcgttctcgcgtattcactttccatggcgggctttctctccgttgtccggcgcgtgtacctcactctctacaattggatcgtctttgctggatgggctcaggttttgtacttagcgataacgacgttgaaggaaacgggttatgagaatgtctatgacgccattgagaagcctctccagcttgctcagactgccgccgttctcgagattcttcatggattagtaggtttggtcagatctcctgtttctgcaactctgccacagataggttcaaggctatttctcacttggggcatcctatacagttttccagaggtccgatctcattttcttgttacgtcgctggtcataagctggtctatcacagagattattcgctactcattcttcggctttaaggaagctctaggctttgcaccttcatggcacttgtggctcagatacagcagctttttattgctataccctaccggtatcaccagcgaagttggtcttatctaccttgccttaccacacatcaagacatcggagatgtacagcgttaggatgcctaacatattgaacttctcatttgacttcttctatgcaacgatactcgtccttgcaatctatgtcccaggtagcccacacatgtacaggtacatgcttggtcagcgaaagagagctctctccaaatccaagagggaataaaagaaaagatttagaaagagacgaaaaagctcatcaactgttttctcctcttgtcttgttcgttcatgtactactagtctactactacaacttgtcttttgtttagcttgtttgagcttttacttcctcggcgattacttgaacttacatgcagcaggatactattaagtgtaatgtggtttctaaattaataagaaaatcattggttcctt

SEQ ID NO: 21866 - protein, 253 aa, Arabidopsis thaliana
  peptide (1)..(253): Ceres Seq. ID no. 13489808
INALLLRSLRHKIYSFFFWVFKELVVLAYSLSMAGFLSVVRRVYLTLYNWIVFAGWAQVLYLAITTLKETGYENVYDAIEKPLQLAQTAAVLEILHGLVGLVRSPVSATLPQIGSRLFLTWGILYSFPEVRSHFLVTSLVISWSITEIIRYSFFGFKEALGFAPSWHLWLRYSSFLLLYPTGITSEVGLIYLALPHIKTSEMYSVRMPNILNFSFDFFYATILVLAIYVPGSPHMYRYMLGQRKRALSKSKRE

SEQ ID NO: 21867 - protein, 221 aa, Arabidopsis thaliana
  peptide (1)..(221): Ceres Seq. ID no. 13489809
MAGFLSVVRRVYLTLYNWIVFAGWAQVLYLAITTLKETGYENVYDAIEKPLQLAQTAAVLEILHGLVGLVRSPVSATLPQIGSRLFLTWGILYSFPEVRSHFLVTSLVISWSITEIIRYSFFGFKEALGFAPSWHLWLRYSSFLLLYPTGITSEVGLIYLALPHIKTSEMYSVRMPNILNFSFDFFYATILVLAIYVPGSPHMYRYMLGQRKRALSKSKRE

SEQ ID NO: 21868 - DNA, 1039 bp, Arabidopsis thaliana
  misc_feature (1)..(1039): Ceres Seq. ID no. 13496997
  misc_feature (1)..(1039): Ortholog of  Ceres SEQ ID NO 13590233 as cited in SEQ ID NO 64652
actctctctcttttcctctttgcaaatccttgaagaaatccaaaatccatagcaatggcgacttcgatagctcgattgtctcggagaggagtcacttctaacctgatccgtcgttgcttcgctgcggaagcggcgttggcgaggaagacagagttacctaaaccgcaattcacggtgtcgccgtcgacggatcgtgtgaaatgggactacagaggccaacgacagatcattcctttgggacagtggcttccgaaggtagccgttgatgcttacgtggcacccaacgttgtgctggctggtcaggtcacagtctgggacggctcgtctgtttggaacggtgccgttttgcgcggcgatctcaacaaaatcactgttggattctgctcgaatgtacagggacggtgtgttgttcatgccgcctggtcttccccaacaggattaccagcagcgacaataatcgacaggtatgtgacagtaggtgcctacagtcttctgagatcatgtaccatcgaaccagagtgcatcatcggtcaacactcaatactaatggaaggctcactggttgagacccggtcaatcttggaagcgggttcagttgtgccgccaggaagaaggatcccatcaggtgaactatggggaggcaatccagcaagattcattagaaccctaaccaacgaagaaaccctagagatcccaaaactcgctgtagccatcaaccacttaagcggagattacttctctgagttcctaccttactcaactgtctacttagaggtagagaagttcaagaagtcccttgggatcgccgtttagaagcttcatctttttcgtgattcactttcatgtgtttatctatcatatgaggtctttctctctgcatattgcaataagtagctgatgaacatcaaaacaagtccggctctcttttttggttctaaaacgtttgtcatttcgttttttgggttctttgtaaaattccatttaaaactgattttggctgaatattgtctgaatgataatggcgacgacttctggtttt

SEQ ID NO: 21869 - protein, 252 aa, Arabidopsis thaliana
  peptide (1)..(252): Ceres Seq. ID no. 13496998
MATSIARLSRRGVTSNLIRRCFAAEAALARKTELPKPQFTVSPSTDRVKWDYRGQRQIIPLGQWLPKVAVDAYVAPNVVLAGQVTVWDGSSVWNGAVLRGDLNKITVGFCSNVQGRCVVHAAWSSPTGLPAATIIDRYVTVGAYSLLRSCTIEPECIIGQHSILMEGSLVETRSILEAGSVVPPGRRIPSGELWGGNPARFIRTLTNEETLEIPKLAVAINHLSGDYFSEFLPYSTVYLEVEKFKKSLGIAV

SEQ ID NO: 21870 - DNA, 570 bp, Arabidopsis thaliana
  misc_feature (1)..(570): Ceres Seq. ID no. 12393486
  misc_feature (1)..(570): Ortholog of  Ceres SEQ ID NO 12783998 as cited in SEQ ID NO 61535
acgcgtctctcaattctcacattctcaaaatcactaaaatcaaactcaattttcatcaaatatctctaatggcgccgaaagcagcggagaagaaaccggcagagaagaaaccagccggtaaagctccggcggagaaactcccaaaggcggagaagaaaatcagcaaagacgccggaggaagcgagaagaagaagaagaaatcgaagaagagcgtcgagacttacaagatctacatcttcaaggttctgaaacaagttcatccagatgttggaatctctgggaaagctatggggattatgaacagtttcatcaatgacatcttcgagaaacttgctcaggaatcgtcaaagctcgctaggtacaataagaagccgacgattacatcgagggagattcaaaccgctgtgagacttgtgttgcctggagaactcgctaaacatgcggtttctgaaggcacgaaggcggttaccaaattcaccagttagggttttcctgtaaatttccggttaagtgtttggtttagactcggtttgtttagatgttttgagtttcgtgaattgtttgatgatc

SEQ ID NO: 21871 - protein, 160 aa, Arabidopsis thaliana
  peptide (1)..(160): Ceres Seq. ID no. 12393487
ASLNSHILKITKIKLNFHQISLMAPKAAEKKPAEKKPAGKAPAEKLPKAEKKISKDAGGSEKKKKKSKKSVETYKIYIFKVLKQVHPDVGISGKAMGIMNSFINDIFEKLAQESSKLARYNKKPTITSREIQTAVRLVLPGELAKHAVSEGTKAVTKFTS

SEQ ID NO: 21872 - protein, 138 aa, Arabidopsis thaliana
  peptide (1)..(138): Ceres Seq. ID no. 12393488
MAPKAAEKKPAEKKPAGKAPAEKLPKAEKKISKDAGGSEKKKKKSKKSVETYKIYIFKVLKQVHPDVGISGKAMGIMNSFINDIFEKLAQESSKLARYNKKPTITSREIQTAVRLVLPGELAKHAVSEGTKAVTKFTS

SEQ ID NO: 21873 - DNA, 2021 bp, Arabidopsis thaliana
  misc_feature (1)..(2021): Ceres Seq. ID no. 13491821
  misc_feature (1)..(2021): Ortholog of  Ceres SEQ ID NO 14308413 as cited in SEQ ID NO 55196
aagcaaattcactgatggatacacaaatcctccagggtaactagaggtgggtcatcagatctctagggtcttctcattcttcattcccagatccgtagaatagaaaatgtttggccgatctgcgattcgtggaggaggattccgtgcagagaatctaggtcaaaacgcacttaccttaatcggtaacataggcttctcactcttcgtcttcggagtactaatcttcaccataatcgccgcaacttacgaaccagaagatcctctcttccacccatctgacaaaatcacaactttcctcacttccacatcaaacgctacacttagatccgatgactccgttgttaaaaccggtgaagatttcatgctcgctaaccaaaccgcatttgcagagtttatcaacataaacgatgttgaagccagcaccaatgagactactacagaggaagagggtaacaagttggaatgtgatgtgaatactccaattgattgcaaagatcagcaagtgtttcatcttatgatgagagctactattgacaagtttaaagatattcacttttataagtttggtaagcctgttactggcgaagaaggtgtgaattcttgtgatatggcgtggcgttataggcctagagatgggaagagtgctgctttttataaggattataggaggtttgttgttgctaagtctgagaattgtagtgtgagtgttgttgggattggtgagtatcattcgggtttgaatgcgaggaagaggaagaagaatcagaaagctgggtttgagaaaactggtgggaagaaagatgatttctctttgcctgttgttggtgaacttgtgaatgattctcttcctatggttgagtctgatagtgtgtttaagactggcaagtatttggtttatgttggtggtggagataggtgtaagagtatgaatcattttctgtggagtttcttgtgtgctcttggggaagctcagtatttgaataggactctagtgatggatttgaccttgtgtttgtcttctatctatacttcgtctggtcagaatgaggaaggcaaggatttcaggttttactttgatttcgagcatttgaaagaagctgcttctgtgttggatgaagctcagttttgggctcagtgggggaaattgcgtaagaagagaagaaatagattgaaccttcatctcgtggaggattttagggtcactcccatgaagctcgcggctgtcaaagatacgttgataatgaggaagtttggatctgtagaaccagacaattattggtacagggtttgtgaaggagatgcagaatctgttgttaaacgaccgtggcatctgttatggaaatcaagaaggttgatggaaatcgtctctgctattgcatcaaggttaaactgggactacgatgctgtacacattgagagaggagagaaagcaagaaacaaggaggtttggcctaatcttgaagcggatacttccccgagcgctctcttgtcgaccttgcaggacaaagttgaagaaggaaggcatctctacatcgcaacaaatgaaggagaattatccttcttcaaccctttgaaagataagtacgccactcatttcctttacgactacaaagatctttgggatgagagcagtgagtggtattcagagactactaagcttaatggaggcaacccggtcgaatttgatggttacatgagagcatctgttgacacagaagtattcttgagagggaagaagcagattgaaacattcaacgatcttacaaacgattgtaaagatggagttgggacctgcaatgctgcaacttcctgatctctgtcatattcctcatttatttgttgtttgaatcgtcttgtaccacttgtttccagttttgtattgtagaatagctttgtattttccattactgttgttttgtctcagtgacttttagactaatatatgtcctagtttggttctatttctttggaatgcaaaatcttgggaagaagatgatattgatacacaaaaattgattcgg

SEQ ID NO: 21874 - protein, 568 aa, Arabidopsis thaliana
  peptide (1)..(568): Ceres Seq. ID no. 13491822
MFGRSAIRGGGFRAENLGQNALTLIGNIGFSLFVFGVLIFTIIAATYEPEDPLFHPSDKITTFLTSTSNATLRSDDSVVKTGEDFMLANQTAFAEFININDVEASTNETTTEEEGNKLECDVNTPIDCKDQQVFHLMMRATIDKFKDIHFYKFGKPVTGEEGVNSCDMAWRYRPRDGKSAAFYKDYRRFVVAKSENCSVSVVGIGEYHSGLNARKRKKNQKAGFEKTGGKKDDFSLPVVGELVNDSLPMVESDSVFKTGKYLVYVGGGDRCKSMNHFLWSFLCALGEAQYLNRTLVMDLTLCLSSIYTSSGQNEEGKDFRFYFDFEHLKEAASVLDEAQFWAQWGKLRKKRRNRLNLHLVEDFRVTPMKLAAVKDTLIMRKFGSVEPDNYWYRVCEGDAESVVKRPWHLLWKSRRLMEIVSAIASRLNWDYDAVHIERGEKARNKEVWPNLEADTSPSALLSTLQDKVEEGRHLYIATNEGELSFFNPLKDKYATHFLYDYKDLWDESSEWYSETTKLNGGNPVEFDGYMRASVDTEVFLRGKKQIETFNDLTNDCKDGVGTCNAATS

SEQ ID NO: 21875 - protein, 483 aa, Arabidopsis thaliana
  peptide (1)..(483): Ceres Seq. ID no. 13491823
MLANQTAFAEFININDVEASTNETTTEEEGNKLECDVNTPIDCKDQQVFHLMMRATIDKFKDIHFYKFGKPVTGEEGVNSCDMAWRYRPRDGKSAAFYKDYRRFVVAKSENCSVSVVGIGEYHSGLNARKRKKNQKAGFEKTGGKKDDFSLPVVGELVNDSLPMVESDSVFKTGKYLVYVGGGDRCKSMNHFLWSFLCALGEAQYLNRTLVMDLTLCLSSIYTSSGQNEEGKDFRFYFDFEHLKEAASVLDEAQFWAQWGKLRKKRRNRLNLHLVEDFRVTPMKLAAVKDTLIMRKFGSVEPDNYWYRVCEGDAESVVKRPWHLLWKSRRLMEIVSAIASRLNWDYDAVHIERGEKARNKEVWPNLEADTSPSALLSTLQDKVEEGRHLYIATNEGELSFFNPLKDKYATHFLYDYKDLWDESSEWYSETTKLNGGNPVEFDGYMRASVDTEVFLRGKKQIETFNDLTNDCKDGVGTCNAATS

SEQ ID NO: 21876 - protein, 432 aa, Arabidopsis thaliana
  peptide (1)..(432): Ceres Seq. ID no. 13491824
MMRATIDKFKDIHFYKFGKPVTGEEGVNSCDMAWRYRPRDGKSAAFYKDYRRFVVAKSENCSVSVVGIGEYHSGLNARKRKKNQKAGFEKTGGKKDDFSLPVVGELVNDSLPMVESDSVFKTGKYLVYVGGGDRCKSMNHFLWSFLCALGEAQYLNRTLVMDLTLCLSSIYTSSGQNEEGKDFRFYFDFEHLKEAASVLDEAQFWAQWGKLRKKRRNRLNLHLVEDFRVTPMKLAAVKDTLIMRKFGSVEPDNYWYRVCEGDAESVVKRPWHLLWKSRRLMEIVSAIASRLNWDYDAVHIERGEKARNKEVWPNLEADTSPSALLSTLQDKVEEGRHLYIATNEGELSFFNPLKDKYATHFLYDYKDLWDESSEWYSETTKLNGGNPVEFDGYMRASVDTEVFLRGKKQIETFNDLTNDCKDGVGTCNAATS

SEQ ID NO: 21877 - DNA, 883 bp, Arabidopsis thaliana
  misc_feature (1)..(883): Ceres Seq. ID no. 12393911
  misc_feature (1)..(883): Ortholog of  Ceres SEQ ID NO 12613614 as cited in SEQ ID NO 68243
  misc_feature (1)..(883): Ortholog of  Ceres SEQ ID NO 12556636 as cited in SEQ ID NO 0
  misc_feature (1)..(883): Ortholog of  Ceres SEQ ID NO 13600066 as cited in SEQ ID NO 0
  misc_feature (1)..(883): Ortholog of  Ceres SEQ ID NO 15179946 as cited in SEQ ID NO 0
ataaatctagggctttcttctagagatcgaagaagaagagttcacatagagagattttgttcgtttcgagattttcttcagtcccaatggcgtcaaacaccagcaacgacaatttccagcatagaccacggcaaagaaacggaccacctcctccgcggcgacagggaagaaatccgccgcctccgtcttcgtcaacgcgaacttctcagaatcagccaccacagcatacgccgcaggagaagaagaaaccggtgtttgtcaaagtggatcagcttaaacctggaacgagcggccacactttgactgttaaagtcgtcgatcagaattccgtacctcagaaaccgggagctgcttcttcttctcatctccgacctgctaggatctctgagtgtcttgttggagatgagactgcttgcatcctcttcactgctcgcaacgatcaagtggaattgatgaaaccaggagctactgtgaatcttcggaatgcaaagatagatatgttcaagggatcaatgaggcttgctgttgataaatggggtcgcatcgaggccactgaaccagctgacattactgttaaagaagacaacaatctgtcccttgtggagtacgagctcgtcaatgtcgttgaggaatgatgtctgacaccccatgtctctaataggtgatatatcaagtgccacaatgaattttgttttgcggtgaacaccgttgcgggtaaaatatatttatcttatgatgttgcaagtttgctatatttatctaccagttgatttgtgttgatctcgggtttggtattcggtatgtactctttcagctgtggatgcttctgtaacctctctacttttgtatggtctttaaagagaaggttaatgaaaaaattggt

SEQ ID NO: 21878 - protein, 182 aa, Arabidopsis thaliana
  peptide (1)..(182): Ceres Seq. ID no. 12393912
MASNTSNDNFQHRPRQRNGPPPPRRQGRNPPPPSSSTRTSQNQPPQHTPQEKKKPVFVKVDQLKPGTSGHTLTVKVVDQNSVPQKPGAASSSHLRPARISECLVGDETACILFTARNDQVELMKPGATVNLRNAKIDMFKGSMRLAVDKWGRIEATEPADITVKEDNNLSLVEYELVNVVEE

SEQ ID NO: 21879 - protein, 100 aa, Arabidopsis thaliana
  peptide (1)..(100): Ceres Seq. ID no. 12393913
INLGLSSRDRRRRVHIERFCSFRDFLQSQWRQTPATTISSIDHGKETDHLLRGDREEIRRLRLRQRELLRISHHSIRRRRRRNRCLSKWISLNLERAATL

SEQ ID NO: 21880 - DNA, 923 bp, Arabidopsis thaliana
  misc_feature (1)..(923): Ceres Seq. ID no. 12332684
  misc_feature (1)..(923): Ortholog of  Ceres SEQ ID NO 13593410 as cited in SEQ ID NO 20366
aaagcctttttagttctattgacaatggcgacgaagctgatttctccgccgttgtcttgtccgtgggttacttcaagagaggtgataatcaaagggcttccacggcggagaagagaatggatggtcacgaagagaaacagagtctctgctgtcacggccatgattgtggagccactttctgttgtttcttcttcagcaattcagattcatcaatggtgggaacaaaaccctaattcgttactgttaatgacggaggctactggtggttattcgttggctagctattatacgtctttgggtttgtttgttatctctgttcctggtctttggtctctaatcaaacgctctgttaaatcaaagatagtgagaaagacgtttgttgttaatgacgtcaagaaggagccaaagcaagtagctggagagattctatctttcttcacaaggaagaatttcaatatcactgatcgtggagaaacaatcacatttgaaggaaagatggttccaagtagaggacaagctgctctgcttacgttttgtacatgtataagcttagcaagtgttggtcttgtcttaaccattacagttcctgattttggaaacaattggttcttcatcattctccttagtccactcgcaggagtgtattactggaaaaaggcgtcgaggaaagaggagataaaagtgaagatgatggtgggatcaaaagggagattggatgagattgtggttcaaggagatgatgttcaggtcgaagaaatgaggaaagagcttcagcttaatgagaaaggcatggtttatgtcaaaggtctctttgagagatcatcataatgataacattttagcctcccatttttgccttttggggaatgtgtctatacttgttttattaaggttgagattaatgactttttaactcatttccc

SEQ ID NO: 21881 - protein, 275 aa, Arabidopsis thaliana
  peptide (1)..(275): Ceres Seq. ID no. 12332685
KAFLVLLTMATKLISPPLSCPWVTSREVIIKGLPRRRREWMVTKRNRVSAVTAMIVEPLSVVSSSAIQIHQWWEQNPNSLLLMTEATGGYSLASYYTSLGLFVISVPGLWSLIKRSVKSKIVRKTFVVNDVKKEPKQVAGEILSFFTRKNFNITDRGETITFEGKMVPSRGQAALLTFCTCISLASVGLVLTITVPDFGNNWFFIILLSPLAGVYYWKKASRKEEIKVKMMVGSKGRLDEIVVQGDDVQVEEMRKELQLNEKGMVYVKGLFERSS

SEQ ID NO: 21882 - protein, 267 aa, Arabidopsis thaliana
  peptide (1)..(267): Ceres Seq. ID no. 12332686
MATKLISPPLSCPWVTSREVIIKGLPRRRREWMVTKRNRVSAVTAMIVEPLSVVSSSAIQIHQWWEQNPNSLLLMTEATGGYSLASYYTSLGLFVISVPGLWSLIKRSVKSKIVRKTFVVNDVKKEPKQVAGEILSFFTRKNFNITDRGETITFEGKMVPSRGQAALLTFCTCISLASVGLVLTITVPDFGNNWFFIILLSPLAGVYYWKKASRKEEIKVKMMVGSKGRLDEIVVQGDDVQVEEMRKELQLNEKGMVYVKGLFERSS

SEQ ID NO: 21883 - protein, 235 aa, Arabidopsis thaliana; identical to SEQ ID NO: 20367
  peptide (1)..(235): Ceres Seq. ID no. 12332687

SEQ ID NO: 21884 - DNA, 823 bp, Arabidopsis thaliana
  misc_feature (1)..(823): Ceres Seq. ID no. 12337238
  misc_feature (1)..(823): Ortholog of  Ceres SEQ ID NO 14307709 as cited in SEQ ID NO 59484
  misc_feature (1)..(823): Ortholog of  Ceres SEQ ID NO 13598153 as cited in SEQ ID NO 61562
aaaagaaacaaattgttggaatctcaattctcgaatctgagatctcggagaagagatatggcgacagagtcatcggaatcggaagaagaaggaaagattagtggaggaaactataagctaatcatagacgacgatctaagagagatgggtaaaaacgcagcttggagcgttagctcttgtaagcccggcaatggcgtcaccactctccgcgacgacaatctcgagacttattggcaatcagatgggttacaaccacatttgattaacattcaattccagaagaaagtgaaactgcagttagtggttttgtacgttgactttaagcttgatgagagctatacaccaagtaaaatctctattcgagctggtgatggttttcataacttaaaggatattaaaagtgtggagcttgttaaaccaactggttgggtttgcttatctctgtctggaactgatccacgggaaacttttgtcaatacatttatgttacaaatagccattttgtcgaatcacctcaacgggagagatactcatatccgccagatcaaagtttacggccctagaccaaatcctattccgcaccaaccttttcagtttacatcgatggagtttctcacttattcaacactgagatgagaaatttgagcaggagaagtttgaagaacatggactatgaaagatactgatgttgataccacatgaagagtctataatcagattagttattgttgttgtgtaatggcttttgtttatatattacattggatataacaatcataacttcagtaagcttatcaaccaagacccccataaaacatttgac

SEQ ID NO: 21885 - protein, 211 aa, Arabidopsis thaliana
  peptide (1)..(211): Ceres Seq. ID no. 12337239
KRNKLLESQFSNLRSRRRDMATESSESEEEGKISGGNYKLIIDDDLREMGKNAAWSVSSCKPGNGVTTLRDDNLETYWQSDGLQPHLINIQFQKKVKLQLVVLYVDFKLDESYTPSKISIRAGDGFHNLKDIKSVELVKPTGWVCLSLSGTDPRETFVNTFMLQIAILSNHLNGRDTHIRQIKVYGPRPNPIPHQPFQFTSMEFLTYSTLR

SEQ ID NO: 21886 - protein, 192 aa, Arabidopsis thaliana
  peptide (1)..(192): Ceres Seq. ID no. 12337240
MATESSESEEEGKISGGNYKLIIDDDLREMGKNAAWSVSSCKPGNGVTTLRDDNLETYWQSDGLQPHLINIQFQKKVKLQLVVLYVDFKLDESYTPSKISIRAGDGFHNLKDIKSVELVKPTGWVCLSLSGTDPRETFVNTFMLQIAILSNHLNGRDTHIRQIKVYGPRPNPIPHQPFQFTSMEFLTYSTLR

SEQ ID NO: 21887 - protein, 163 aa, Arabidopsis thaliana
  peptide (1)..(163): Ceres Seq. ID no. 12337241
MGKNAAWSVSSCKPGNGVTTLRDDNLETYWQSDGLQPHLINIQFQKKVKLQLVVLYVDFKLDESYTPSKISIRAGDGFHNLKDIKSVELVKPTGWVCLSLSGTDPRETFVNTFMLQIAILSNHLNGRDTHIRQIKVYGPRPNPIPHQPFQFTSMEFLTYSTLR

SEQ ID NO: 21888 - DNA, 670 bp, Arabidopsis thaliana
  misc_feature (1)..(670): Ceres Seq. ID no. 13646025
  misc_feature (1)..(670): Ortholog of  Ceres SEQ ID NO 12610334 as cited in SEQ ID NO 56235
  misc_feature (1)..(670): Ortholog of  Ceres SEQ ID NO 13654825 as cited in SEQ ID NO 62409
attcgcacgagaccattacctagaacatcctaatcaaaaacacacaatccaatcaaaacacacagagagaagaaaaactcagaagaaaagccaaagagtgaaacaaaaatggcgtcgacgactctctcaatcgcaacaacaatccgttcctcatcttatcctactctcgcttccatcaatcacttcccttcccgaaccaccaccatcgaattcccctctcgcttcggtggtggttcatcatccacattgacccaccgtgcaacccatctccgtccaatcgccgccgtcgaagctccggagaaaatcgagaagatcggatccgaaatctcatccctaaccctcgaagaagctcgtatcctcgtcgactatctccaagacaaattcggtgtctccccactctctttagcccccgcagcagcggcggttgctgctccagccgacggtggcgcggcggctgtagtggaagagcaaacagagttcgatgtggttatcaatgaagttcccagcagttcccgtattgcagtgattaaagctgttagggctttaactagcttggcgttgaaggaagctaaggagctaatcgaagtattaccaaagaagtttaaagaaggtatcactaaagatgaagctgaagaagctaagaagactcttgaagaagctggtgctaaag

SEQ ID NO: 21889 - protein, 187 aa, Arabidopsis thaliana
  peptide (1)..(187): Ceres Seq. ID no. 15219029
MASTTLSIATTIRSSSYPTLASINHFPSRTTTIEFPSRFGGGSSSTLTHRATHLRPIAAVEAPEKIEKIGSEISSLTLEEARILVDYLQDKFGVSPLSLAPAAAAVAAPADGGAAAVVEEQTEFDVVINEVPSSSRIAVIKAVRALTSLALKEAKELIEVLPKKFKEGITKDEAEEAKKTLEEAGAK

SEQ ID NO: 21890 - DNA, 1143 bp, Arabidopsis thaliana
  misc_feature (1)..(1143): Ceres Seq. ID no. 12422523
  misc_feature (1)..(1143): Ortholog of  Ceres SEQ ID NO 13596519 as cited in SEQ ID NO 62572
  misc_feature (1)..(1143): Ortholog of  Ceres SEQ ID NO 12625108 as cited in SEQ ID NO 68102
aaaaacatgtcagagcaatcttttgtcgcatccccacaagtcttgaaaagcggagcctgatgatcaaaaggaacccccaaaactctctcaaacgcatcacttttgtctgccacctgtgactgactgtgaggatcccaacaacacttcttgttcatggattctgggcttcagcaactcgcattgtgcctcttcttcattctctgccgcctctttcaagccactgccgaagatgactggaagatagccacagccacgctttctagagacagggacggctcctcctccgtcgctactggaggcgcttgtgggtatggagatctgaggcagagcagctttgccggctacagcgcaggcctgagcgggaagctgttcaacaggggaagcagctgcggagcttgtctagaagtgcggtgcgtgaaccacatccgttggtgtcttcaaggcagcccctccgtggtggtcaccgccaccgatttctgtcctcccaattcgggactctcctccgattacggaggttggtgcaacttcccaaaggaacacttggaactatctcatgccgccttcacagggatcgcagaaaccagagctgagatgatacctatacagtataggagggtcaagtgtgggcggagaggcgggttgagattcagcttgagcgggagctcccactttttccaggtgttgataagcaatgtgggcctcgacggggaagtggttggtgtgaaagtgaagggccacacaacggcttggatcccaatggccagaaactggggacagaactggcactcctctctcgatctcatcggacagtctctctctttcgaggttactctcaaaggcggcaaaaccattgcctcttatgatgtggctcctccgtattggcgcttcggaatgacataccaaggaaagcagttccactcctgactcctttatcttcttcaaatcatgattcactttcggtgactttattatgactttggagtcattagatatcatcacttcatttcaaggaggtataaatgactttccacgagtggctcatctttgtcttctcttttcttttttctttttatataatatatccttcacaatccttacttggaccgcatttagctgtgtgagagtatattatgcacattgttc

SEQ ID NO: 21891 - protein, 256 aa, Arabidopsis thaliana
  peptide (1)..(256): Ceres Seq. ID no. 12422524
MDSGLQQLALCLFFILCRLFQATAEDDWKIATATLSRDRDGSSSVATGGACGYGDLRQSSFAGYSAGLSGKLFNRGSSCGACLEVRCVNHIRWCLQGSPSVVVTATDFCPPNSGLSSDYGGWCNFPKEHLELSHAAFTGIAETRAEMIPIQYRRVKCGRRGGLRFSLSGSSHFFQVLISNVGLDGEVVGVKVKGHTTAWIPMARNWGQNWHSSLDLIGQSLSFEVTLKGGKTIASYDVAPPYWRFGMTYQGKQFHS

SEQ ID NO: 21892 - DNA, 2021 bp, Arabidopsis thaliana
  misc_feature (1)..(2021): Ceres Seq. ID no. 13503054
  misc_feature (1)..(2021): Ortholog of  Ceres SEQ ID NO 12593464 as cited in SEQ ID NO 69039
atcctctctcttcactcagcatccttttataaccaaaacaaactttatctccctctctctctctcacagacaagaacacaaagttatggacaatctccggaaacttaatcttctctctgtctctctaaccataatctttgtctctcttaccatagccaccaacttacctttctttgaagtgaaatatcccaacaacaacccttttgggatgttactacggccgacaccgatcaagaaccaatccttgggtctaccggctcatgtcgggtcagatgagtgtcgggtttggaccaaagcatgttctgatgagattcttaggctgacttatcagccggataacgttgcgtggcttaaacgcgttaggaggacgatccatgagaacccggagctagcgtttgaggagtatgagactagtaggcttattaggtcggagctggaccgtatgggtatcatgtatagatatccgttagcgaaaacgggtattcgggcttggatcggatccggtggaccgccttttgttgcggttcgggctgatatggacgcactacctattcaggaagcagttgaatgggaacatataagcaaagttgcaggcaaaatgcatgcatgtggtcatgacgcacatgtgactatgcttcttggtgctgcccatattcttaaggctcgtgaacatcttctcaagggaacagtggttctgttattccaaccggctgaagaagctggaaatggtgcaaagaatatgatcgaagacggagctttggatgacgtggaggctatcttcgcggtccatgtgtcccatatccatccaacgggtgtgattggatcaagaagtggtcctttgctcgcgggatgtggaattttccgggcggttatcacttcggaagatagccgtggcgccgctaatctccttcttgcagcttcttccgcggtcattagtcttcaaggcattgtatcccgtgaagctagtcctcttgactctcaggttgtgtcggttacttcatttgatggcggtcatagtctcgatgtggcgccggacacggtggtcctcggtggtactttcagagctttttctaactcaagcttctactacctcaagaaacgtattcaagaggtactcatggatcaggtcggggttttcggttgccaagcgacagtgaacttctttgagaagcagaatgcgatatacccgccaactacgaacaatgatgcaacatacaatcacttgaagaaagtcaccatagatttgctcggagatagccatttcaccttggctccacagatgatgggagccgaagatttcgccttctactcagaaatcatcccagccgctttctacttcattggcataagaaatgaagaactcggatcagtccacattgctcattcaccacatttcatgatcgatgaagatagtttacccgttggagccgcggttcatgccgccgtggctgagagatacttaaatgataaacattcataagagtaaaaacaatctccccggcttttttttgggtggttatatttctaggcgttacggaaattatattgttcttaatctatctttgcttggaaatgtttgtgaagagtagtttttttttttttaaacgtgtaaaccgcatattgcatatggtgtatggattttagctaaagaggttagagtaaaagatagctagcggtacaaaatcttagacaactattttcttgatatcatgaaatatttggacgtttgagtatttgctacgaaattgtattaccatgtgattattaaggtttatattgacaacagaggtttcatatgtgattattagcttgtaagtgaaacaaagaaaagtaacgtcaattgaagataactgcaaggttgacaatttccaaagtccaagaagaaaattacggaatccgaaagcatacaaacgaggaagattttcaagattttaggtcataattttcttggttcgtgtgggatattaatttttgggtactttctaaggattgataaactataatatctctttttagcatct

SEQ ID NO: 21893 - protein, 492 aa, Arabidopsis thaliana
  peptide (1)..(492): Ceres Seq. ID no. 13503055
SSLFTQHPFITKTNFISLSLSHRQEHKVMDNLRKLNLLSVSLTIIFVSLTIATNLPFFEVKYPNNNPFGMLLRPTPIKNQSLGLPAHVGSDECRVWTKACSDEILRLTYQPDNVAWLKRVRRTIHENPELAFEEYETSRLIRSELDRMGIMYRYPLAKTGIRAWIGSGGPPFVAVRADMDALPIQEAVEWEHISKVAGKMHACGHDAHVTMLLGAAHILKAREHLLKGTVVLLFQPAEEAGNGAKNMIEDGALDDVEAIFAVHVSHIHPTGVIGSRSGPLLAGCGIFRAVITSEDSRGAANLLLAASSAVISLQGIVSREASPLDSQVVSVTSFDGGHSLDVAPDTVVLGGTFRAFSNSSFYYLKKRIQEVLMDQVGVFGCQATVNFFEKQNAIYPPTTNNDATYNHLKKVTIDLLGDSHFTLAPQMMGAEDFAFYSEIIPAAFYFIGIRNEELGSVHIAHSPHFMIDEDSLPVGAAVHAAVAERYLNDKHS

SEQ ID NO: 21894 - protein, 464 aa, Arabidopsis thaliana
  peptide (1)..(464): Ceres Seq. ID no. 13503056
MDNLRKLNLLSVSLTIIFVSLTIATNLPFFEVKYPNNNPFGMLLRPTPIKNQSLGLPAHVGSDECRVWTKACSDEILRLTYQPDNVAWLKRVRRTIHENPELAFEEYETSRLIRSELDRMGIMYRYPLAKTGIRAWIGSGGPPFVAVRADMDALPIQEAVEWEHISKVAGKMHACGHDAHVTMLLGAAHILKAREHLLKGTVVLLFQPAEEAGNGAKNMIEDGALDDVEAIFAVHVSHIHPTGVIGSRSGPLLAGCGIFRAVITSEDSRGAANLLLAASSAVISLQGIVSREASPLDSQVVSVTSFDGGHSLDVAPDTVVLGGTFRAFSNSSFYYLKKRIQEVLMDQVGVFGCQATVNFFEKQNAIYPPTTNNDATYNHLKKVTIDLLGDSHFTLAPQMMGAEDFAFYSEIIPAAFYFIGIRNEELGSVHIAHSPHFMIDEDSLPVGAAVHAAVAERYLNDKHS

SEQ ID NO: 21895 - protein, 423 aa, Arabidopsis thaliana
  peptide (1)..(423): Ceres Seq. ID no. 13503057
MLLRPTPIKNQSLGLPAHVGSDECRVWTKACSDEILRLTYQPDNVAWLKRVRRTIHENPELAFEEYETSRLIRSELDRMGIMYRYPLAKTGIRAWIGSGGPPFVAVRADMDALPIQEAVEWEHISKVAGKMHACGHDAHVTMLLGAAHILKAREHLLKGTVVLLFQPAEEAGNGAKNMIEDGALDDVEAIFAVHVSHIHPTGVIGSRSGPLLAGCGIFRAVITSEDSRGAANLLLAASSAVISLQGIVSREASPLDSQVVSVTSFDGGHSLDVAPDTVVLGGTFRAFSNSSFYYLKKRIQEVLMDQVGVFGCQATVNFFEKQNAIYPPTTNNDATYNHLKKVTIDLLGDSHFTLAPQMMGAEDFAFYSEIIPAAFYFIGIRNEELGSVHIAHSPHFMIDEDSLPVGAAVHAAVAERYLNDKHS

SEQ ID NO: 21896 - DNA, 1201 bp, Arabidopsis thaliana
  misc_feature (1)..(1201): Ceres Seq. ID no. 12357614
  misc_feature (1)..(1201): Ortholog of  Ceres SEQ ID NO 13581579 as cited in SEQ ID NO 58361
  misc_feature (1)..(1201): Ortholog of  Ceres SEQ ID NO 13598714 as cited in SEQ ID NO 62656
  misc_feature (1)..(1201): Ortholog of  Ceres SEQ ID NO 13596969 as cited in SEQ ID NO 63375
  misc_feature (1)..(1201): Ortholog of  Ceres SEQ ID NO 14302240 as cited in SEQ ID NO 64162
  misc_feature (1)..(1201): Ortholog of  Ceres SEQ ID NO 13597870 as cited in SEQ ID NO 64982
  misc_feature (1)..(1201): Ortholog of  Ceres SEQ ID NO 13595926 as cited in SEQ ID NO 67778
  misc_feature (1)..(1201): Ortholog of  Ceres SEQ ID NO 12567001 as cited in SEQ ID NO 0
atcatttcaaaagcaattcttcttgtcttggctcaatttatatacaacactctctctctctcggttttgtccaaacaatggctcgcttcgatattgttctactcataggtctttgcctcataatctctgtctttcccgatacaaccaccgcacaactaagccgcggtttctactccaaaacttgccccaatgtcgaacaaatcgtgagaaatgctgtccaaaagaaaataaagaagacattcgtcgccgtccctgccactctccgtctcttcttccacgactgctttgtcaatggttgtgatgcatctgtcatgatccaatcaacgcctaagaacaaggcagagaaggatcatccagataacatttcgctagctggagatggatttgatgtggtgatccaagctaagaaagcccttgactctaaccctagttgccggaacaaggtctcatgtgccgatattcttactttggccacccgagatgttgttgttgcggctggaggaccgtcctatgaagttgaacttggtaggttcgatggtttggtatcaaccgcgtcaagtgtcgaagggaacttaccaggaccttcggacaatgtagacaaacttaatgctcttttcacgaaaaacaaacttacccaagaagatatgattgctctttcagcggctcacacccttggattcgcacattgcggcaaggtctttaaaagaatccacaaattcaacggcatcaactccgtggacccaactttaaacaaggcttacgctattgagcttcaaaaggcttgtcctaagaatgtggacccaagaattgcaatcaacatggacccagtcacgcccaagacgtttgacaacacttacttcaagaatcttcaacaaggcaaaggtctcttcacctccgatcaagttctcttcacggatggtcgctctaggcccaccgttaatgcttgggcctcaaactctacggcctttaaccgcgcttttgtgatagccatgaccaaacttggccgtgttggagttaagaatagcagcaatggaaacatccgtcgtgattgtggtgcgtttaactagagctggtaatgggaaaatataagttgtcttatctcctaatttttttttcttttatccaattcaacctattttcttttcgtttattaatgtttgaatgttcattttgacgatgagaagatattattggtttttcc

SEQ ID NO: 21897 - protein, 354 aa, Arabidopsis thaliana
  peptide (1)..(354): Ceres Seq. ID no. 12357615
HFKSNSSCLGSIYIQHSLSLGFVQTMARFDIVLLIGLCLIISVFPDTTTAQLSRGFYSKTCPNVEQIVRNAVQKKIKKTFVAVPATLRLFFHDCFVNGCDASVMIQSTPKNKAEKDHPDNISLAGDGFDVVIQAKKALDSNPSCRNKVSCADILTLATRDVVVAAGGPSYEVELGRFDGLVSTASSVEGNLPGPSDNVDKLNALFTKNKLTQEDMIALSAAHTLGFAHCGKVFKRIHKFNGINSVDPTLNKAYAIELQKACPKNVDPRIAINMDPVTPKTFDNTYFKNLQQGKGLFTSDQVLFTDGRSRPTVNAWASNSTAFNRAFVIAMTKLGRVGVKNSSNGNIRRDCGAFN

SEQ ID NO: 21898 - protein, 329 aa, Arabidopsis thaliana
  peptide (1)..(329): Ceres Seq. ID no. 12357616
MARFDIVLLIGLCLIISVFPDTTTAQLSRGFYSKTCPNVEQIVRNAVQKKIKKTFVAVPATLRLFFHDCFVNGCDASVMIQSTPKNKAEKDHPDNISLAGDGFDVVIQAKKALDSNPSCRNKVSCADILTLATRDVVVAAGGPSYEVELGRFDGLVSTASSVEGNLPGPSDNVDKLNALFTKNKLTQEDMIALSAAHTLGFAHCGKVFKRIHKFNGINSVDPTLNKAYAIELQKACPKNVDPRIAINMDPVTPKTFDNTYFKNLQQGKGLFTSDQVLFTDGRSRPTVNAWASNSTAFNRAFVIAMTKLGRVGVKNSSNGNIRRDCGAFN

SEQ ID NO: 21899 - protein, 251 aa, Arabidopsis thaliana
  peptide (1)..(251): Ceres Seq. ID no. 12357617
MIQSTPKNKAEKDHPDNISLAGDGFDVVIQAKKALDSNPSCRNKVSCADILTLATRDVVVAAGGPSYEVELGRFDGLVSTASSVEGNLPGPSDNVDKLNALFTKNKLTQEDMIALSAAHTLGFAHCGKVFKRIHKFNGINSVDPTLNKAYAIELQKACPKNVDPRIAINMDPVTPKTFDNTYFKNLQQGKGLFTSDQVLFTDGRSRPTVNAWASNSTAFNRAFVIAMTKLGRVGVKNSSNGNIRRDCGAFN

SEQ ID NO: 21900 - DNA, 1437 bp, Arabidopsis thaliana
  misc_feature (1)..(1437): Ceres Seq. ID no. 13497598
  misc_feature (1)..(1437): Ortholog of  Ceres SEQ ID NO 13654557 as cited in SEQ ID NO 68444
aaaaccctaatttctcaaagagtctaaagagacggagagtgagagaagagagaaacatttcgagacaaatggccgccgccgctgctcgtcctctcgtcaccatccaaaccttggatggtgacatgtccaccgatcaatcctccaccgtcgtacttcccgacgtcatgacggcgccagttcgaccagacatcgttaacttcgttcacgcccaaatctccaacaacagccgtcagccatacgccgtatcgaagaaggccggtcaccagacctccgccgagtcctggggaaccggacgtgccgtgtctcgtatccctcgtgttcccggtggtggtactcaccgtgctggtcaagctgcgttcggtaacatgtgtcgtggtggtcgtatgttcgctccaaccaagatctggcgccgctggcaccgtcgtgtcaatgtcaacatgaagcgtcacgcaatcgtctcagctatcgctgcaactgctgttcctgcgcttgtgatggctcgtggtcacaagatcgagaatgttcctgagatgcctcttgttgtgagtgactccgccgaagctgtggagaagacctcagctgcgatcaaggttttgaaacagatcggtgcttatgatgatgctgagaaggcaaagaacagcattggaatccgtcctggtaaaggtaaaatgaggaaccgtcgttacatttctaggaaaggtcctctggtggtttatggaactgaaggatctaagatagttaaggcgtttagaaaccttcctggtgttgagctttgtcatgtggagaggcttaatttgttgaagcttgctcctggtggtcaccttggtcggtttgtgatctggaccaagtctgcctttgagaagcttgagtctatctatggttcgtttgagaagccatcagagaagaagaaggggtatgtgcttcctcgtgcaaagatggtgaatgctgatcttgccaggattatcaattcagatgagattcagagtgttgtgaatccgatcaagaaggatgcgaagagggctgttcttaagaagaatccattgaagaatctcaatgtgatgttgaagttgaatccttatgctaagaccgcgaagaggatgtcactgttagctgaagcacagagagttaaggctaagaaggagaagctcgccaagaagaggaaaaccgttaccaaggaggaggcgttggcaatcaaagcagcaggcaagtcgtggtacaagactatgatctccgacagtgattacaccgagtttgataacttcaccaaatggctcggtgctagccagtaataatctcgtctgctttggaacactttccatattttagtcaaaagattttggtttttttaatctgttttgtctttgggtgtctggatatcaagttgaattatgaacaagtttcacttttttacatctccatttcttacttcgcctttat

SEQ ID NO: 21901 - protein, 428 aa, Arabidopsis thaliana
  peptide (1)..(428): Ceres Seq. ID no. 13497599
NPNFSKSLKRRRVREERNISRQMAAAAARPLVTIQTLDGDMSTDQSSTVVLPDVMTAPVRPDIVNFVHAQISNNSRQPYAVSKKAGHQTSAESWGTGRAVSRIPRVPGGGTHRAGQAAFGNMCRGGRMFAPTKIWRRWHRRVNVNMKRHAIVSAIAATAVPALVMARGHKIENVPEMPLVVSDSAEAVEKTSAAIKVLKQIGAYDDAEKAKNSIGIRPGKGKMRNRRYISRKGPLVVYGTEGSKIVKAFRNLPGVELCHVERLNLLKLAPGGHLGRFVIWTKSAFEKLESIYGSFEKPSEKKKGYVLPRAKMVNADLARIINSDEIQSVVNPIKKDAKRAVLKKNPLKNLNVMLKLNPYAKTAKRMSLLAEAQRVKAKKEKLAKKRKTVTKEEALAIKAAGKSWYKTMISDSDYTEFDNFTKWLGASQ

SEQ ID NO: 21902 - protein, 406 aa, Arabidopsis thaliana
  peptide (1)..(406): Ceres Seq. ID no. 13497600
MAAAAARPLVTIQTLDGDMSTDQSSTVVLPDVMTAPVRPDIVNFVHAQISNNSRQPYAVSKKAGHQTSAESWGTGRAVSRIPRVPGGGTHRAGQAAFGNMCRGGRMFAPTKIWRRWHRRVNVNMKRHAIVSAIAATAVPALVMARGHKIENVPEMPLVVSDSAEAVEKTSAAIKVLKQIGAYDDAEKAKNSIGIRPGKGKMRNRRYISRKGPLVVYGTEGSKIVKAFRNLPGVELCHVERLNLLKLAPGGHLGRFVIWTKSAFEKLESIYGSFEKPSEKKKGYVLPRAKMVNADLARIINSDEIQSVVNPIKKDAKRAVLKKNPLKNLNVMLKLNPYAKTAKRMSLLAEAQRVKAKKEKLAKKRKTVTKEEALAIKAAGKSWYKTMISDSDYTEFDNFTKWLGASQ

SEQ ID NO: 21903 - protein, 388 aa, Arabidopsis thaliana
  peptide (1)..(388): Ceres Seq. ID no. 13497601
MSTDQSSTVVLPDVMTAPVRPDIVNFVHAQISNNSRQPYAVSKKAGHQTSAESWGTGRAVSRIPRVPGGGTHRAGQAAFGNMCRGGRMFAPTKIWRRWHRRVNVNMKRHAIVSAIAATAVPALVMARGHKIENVPEMPLVVSDSAEAVEKTSAAIKVLKQIGAYDDAEKAKNSIGIRPGKGKMRNRRYISRKGPLVVYGTEGSKIVKAFRNLPGVELCHVERLNLLKLAPGGHLGRFVIWTKSAFEKLESIYGSFEKPSEKKKGYVLPRAKMVNADLARIINSDEIQSVVNPIKKDAKRAVLKKNPLKNLNVMLKLNPYAKTAKRMSLLAEAQRVKAKKEKLAKKRKTVTKEEALAIKAAGKSWYKTMISDSDYTEFDNFTKWLGASQ

SEQ ID NO: 21904 - DNA, 1704 bp, Arabidopsis thaliana
  misc_feature (1)..(1704): Ceres Seq. ID no. 12321264
  misc_feature (1)..(1704): Ortholog of  Ceres SEQ ID NO 13590739 as cited in SEQ ID NO 66960
aaaaacttcaccaaccccatttttaagcccctttctttgtttttatcctccgatcgatcaaaccaagaaaaaacactttcgtatttccctcgacgaaaaaaatggcaaccatttcgaatctcgctaatcttccccgcgccacctgcgtcgactccaaatcttcttcctcttcctccgtcttacctagatccttcgtcaatttccgcgctttgaatgcaaagctttcctcttctcagctttctcttcgttataaccaacgatcaataccttccctctctgtgaggtgttcagtgtctggtggaaatggaactgctggaaagagaacgactcttcatgatctatatgagaaggaaggtcagagtccttggtatgataatctttgccgtccagtcacagatcttctcccgttgattgctcgtggtgttagaggtgttactagcaaccctgcgatcttccaaaaagccatttccacttcaaatgcttataatgatcaattcaggacacttgtggaatcgggaaaggacattgaaagtgcgtattgggaacttgtggtgaaggatattcaggatgcctgcaaactttttgagccaatctatgaccagacagaaggtgcggatggctatgtctctgttgaagtttcacctaggcttgctgatgatacccaaggaactgttgaagctgctaaatatcttagcaaggttgtcaaccgtcgtaatgtctacattaagattcctgctactgctccatgcattccttccatcagggatgtcattgcagctggaataagtgtcaatgtcacgcttatattctcaatcgccagatatgaagcagtgatcgatgcatatttggatggcctcgaggcgtctggacttgatgacctctcaagagttaccagtgttgcttccttctttgtcagtcgggtggatactctcatggacaagatgcttgagcaaattggtacccctgaagccttagatctccgtgggaaggcggctgtggctcaagctgcattagcatacaagctataccagcagaaattctctggcccaagatgggaagctctggtaaagaaaggtgccaagaaacagagacttctctgggcatcaacaagtgtaaagaacccagcttactctgacaccttatatgtcgctcctctcatcggacctgacactgtatcaaccatgccggatcaagccctggaagcattcgcagatcatggaatagtgaagaggacaatagatgcgaatgtgtcagaagcagaagggatttacagtgcactagagaagctgggaatagactggaacaaagtaggagaacagttggaagacgaaggagtagattccttcaagaagagtttcgagagtctgctcggtacactgcaagacaaggccaacactctcaaactagccagccattgaggaaatgagtcatcattatgtttttggttacgctaaaataaaaagaagaacctttggcttttgttcttcaatccttatgcatgctttctaaagtggttatgatggattttgcttgatgttccacattatgggttattctattttctttgttcttgtaagatgatgcttcagaagagtttgttactttttaccgtatttgtaatttacattttcactgaaaacaattggcgagtaaaaaagtgtccttgtcttcttctttgttcggattatatgaacaattgttcct

SEQ ID NO: 21905 - protein, 438 aa, Arabidopsis thaliana
  peptide (1)..(438): Ceres Seq. ID no. 12321265
MATISNLANLPRATCVDSKSSSSSSVLPRSFVNFRALNAKLSSSQLSLRYNQRSIPSLSVRCSVSGGNGTAGKRTTLHDLYEKEGQSPWYDNLCRPVTDLLPLIARGVRGVTSNPAIFQKAISTSNAYNDQFRTLVESGKDIESAYWELVVKDIQDACKLFEPIYDQTEGADGYVSVEVSPRLADDTQGTVEAAKYLSKVVNRRNVYIKIPATAPCIPSIRDVIAAGISVNVTLIFSIARYEAVIDAYLDGLEASGLDDLSRVTSVASFFVSRVDTLMDKMLEQIGTPEALDLRGKAAVAQAALAYKLYQQKFSGPRWEALVKKGAKKQRLLWASTSVKNPAYSDTLYVAPLIGPDTVSTMPDQALEAFADHGIVKRTIDANVSEAEGIYSALEKLGIDWNKVGEQLEDEGVDSFKKSFESLLGTLQDKANTLKLASH

SEQ ID NO: 21906 - DNA, 2204 bp, Arabidopsis thaliana
  misc_feature (1)..(2204): Ceres Seq. ID no. 12324801
  misc_feature (1)..(2204): Ortholog of  Ceres SEQ ID NO 13595870 as cited in SEQ ID NO 62101
  misc_feature (1)..(2204): Ortholog of  Ceres SEQ ID NO 13590241 as cited in SEQ ID NO 63878
  misc_feature (1)..(2204): Ortholog of  Ceres SEQ ID NO 13657939 as cited in SEQ ID NO 66349
gtcaaccaaaaaagagcttttgcgaactcttcttatcctttcaatttaacagagtcatcagcttgaagacgaaagcctttctaattccaatcttcttcacttgtatgacacgttcgtctactcttgcgcttggtcggttttcttaggatttttgcacaagaatgatcaacgcatgattcggattccaggatagagaatccatggctactttcaatgttctttgtagcaatcgatttagattcaatggaggttattctccggagaaatttaatagaaaggtgtcttcgaggagtagtgagcttaatgtttgtgtctctagaatcaggactcaatcgtttagttgcaggagacttggtgggtttatggaaattggtgaaaccagattaggggttattagagttcatggcgattctcgtaatagattttcttgtaatagcgagattaagcgacttgtgactggtgattacggagataaggagactcgtattggtgaaaatggtagaaacaaagggaagagaagaaggttttctcttaggcttcgacctagattacgattagtgagaatgagacttggcagatttgatttcagagcatcaatggaagattttcgatattttttgaaaaagaatctcaaaagagtgatcttgtccaccggtgtggctttaatctttggactgtgttatttgttcttgaggttaactgctgttccgtccccatccattgttccttactcagatttcgttacgaatcttcgaggtggttctgtttcaaaggttttgctcgaagaaggctcacgtcgaatctattacaacactgatgagaatgttgaggttgttgatgatgttcacaagtctgaaactttagaagatccggcaatccaaattgatggcggcacagtgacagaagctgttacgaaagacgatactccgcgaaaggttcgagctttgcctcctgtgtggaagtatgtgacaagaaaagtcgatcatgatgagaagtttcttcttagtttaatgagagagaaaggcattacttatagttcagctcctcaatccgcattgatgtcaatgagaactactttgataacaatcatctctctgtggattcctttgacacctcttatgtggcttctttatcggcaactctcagcatctaacagccctgcgaagaaacgacggtctaaaaatcccactgttggcttcgatgatgttgagggtgttgattctgctaaagacgagctcgtggagatagtctcatgtcttcaaggaagtataaactacaaaaaactaggagcaagattaccgagaggtgtgcttttggtcggtccaccagggaccggtaaaaccttgttggctcgggctgtagctggagaagcgggagttccatttttctctgtctccgctagtgagtttgttgaattgtttgttggaagaggcgcagcgcgaatcagagatcttttcaatgcagcaaggaaaaactcaccttccattatattcattgatgagcttgatgcggttggaggaaaacgcggtaggagtttcaacgatgaacgtgaccagacgttaaaccagttgcttactgagatggatggattcgagtcagacacgaaagtcattgtaattgcagcaactaaccgaccagaagcgttagactcggctctttgtcggcctggaaggttctctagaaaagttttggttgcagaaccagaccaagaaggccgtcggaaaatcttggccatacatctgagagacgttcctttagaagaagatgcatttctcatatgtgatctggttgcttctttaactcccggatttgtaggtgctgatctcgccaatattgtcaatgaagctgcattgcttgctgctcgtagaggcggagaagcggtggcacgggaagatataatggaagctatagagagagcgaagttcgggatcaatgataaggaagcgaggccaaggacgttaggaaatgaactcagcaagatgttcccatggatgccatctttggctagaagaaacggaccagatcaagacggtttacaaggaccgttaggttatcaaactctcagctaaaccaaaccaagacagaccggttagagagcaaatccattgataccaagtttctttgtatctgaaatttttggaaatgtacgtttttttgtgtgtttacattgcaaagtcaattgctttttggttcgtagtaccttc

SEQ ID NO: 21907 - protein, 622 aa, Arabidopsis thaliana
  peptide (1)..(622): Ceres Seq. ID no. 12324802
MATFNVLCSNRFRFNGGYSPEKFNRKVSSRSSELNVCVSRIRTQSFSCRRLGGFMEIGETRLGVIRVHGDSRNRFSCNSEIKRLVTGDYGDKETRIGENGRNKGKRRRFSLRLRPRLRLVRMRLGRFDFRASMEDFRYFLKKNLKRVILSTGVALIFGLCYLFLRLTAVPSPSIVPYSDFVTNLRGGSVSKVLLEEGSRRIYYNTDENVEVVDDVHKSETLEDPAIQIDGGTVTEAVTKDDTPRKVRALPPVWKYVTRKVDHDEKFLLSLMREKGITYSSAPQSALMSMRTTLITIISLWIPLTPLMWLLYRQLSASNSPAKKRRSKNPTVGFDDVEGVDSAKDELVEIVSCLQGSINYKKLGARLPRGVLLVGPPGTGKTLLARAVAGEAGVPFFSVSASEFVELFVGRGAARIRDLFNAARKNSPSIIFIDELDAVGGKRGRSFNDERDQTLNQLLTEMDGFESDTKVIVIAATNRPEALDSALCRPGRFSRKVLVAEPDQEGRRKILAIHLRDVPLEEDAFLICDLVASLTPGFVGADLANIVNEAALLAARRGGEAVAREDIMEAIERAKFGINDKEARPRTLGNELSKMFPWMPSLARRNGPDQDGLQGPLGYQTLS

SEQ ID NO: 21908 - protein, 568 aa, Arabidopsis thaliana
  peptide (1)..(568): Ceres Seq. ID no. 12324803
MEIGETRLGVIRVHGDSRNRFSCNSEIKRLVTGDYGDKETRIGENGRNKGKRRRFSLRLRPRLRLVRMRLGRFDFRASMEDFRYFLKKNLKRVILSTGVALIFGLCYLFLRLTAVPSPSIVPYSDFVTNLRGGSVSKVLLEEGSRRIYYNTDENVEVVDDVHKSETLEDPAIQIDGGTVTEAVTKDDTPRKVRALPPVWKYVTRKVDHDEKFLLSLMREKGITYSSAPQSALMSMRTTLITIISLWIPLTPLMWLLYRQLSASNSPAKKRRSKNPTVGFDDVEGVDSAKDELVEIVSCLQGSINYKKLGARLPRGVLLVGPPGTGKTLLARAVAGEAGVPFFSVSASEFVELFVGRGAARIRDLFNAARKNSPSIIFIDELDAVGGKRGRSFNDERDQTLNQLLTEMDGFESDTKVIVIAATNRPEALDSALCRPGRFSRKVLVAEPDQEGRRKILAIHLRDVPLEEDAFLICDLVASLTPGFVGADLANIVNEAALLAARRGGEAVAREDIMEAIERAKFGINDKEARPRTLGNELSKMFPWMPSLARRNGPDQDGLQGPLGYQTLS

SEQ ID NO: 21909 - protein, 501 aa, Arabidopsis thaliana
  peptide (1)..(501): Ceres Seq. ID no. 12324804
MRLGRFDFRASMEDFRYFLKKNLKRVILSTGVALIFGLCYLFLRLTAVPSPSIVPYSDFVTNLRGGSVSKVLLEEGSRRIYYNTDENVEVVDDVHKSETLEDPAIQIDGGTVTEAVTKDDTPRKVRALPPVWKYVTRKVDHDEKFLLSLMREKGITYSSAPQSALMSMRTTLITIISLWIPLTPLMWLLYRQLSASNSPAKKRRSKNPTVGFDDVEGVDSAKDELVEIVSCLQGSINYKKLGARLPRGVLLVGPPGTGKTLLARAVAGEAGVPFFSVSASEFVELFVGRGAARIRDLFNAARKNSPSIIFIDELDAVGGKRGRSFNDERDQTLNQLLTEMDGFESDTKVIVIAATNRPEALDSALCRPGRFSRKVLVAEPDQEGRRKILAIHLRDVPLEEDAFLICDLVASLTPGFVGADLANIVNEAALLAARRGGEAVAREDIMEAIERAKFGINDKEARPRTLGNELSKMFPWMPSLARRNGPDQDGLQGPLGYQTLS

SEQ ID NO: 21910 - DNA, 1576 bp, Arabidopsis thaliana
  misc_feature (1)..(1576): Ceres Seq. ID no. 12357547
  misc_feature (1)..(1576): Ortholog of  Ceres SEQ ID NO 15171152 as cited in SEQ ID NO 60275
ataccaattggcaaatcattagggtttatgaaattttgagtgattttcagagaagtttgaggatgactgtgtgattctacttctcgaattgaaatagatagttgggtcataatcgcatatccttgtcttctgtcatgtattctctgattcgccatggaagaagtttggtcgagttacagaaatggcgtcatttgagagttttagtgcaaaaggcgtctcctttgtccaattccttctcctctgcttctgctgcgcgtttgagtcctagagttggtcgaaaaggtaagagctttacagtctcttacctcgttgattcattgggtttacccaaaaagctcgctgaatcggtctcaaggaaggttagcttcgaggacaaggacaaccctgactctgttctgaatcttttgagaagtcatgggttcactgattctcagatctccaccatcgttacggattatccacaattgcttgtagctgatgctgagaaatcacttgctcccaagcttcagtttttgcagtctagaggagcttcaagctctgagctcactgagattgtttctacagttcctaaaatcttgggaaagagaggcaacaaaactatcagcgtattctatgatttcatcaaagaaactttacttgataagagttccaagtccgaaaagtcatgtcagccttttccacagggtaatctggagaacaagatcagaaatttatctgttttgagagaattggggatgcctcacaagttgttattccccttgctcatctcttgtgacgtacctgtcttcggtaaagaaaaatttgaagaatccctcaagaaagttgttgagatgggttttgatccatccacctcaaagtttgtggaagctttgtgcgttgttcaaagattgagcgacaaaacaatagaagataaagtcaatgcgtataaaaggttaggctttgatgtggaatatgtatggacagtgttcaagaggtggccaaactttctgacacactcggagaagaagatattgaacaccattgaaacatttctaggcctagggttcagcagagatgagtttagcgtgttaattaagcgctttcctcagggcattggattatccgcggagatggttaaaaagaagactgagtttttggtaaagaagatgaattggccactaaaggctctggtttcaaaccctgcggtgcttggatacagcctagagaagaggactgtcccaaggggtaacgtagttcaagctctcatctccaagggattgatcggaagtgaactcccttcgatatcacgtgtcttcgtatgtaccgatcaggtgttcttaaacaggtatgtcaagaggcatgaggacaagcagctggagactgagttgatggctatctatcgtgcttcatagatcacaacgcttgtcaaggattttggttttatctttgaatatctttaatttagactttagttctcaatttcatatcgatccaaactgtttgtctctctctatagattcttgaaattgtaagttttgaatccattttcagctatattactgaagttaaattccaaattctttatgaccttgttcgg

SEQ ID NO: 21911 - protein, 418 aa, Arabidopsis thaliana
  peptide (1)..(418): Ceres Seq. ID no. 12357548
MYSLIRHGRSLVELQKWRHLRVLVQKASPLSNSFSSASAARLSPRVGRKGKSFTVSYLVDSLGLPKKLAESVSRKVSFEDKDNPDSVLNLLRSHGFTDSQISTIVTDYPQLLVADAEKSLAPKLQFLQSRGASSSELTEIVSTVPKILGKRGNKTISVFYDFIKETLLDKSSKSEKSCQPFPQGNLENKIRNLSVLRELGMPHKLLFPLLISCDVPVFGKEKFEESLKKVVEMGFDPSTSKFVEALCVVQRLSDKTIEDKVNAYKRLGFDVEYVWTVFKRWPNFLTHSEKKILNTIETFLGLGFSRDEFSVLIKRFPQGIGLSAEMVKKKTEFLVKKMNWPLKALVSNPAVLGYSLEKRTVPRGNVVQALISKGLIGSELPSISRVFVCTDQVFLNRYVKRHEDKQLETELMAIYRAS

SEQ ID NO: 21912 - protein, 218 aa, Arabidopsis thaliana
  peptide (1)..(218): Ceres Seq. ID no. 12357549
MPHKLLFPLLISCDVPVFGKEKFEESLKKVVEMGFDPSTSKFVEALCVVQRLSDKTIEDKVNAYKRLGFDVEYVWTVFKRWPNFLTHSEKKILNTIETFLGLGFSRDEFSVLIKRFPQGIGLSAEMVKKKTEFLVKKMNWPLKALVSNPAVLGYSLEKRTVPRGNVVQALISKGLIGSELPSISRVFVCTDQVFLNRYVKRHEDKQLETELMAIYRAS

SEQ ID NO: 21913 - DNA, 1535 bp, Arabidopsis thaliana
  misc_feature (1)..(1535): Ceres Seq. ID no. 13486674
  misc_feature (1)..(1535): Ortholog of  Ceres SEQ ID NO 12784228 as cited in SEQ ID NO 66111
ccggctttgcaaagttgcaacctttttgggtttagtacttgaagagaatcaatctgacagcaaatagttttggcgtctttctaactcaacccatcatctctgttgcattttatcgagagaatatttgaggtggatatggcctcgacccttttctccagaactttcttggctgctagtcaccgactgattactccttctcttccgcaaaagatctttaatccagccacctttctcagtaggtcactccactctcagttaggctccgcttctacagcctataaatcaactacttgggctcgtcgagctatggcttctactggagttgagacaaaagccggttactccacatcatccgtatcaaccagtgaacctgttgtttctgttgattggcttcatgctaatcttagagagcctgatttgaagattttggatgcttcatggtatatgccggatgagcagagaaatccgatccaagaatatcaggttgctcatattccccgcgctctcttctttgatttggatggaatatcagatcgaaaaactagtttgccacatatgttgcccactgaggaagcttttgctgctggttgttctgctcttggaattgataacaaagatgaagtggttgtctatgatggaaaggggatctttagtgcagcccgtgtatggtggatgttccgagtttttggacatgaaaaagtttgggtgctcgatggaggtctaccaagatggcgtgcatcaggttatgatgttgaatctagtgcatcaggtgatgctattctgaaagccagtgccgcaagtgaggctatagagaaaatttatcaaggacaaaccgtcagtccgataacctttcagactaagttccagccacatctagtgtggacacttgatcaggtcaagaacaatatggaggatccgacttatcaacacatagacgctcgttccaaagccaggtttgatggtactgctccagaaccccgtaagggaataagaagcggtcatatacctggaagcaaatgtatcccttttcctcagatgtttgattcttgtaacacattgttaccagcagaggagctgaagaaacgatttgaccaagaagatatctcactggacaagcctattatggcctcgtgtgggactggtgtaacagcttgcatcttggcaatggggcttcaccggctggggaaaaccgacgtgccgatctatgatgggtcgtggactgaatgggcgacacaaccagacttgcccatagagagtgttgaatcttcttcatgaaagtctccaccgtaaaggctagcgacaagattacaagccacagacggaaataattatcatgtttaagttgagggatttgtttgaagttaatcataatcctggctttaaatttgcctcaaccctcaagccgaagaggactgtatctatagaacttggaacttttccttttcgtttctggattcatcttctcagataacaaaaggttgttttctgtgttttctttctaataaaatcaagaaccaggaaatttctcaacgatc

SEQ ID NO: 21914 - protein, 379 aa, Arabidopsis thaliana
  peptide (1)..(379): Ceres Seq. ID no. 13486675
MASTLFSRTFLAASHRLITPSLPQKIFNPATFLSRSLHSQLGSASTAYKSTTWARRAMASTGVETKAGYSTSSVSTSEPVVSVDWLHANLREPDLKILDASWYMPDEQRNPIQEYQVAHIPRALFFDLDGISDRKTSLPHMLPTEEAFAAGCSALGIDNKDEVVVYDGKGIFSAARVWWMFRVFGHEKVWVLDGGLPRWRASGYDVESSASGDAILKASAASEAIEKIYQGQTVSPITFQTKFQPHLVWTLDQVKNNMEDPTYQHIDARSKARFDGTAPEPRKGIRSGHIPGSKCIPFPQMFDSCNTLLPAEELKKRFDQEDISLDKPIMASCGTGVTACILAMGLHRLGKTDVPIYDGSWTEWATQPDLPIESVESSS

SEQ ID NO: 21915 - protein, 322 aa, Arabidopsis thaliana
  peptide (1)..(322): Ceres Seq. ID no. 13486676
MASTGVETKAGYSTSSVSTSEPVVSVDWLHANLREPDLKILDASWYMPDEQRNPIQEYQVAHIPRALFFDLDGISDRKTSLPHMLPTEEAFAAGCSALGIDNKDEVVVYDGKGIFSAARVWWMFRVFGHEKVWVLDGGLPRWRASGYDVESSASGDAILKASAASEAIEKIYQGQTVSPITFQTKFQPHLVWTLDQVKNNMEDPTYQHIDARSKARFDGTAPEPRKGIRSGHIPGSKCIPFPQMFDSCNTLLPAEELKKRFDQEDISLDKPIMASCGTGVTACILAMGLHRLGKTDVPIYDGSWTEWATQPDLPIESVESSS

SEQ ID NO: 21916 - protein, 276 aa, Arabidopsis thaliana
  peptide (1)..(276): Ceres Seq. ID no. 13486677
MPDEQRNPIQEYQVAHIPRALFFDLDGISDRKTSLPHMLPTEEAFAAGCSALGIDNKDEVVVYDGKGIFSAARVWWMFRVFGHEKVWVLDGGLPRWRASGYDVESSASGDAILKASAASEAIEKIYQGQTVSPITFQTKFQPHLVWTLDQVKNNMEDPTYQHIDARSKARFDGTAPEPRKGIRSGHIPGSKCIPFPQMFDSCNTLLPAEELKKRFDQEDISLDKPIMASCGTGVTACILAMGLHRLGKTDVPIYDGSWTEWATQPDLPIESVESSS

SEQ ID NO: 21917 - DNA, 1303 bp, Arabidopsis thaliana
  misc_feature (1)..(1303): Ceres Seq. ID no. 13490337
  misc_feature (1)..(1303): Ortholog of  Ceres SEQ ID NO 13597888 as cited in SEQ ID NO 64299
tgactgtaacaataatcaaataatccctgacttcgtcacgtttctttgtatctccaacgtccaataaatgaaagcaactctagcagcaccctcttctctcacaagcctcccttatcgaaccaactcttctttcggctcaaagtcatcgcttctctttcggtctccatcctcctcctcctcagtctctatgacgacaacgcgtggaaacgtggctgtggcggctgctgctacatccactgaggcgctaagaaaaggaatagcggagttctacaatgaaacttcgggtttgtgggaagagatttggggagatcatatgcatcatggcttttatgaccctgattcttctgttcaactttctgattctggtcacaaggaagctcagatccgtatgattgaagagtctctccgttttgccggtgttactgatgaagaggaggagaaaaagataaagaaagtagtggatgttgggtgtgggattggaggaagctcaagatatcttgcctctaaatttggagctgaatgcattggcattactctcagccctgttcaggccaagagagccaatgatctcgcggctgctcaatcactcgctcataaggcttccttccaagttgcggatgcgttggatcagccattcgaagatggaaaattcgatctagtgtggtcgatggagagtggtgagcatatgcctgacaaggccaagtttgtaaaagagttggtacgtgtggcggctccaggaggtaggataataatagtgacatggtgccatagaaatctatctgcgggggaggaagctttgcagccgtgggagcaaaacatcttggacaaaatctgtaagacgttctatctcccggcttggtgctccaccgatgattatgtcaacttgcttcaatcccattctctccaggatattaagtgtgcggattggtcagagaacgtagctcctttctggcctgcggttatacggactgcattaacatggaagggccttgtgtctctgcttcgtagtggtatgaaaagtattaaaggagcattgacaatgccattgatgattgaaggttacaagaaaggtgtcattaagtttggtatcatcacttgccagaagccactctaagtctaaagctatactaggagattgaataagactataagagtagtgtctcatgtgaaagcatgaaattccttaaaaacgtcaatgttaagcctatgcttcgttatttgttttagataaatatcatttcactcttgtctaaggtagtttctataaacaataaataccatgaattagctcatgttatctggt

SEQ ID NO: 21918 - protein, 348 aa, Arabidopsis thaliana
  peptide (1)..(348): Ceres Seq. ID no. 13490338
MKATLAAPSSLTSLPYRTNSSFGSKSSLLFRSPSSSSSVSMTTTRGNVAVAAAATSTEALRKGIAEFYNETSGLWEEIWGDHMHHGFYDPDSSVQLSDSGHKEAQIRMIEESLRFAGVTDEEEEKKIKKVVDVGCGIGGSSRYLASKFGAECIGITLSPVQAKRANDLAAAQSLAHKASFQVADALDQPFEDGKFDLVWSMESGEHMPDKAKFVKELVRVAAPGGRIIIVTWCHRNLSAGEEALQPWEQNILDKICKTFYLPAWCSTDDYVNLLQSHSLQDIKCADWSENVAPFWPAVIRTALTWKGLVSLLRSGMKSIKGALTMPLMIEGYKKGVIKFGIITCQKPL

SEQ ID NO: 21919 - protein, 308 aa, Arabidopsis thaliana
  peptide (1)..(308): Ceres Seq. ID no. 13490339
MTTTRGNVAVAAAATSTEALRKGIAEFYNETSGLWEEIWGDHMHHGFYDPDSSVQLSDSGHKEAQIRMIEESLRFAGVTDEEEEKKIKKVVDVGCGIGGSSRYLASKFGAECIGITLSPVQAKRANDLAAAQSLAHKASFQVADALDQPFEDGKFDLVWSMESGEHMPDKAKFVKELVRVAAPGGRIIIVTWCHRNLSAGEEALQPWEQNILDKICKTFYLPAWCSTDDYVNLLQSHSLQDIKCADWSENVAPFWPAVIRTALTWKGLVSLLRSGMKSIKGALTMPLMIEGYKKGVIKFGIITCQKPL

SEQ ID NO: 21920 - protein, 266 aa, Arabidopsis thaliana
  peptide (1)..(266): Ceres Seq. ID no. 13490340
MHHGFYDPDSSVQLSDSGHKEAQIRMIEESLRFAGVTDEEEEKKIKKVVDVGCGIGGSSRYLASKFGAECIGITLSPVQAKRANDLAAAQSLAHKASFQVADALDQPFEDGKFDLVWSMESGEHMPDKAKFVKELVRVAAPGGRIIIVTWCHRNLSAGEEALQPWEQNILDKICKTFYLPAWCSTDDYVNLLQSHSLQDIKCADWSENVAPFWPAVIRTALTWKGLVSLLRSGMKSIKGALTMPLMIEGYKKGVIKFGIITCQKPL

SEQ ID NO: 21921 - DNA, 1396 bp, Arabidopsis thaliana
  misc_feature (1)..(1396): Ceres Seq. ID no. 12328918
  misc_feature (1)..(1396): Ortholog of  Ceres SEQ ID NO 14301994 as cited in SEQ ID NO 56653
  misc_feature (1)..(1396): Ortholog of  Ceres SEQ ID NO 14304120 as cited in SEQ ID NO 58862
  misc_feature (1)..(1396): Ortholog of  Ceres SEQ ID NO 13595658 as cited in SEQ ID NO 59888
  misc_feature (1)..(1396): Ortholog of  Ceres SEQ ID NO 13661330 as cited in SEQ ID NO 61614
  misc_feature (1)..(1396): Ortholog of  Ceres SEQ ID NO 13596025 as cited in SEQ ID NO 62024
  misc_feature (1)..(1396): Ortholog of  Ceres SEQ ID NO 13662324 as cited in SEQ ID NO 62162
  misc_feature (1)..(1396): Ortholog of  Ceres SEQ ID NO 12625713 as cited in SEQ ID NO 64160
  misc_feature (1)..(1396): Ortholog of  Ceres SEQ ID NO 14303564 as cited in SEQ ID NO 65360
  misc_feature (1)..(1396): Ortholog of  Ceres SEQ ID NO 14301782 as cited in SEQ ID NO 66788
  misc_feature (1)..(1396): Ortholog of  Ceres SEQ ID NO 14302860 as cited in SEQ ID NO 67667
attttcaactcaaatagcttcacagttttactaatctctctcatcttcttcccaacatcaaagaagacctttacttctggttagaatagaccaagaacactgagtacgacaaagaaccatgatgaatctttcttctcgtcgcgcctcttccactctcacattgagcttcactgttctccttttagcttccacaggttcgtatggctcaacattcacattcgctaatcggtgcggctacaccgtatggcctggaatcctatcgaatgctggctcacctactctctccaccaccggatttgagctccctaaaggcacctctcgctctctccaagctcccaccggttggtccggtcgattctgggctcgtaccggttgcaagttcgacagttctggctccggtacatgcaaaaccggtgactgcggctccaacgctgtcgaatgcgccgggcttggtgccgcaccgcctgtaactctcgcggagttcactctaggcactggcggcgatgatttctacgacgttagtctcgtcgacggttacaacattccgatgatagttgaagtcgccggtggatctgggcagtgcgcttctaccggatgcactacggatcttaacattcagtgccctgctgagctgcgtttcggcgacggagacgcttgcaaaagcgcgtgtttagcgtttcggagtcctgaatactgttgcagcggcgcgtatgctacaccttctagttgtcggccttccgtgtattcggagatgtttaaagccgcgtgtcctcgctcctatagctacgcttacgacgatgctacgagcactttcacttgcgccggtggagattatacggtgacgttttgcccttcttcccctagtcaaaaatcgactagctactcccctccagtgacagactcgtcgtcgacctcacaaggttccgatcctgtgcctggttctgatactggttacgctggtcagggtcaacagactccaggtcaaggtaatgtgtacgggtcacaggggactgggtcggagatgggtacgggtgagaccatgttacaagacggatcatggatggctggtttggccatgggagaggcaagcagaccagccggcgtttcattgacagtgctgcttgctgcatttacttttccgtttattttctcgtagcatcatcgtctttagatttggtagtcgttttgttagcattgcctttgtttagtttttgttgatactcgatgattatcgcttaagactgcgacaatttgggttttaggcttttagggttttgcattgtagctttgtcgtgtacgcgcgtgtttgcttgtatcatctgtcattgaagattgtttatcatgttcgaaattgtgagatatgctttgtgatttaaagaaagatcttttgtggctt

SEQ ID NO: 21922 - protein, 345 aa, Arabidopsis thaliana
  peptide (1)..(345): Ceres Seq. ID no. 12328919
MMNLSSRRASSTLTLSFTVLLLASTGSYGSTFTFANRCGYTVWPGILSNAGSPTLSTTGFELPKGTSRSLQAPTGWSGRFWARTGCKFDSSGSGTCKTGDCGSNAVECAGLGAAPPVTLAEFTLGTGGDDFYDVSLVDGYNIPMIVEVAGGSGQCASTGCTTDLNIQCPAELRFGDGDACKSACLAFRSPEYCCSGAYATPSSCRPSVYSEMFKAACPRSYSYAYDDATSTFTCAGGDYTVTFCPSSPSQKSTSYSPPVTDSSSTSQGSDPVPGSDTGYAGQGQQTPGQGNVYGSQGTGSEMGTGETMLQDGSWMAGLAMGEASRPAGVSLTVLLAAFTFPFIFS

SEQ ID NO: 21923 - protein, 344 aa, Arabidopsis thaliana
  peptide (1)..(344): Ceres Seq. ID no. 12328920
MNLSSRRASSTLTLSFTVLLLASTGSYGSTFTFANRCGYTVWPGILSNAGSPTLSTTGFELPKGTSRSLQAPTGWSGRFWARTGCKFDSSGSGTCKTGDCGSNAVECAGLGAAPPVTLAEFTLGTGGDDFYDVSLVDGYNIPMIVEVAGGSGQCASTGCTTDLNIQCPAELRFGDGDACKSACLAFRSPEYCCSGAYATPSSCRPSVYSEMFKAACPRSYSYAYDDATSTFTCAGGDYTVTFCPSSPSQKSTSYSPPVTDSSSTSQGSDPVPGSDTGYAGQGQQTPGQGNVYGSQGTGSEMGTGETMLQDGSWMAGLAMGEASRPAGVSLTVLLAAFTFPFIFS

SEQ ID NO: 21924 - protein, 202 aa, Arabidopsis thaliana
  peptide (1)..(202): Ceres Seq. ID no. 12328921
MIVEVAGGSGQCASTGCTTDLNIQCPAELRFGDGDACKSACLAFRSPEYCCSGAYATPSSCRPSVYSEMFKAACPRSYSYAYDDATSTFTCAGGDYTVTFCPSSPSQKSTSYSPPVTDSSSTSQGSDPVPGSDTGYAGQGQQTPGQGNVYGSQGTGSEMGTGETMLQDGSWMAGLAMGEASRPAGVSLTVLLAAFTFPFIFS

SEQ ID NO: 21925 - DNA, 647 bp, Arabidopsis thaliana
  misc_feature (1)..(647): Ceres Seq. ID no. 13580661
  misc_feature (1)..(647): Ortholog of  Ceres SEQ ID NO 15172660 as cited in SEQ ID NO 68708
aacatcctaatcgaaaaccggcgccaccattaaaatctctcgatctctatctgcgaaatttcacggtaggtatttgaaatggcgacagttccaggacaattgatctgggagatcgtgaagaacaacaactgtttcttggtgaagcagttcggtagaggaaactctaaggttcaattcagcaaggagactaacaacctcaccaacgttcactcttacaagcactctggtcttgcaaacaaaaagactgtgaccatccaggccgctgacaaggaccaagctgttgtgctcgccaccaccaagaccaagaagcagaacaagcctaagctctctgtcaacaagtctatcctcaagaaggaattccccaggatgtcaaaggctgttgctaaccaggtggtggacaactactacaggccggacttgaagaaagctgcacttgctagactcagcgccatcagcaaaggtctcagggttgccaagtccggtgccaagcaaagaaacagacaagcttaagcttcttctttcacaatctgttttttttgaagtaaaagattttgttgaacaggttttatttaagttgttgctttgaagttgaaccataatgctattctcctttttcattatccttattataaaggagttagaagttt

SEQ ID NO: 21926 - protein, 143 aa, Arabidopsis thaliana [sequence omitted]

SEQ ID NO: 21927 - DNA, 780 bp, Arabidopsis thaliana
  misc_feature (1)..(780): Ceres Seq. ID no. 12331618
  misc_feature (1)..(780): Ortholog of  Ceres SEQ ID NO 13595021 as cited in SEQ ID NO 55815
tttcatctctatccatttactccacagagaaagattcagagaaaacagaagaaactatggcaactcaagccgccggaatcttcagccccgccataacaaccactacttccgccgtcaagaaactccacctcttctcatcaagccaccgtcccaagtctctctccttcaccaaaaccgccatccgcgccgagaaaacagagtcctcctctgctgccccagccgtgaaagaagctccagttggattcactcccccgcagctagacccaaacacaccatcaccaatcttcgccggaagcacaggaggtctcctccgtaaagcacaagtagaggaattttacgtgatcacatggaactcaccgaaagaacaaatctttgagatgccaacaggaggagctgcgataatgagagaaggaccgaatctattgaaactggcgaggaaagaacagtgtttggctttaggtacgaggttgaggtcaaagtacaagatcacttaccagttttacagagtgttccctaacggagaggttcaatatcttcacccgaaagatggagtttatccagagaaagcgaatccaggaagagaaggtgttggactaaacatgagatccatcggtaaaaatgttagtcccattgaggttaaattcactgggaaacaatcttatgatttgtaagattttaattcgtattttatataataatgctagacaaacaaaacaaatttaaaaagggatcacactacatgtaaaatcttgcggatgttataacaactctttgaacttt

SEQ ID NO: 21928 - protein, 222 aa, Arabidopsis thaliana
  peptide (1)..(222): Ceres Seq. ID no. 12331619
SSLSIYSTEKDSEKTEETMATQAAGIFSPAITTTTSAVKKLHLFSSSHRPKSLSFTKTAIRAEKTESSSAAPAVKEAPVGFTPPQLDPNTPSPIFAGSTGGLLRKAQVEEFYVITWNSPKEQIFEMPTGGAAIMREGPNLLKLARKEQCLALGTRLRSKYKITYQFYRVFPNGEVQYLHPKDGVYPEKANPGREGVGLNMRSIGKNVSPIEVKFTGKQSYDL

SEQ ID NO: 21929 - protein, 204 aa, Arabidopsis thaliana
  peptide (1)..(204): Ceres Seq. ID no. 12331620
MATQAAGIFSPAITTTTSAVKKLHLFSSSHRPKSLSFTKTAIRAEKTESSSAAPAVKEAPVGFTPPQLDPNTPSPIFAGSTGGLLRKAQVEEFYVITWNSPKEQIFEMPTGGAAIMREGPNLLKLARKEQCLALGTRLRSKYKITYQFYRVFPNGEVQYLHPKDGVYPEKANPGREGVGLNMRSIGKNVSPIEVKFTGKQSYDL

SEQ ID NO: 21930 - DNA, 952 bp, Arabidopsis thaliana
  misc_feature (1)..(952): Ceres Seq. ID no. 12394134
  misc_feature (1)..(952): Ortholog of  Ceres SEQ ID NO 13595271 as cited in SEQ ID NO 56058
  misc_feature (1)..(952): Ortholog of  Ceres SEQ ID NO 14315170 as cited in SEQ ID NO 60009
  misc_feature (1)..(952): Ortholog of  Ceres SEQ ID NO 13656105 as cited in SEQ ID NO 65310
aagtttctgagatttccggatttagatttagggttttgtaactttggagagctcaagttctgtttcgttcatctccctcttaattcactttaattcagggtttagggtttcatttattttgttttccccaattcgatatgtattctgatctagtggtggctgaaactaaaagcagcaaaacggtaaagaaccgtctcaatggtggttccggtgacttctcttctcgcgggaaacaacaacaagtcacgaggaagagaggaaggcaagatgatgataagtgggagcatgatcttttcgaagacgatgacgagcctcggctttcaaaacgtagagttgaccctaaagatcttcgcttgaagctccaaaagaaacgtcatggctcgcaaattggtggacgagtatttagtgtaagcgtggcggatctacgagataagttatccaggacagtgaatccacaaacaaagaacagtaaaagggaggctgttagaccagccataaagaaggtttcagtgggaaccaaacccgagactagagcggctccgaatagagctaccaagaaggatccacagcagactgatgcatcggttgatagcttcctggaatcattgggtctcgagaaatattcgactgcatttcaagtggaagaagttgatatggatgctctcaggcatatgacagatgatgacctcaaagctttgctcataccaatgggacctaggaagaagatacttcttgctttgggagataaccgtggatagtccagcttcgagcttaggggcatgatgatacacatctcggatattgtcagaaagatgatgcattttgacttttcattgtctttttatctttctcatatgtatctcaagagacaacaagtagttagagttttgagattaaacagttgtaaccttttaacatagagagacaagaggagcaatgttggaatgtgttt

SEQ ID NO: 21931 - protein, 206 aa, Arabidopsis thaliana
  peptide (1)..(206): Ceres Seq. ID no. 12394135
MYSDLVVAETKSSKTVKNRLNGGSGDFSSRGKQQQVTRKRGRQDDDKWEHDLFEDDDEPRLSKRRVDPKDLRLKLQKKRHGSQIGGRVFSVSVADLRDKLSRTVNPQTKNSKREAVRPAIKKVSVGTKPETRAAPNRATKKDPQQTDASVDSFLESLGLEKYSTAFQVEEVDMDALRHMTDDDLKALLIPMGPRKKILLALGDNRG

SEQ ID NO: 21932 - DNA, 1085 bp, Arabidopsis thaliana
  misc_feature (1)..(1085): Ceres Seq. ID no. 13622051
  misc_feature (1)..(1085): Ortholog of  Ceres SEQ ID NO 13658282 as cited in SEQ ID NO 66701
aatatccgtattccctctctctctccctttctatctgagcttctctctcttactctctccagagcaacaatggctgcgactgcttcttctcttacaatcgcgtcgtcattctccgaaccacggactcagatccattcctcgagacgtttgaatctccctcttcaatattcaatcccgtacaaggtgttacggagtaggagtagaagattaggactcgtcgtcagttctgtttcagctcccaacgttgagctccgtactggacctgatgatctcatttctaccctcctctctaaggttgcgaatagtgatggaggtgtgacgctaagccctgagcagcacaaggaggtggcacaagtggccggagagcttcaaaagtactgtgtcaaggagcctgtcaaaaatcctctcatttttggagattgggaagtggtgtactgttctagaccaacctctcctggtggaggctacagaagcgtgataggccgtctcttcttcaaaacgaaagagatgatacaagccatcgatgctcctgatatcgttaggaacaaagtttccattaatgcttttggttttctagacggagacgtctccttgacagggaagctgaaagcgttggacagtgagtgggtgcaggtgatatttgagcctccggaaatcaaggttggatctttggagttcaaatacgggttcgaaagcgaagtgaagcttcggatcacatacgttgatgagaaacttaggttgggattgggatctaaaggatcattgttcgtctttagaaggcgtcaataatatatacgtttctccctcgtgcatcaaccaatgcaaatcactacagaaaaaaaggaaacaacatatggggtcctgcgagagtatgatggtcaatatccacaatgctgtgtacacaaatggtgttttagatataactttgttgtaatgtaaacttcattttaagagtgtctcacttcagatgagttgttgaggaagctactggtgaacttcaacatcttttcgcaaagaattactatagcaacaaagaaagataaatgacttagcagcctttatgttcaaattcaaaacctctcacc

SEQ ID NO: 21933 - protein, 262 aa, Arabidopsis thaliana
  peptide (1)..(262): Ceres Seq. ID no. 13622052
NIRIPSLSPFLSELLSLTLSRATMAATASSLTIASSFSEPRTQIHSSRRLNLPLQYSIPYKVLRSRSRRLGLVVSSVSAPNVELRTGPDDLISTLLSKVANSDGGVTLSPEQHKEVAQVAGELQKYCVKEPVKNPLIFGDWEVVYCSRPTSPGGGYRSVIGRLFFKTKEMIQAIDAPDIVRNKVSINAFGFLDGDVSLTGKLKALDSEWVQVIFEPPEIKVGSLEFKYGFESEVKLRITYVDEKLRLGLGSKGSLFVFRRRQ

SEQ ID NO: 21934 - protein, 239 aa, Arabidopsis thaliana
  peptide (1)..(239): Ceres Seq. ID no. 13622053
MAATASSLTIASSFSEPRTQIHSSRRLNLPLQYSIPYKVLRSRSRRLGLVVSSVSAPNVELRTGPDDLISTLLSKVANSDGGVTLSPEQHKEVAQVAGELQKYCVKEPVKNPLIFGDWEVVYCSRPTSPGGGYRSVIGRLFFKTKEMIQAIDAPDIVRNKVSINAFGFLDGDVSLTGKLKALDSEWVQVIFEPPEIKVGSLEFKYGFESEVKLRITYVDEKLRLGLGSKGSLFVFRRRQ

SEQ ID NO: 21935 - DNA, 776 bp, Arabidopsis thaliana
  misc_feature (1)..(776): Ceres Seq. ID no. 12420902
  misc_feature (1)..(776): Ortholog of  Ceres SEQ ID NO 12635162 as cited in SEQ ID NO 0
  misc_feature (1)..(776): Ortholog of  Ceres SEQ ID NO 15175178 as cited in SEQ ID NO 0
attcacacctcttgttaccttcaaaaccttctctcaatctcctccattatccttctctttttctctctccctgcaactggctccatcccaaagtgcttcgttctggtacagcgaccatggcagtttttgttcttgtgatgattttgttggccatggctggtcactcaagtgggacatggtgtgtatgcaaagaagggttaagcgaggcaatgctgcagaagacattggactacgcatgtggtgcaggagctgattgtggacccattcaccagaccgggccttgctttaaccctaacaccgtcaagtctcactgctcctacgccgtcaacagcttctttcagaagaaaggtcagtctctgggcacttgtgactttgctggcacagccaccttctcagcctctgatcccagctacactacttgtcctttccctgcaagtgccagtggaagtgggacaacgactccagtgacgacaacaccttcgacaagagtccctacaacaactaatacaagaccctacacaatcacaccatcaacaggaggaggtttgggaataccgtctggtattaacccggattacacagatccatcctttggattcaaactccaaagcccaagatttggattcatagtcttgttcactctcttcctacccttttacttgtttagctaactaagtgatcatgtgagtagtgtgtgtgggtctcaatctaatgtaatgatggaatctatggagatagagacatttttttgttccatctttgtctgtttttccagc

SEQ ID NO: 21936 - protein, 222 aa, Arabidopsis thaliana
  peptide (1)..(222): Ceres Seq. ID no. 12420903
SHLLLPSKPSLNLLHYPSLFLSPCNWLHPKVLRSGTATMAVFVLVMILLAMAGHSSGTWCVCKEGLSEAMLQKTLDYACGAGADCGPIHQTGPCFNPNTVKSHCSYAVNSFFQKKGQSLGTCDFAGTATFSASDPSYTTCPFPASASGSGTTTPVTTTPSTRVPTTTNTRPYTITPSTGGGLGIPSGINPDYTDPSFGFKLQSPRFGFIVLFTLFLPFYLFS

SEQ ID NO: 21937 - protein, 184 aa, Arabidopsis thaliana
  peptide (1)..(184): Ceres Seq. ID no. 12420904
MAVFVLVMILLAMAGHSSGTWCVCKEGLSEAMLQKTLDYACGAGADCGPIHQTGPCFNPNTVKSHCSYAVNSFFQKKGQSLGTCDFAGTATFSASDPSYTTCPFPASASGSGTTTPVTTTPSTRVPTTTNTRPYTITPSTGGGLGIPSGINPDYTDPSFGFKLQSPRFGFIVLFTLFLPFYLFS

SEQ ID NO: 21938 - protein, 177 aa, Arabidopsis thaliana
  peptide (1)..(177): Ceres Seq. ID no. 12420905
MILLAMAGHSSGTWCVCKEGLSEAMLQKTLDYACGAGADCGPIHQTGPCFNPNTVKSHCSYAVNSFFQKKGQSLGTCDFAGTATFSASDPSYTTCPFPASASGSGTTTPVTTTPSTRVPTTTNTRPYTITPSTGGGLGIPSGINPDYTDPSFGFKLQSPRFGFIVLFTLFLPFYLFS

SEQ ID NO: 21939 - DNA, 1408 bp, Arabidopsis thaliana
  misc_feature (1)..(1408): Ceres Seq. ID no. 13495671
  misc_feature (1)..(1408): Ortholog of  Ceres SEQ ID NO 14315455 as cited in SEQ ID NO 56988
tttttttttttttttcttctgctttcgtgactttcaggggacacttttgtttttataacttacgcttaaaatcctatgaattcgccgccggttgacgcaatgattaccggagaatcatcgtcacaaagatctatcccaacgccgtttctcacaaaaacgtttaacctcgttgaagatagttccatcgacgatgttatctcatggaacgaagatggttcctctttcatcgtatggaatccgacagatttcgctaaagatttgcttcctaaacacttcaaacacaacaatttctctagtttcgttcgtcagctcaacacttacggattcaaaaaagttgtaccggatcgatgggagttttcaaacgatttctttaagagaggagaaaaacgtcttctccgtgagatccaacgtcggaaaataacaacgacgcatcaaacagttgttgctccttcgtcggaacaacgaaaccagacgatggttgtatcaccgtcaaattccggggaagataataataataatcaggtgatgtcttcgtctccgtcgtcgtggtattgtcatcaaacgaagacgactgggaatggtggtttatcagtggagttattggaagagaacgagaagcttcggagtcaaaacattcagctaaaccgtgagcttactcagatgaaatctatctgcgataatatctatagtctcatgtcgaattacgtcggatctcagcccactgatcggagttattctcccggaggtagtagtagtcaaccgatggagtttttaccggcgaagcggttttcggagatggagattgaagaagaagaagaagcgagtccgaggttgtttggtgttccgattgggttaaaacggacgagaagtgaaggtgttcaggtgaagacgacggcggtggttggggaaaattccgatgaggagacgccgtggttgagacattataatcgaaccaatcagagagtttgtaattaaaaacgaacggtttagatttgtggtgtagatatgtgcgcgaagtagacgattacagctttttaagacaagcagagcacgtgtcccatctgtttcaagaagtttctgcaatcttgacttcttcttttaacactttgtgttttttattatttaattaataacaataaatgttctttttcagttttgttttcttcaaaaatagttcggctgtttctagactttccttttttgacctttttttattcttcacatctttttgtgtgttttacaaatataataaacgagaaatgaggtagggatttcttattataaggataagaaattaaaatttgtaatgtaatgaagcatctggaatctcccgtttggtgggcgcgattcagggaacgtgttgtggacccagtttcgtcgactatcacaagtacatttttagattttc

SEQ ID NO: 21940 - protein, 299 aa, Arabidopsis thaliana
  peptide (1)..(299): Ceres Seq. ID no. 13495672
MNSPPVDAMITGESSSQRSIPTPFLTKTFNLVEDSSIDDVISWNEDGSSFIVWNPTDFAKDLLPKHFKHNNFSSFVRQLNTYGFKKVVPDRWEFSNDFFKRGEKRLLREIQRRKITTTHQTVVAPSSEQRNQTMVVSPSNSGEDNNNNQVMSSSPSSWYCHQTKTTGNGGLSVELLEENEKLRSQNIQLNRELTQMKSICDNIYSLMSNYVGSQPTDRSYSPGGSSSQPMEFLPAKRFSEMEIEEEEEASPRLFGVPIGLKRTRSEGVQVKTTAVVGENSDEETPWLRHYNRTNQRVCN

SEQ ID NO: 21941 - protein, 291 aa, Arabidopsis thaliana
  peptide (1)..(291): Ceres Seq. ID no. 13495673
MITGESSSQRSIPTPFLTKTFNLVEDSSIDDVISWNEDGSSFIVWNPTDFAKDLLPKHFKHNNFSSFVRQLNTYGFKKVVPDRWEFSNDFFKRGEKRLLREIQRRKITTTHQTVVAPSSEQRNQTMVVSPSNSGEDNNNNQVMSSSPSSWYCHQTKTTGNGGLSVELLEENEKLRSQNIQLNRELTQMKSICDNIYSLMSNYVGSQPTDRSYSPGGSSSQPMEFLPAKRFSEMEIEEEEEASPRLFGVPIGLKRTRSEGVQVKTTAVVGENSDEETPWLRHYNRTNQRVCN

SEQ ID NO: 21942 - protein, 166 aa, Arabidopsis thaliana
  peptide (1)..(166): Ceres Seq. ID no. 13495674
MVVSPSNSGEDNNNNQVMSSSPSSWYCHQTKTTGNGGLSVELLEENEKLRSQNIQLNRELTQMKSICDNIYSLMSNYVGSQPTDRSYSPGGSSSQPMEFLPAKRFSEMEIEEEEEASPRLFGVPIGLKRTRSEGVQVKTTAVVGENSDEETPWLRHYNRTNQRVCN

SEQ ID NO: 21943 - DNA, 974 bp, Arabidopsis thaliana
  misc_feature (1)..(974): Ceres Seq. ID no. 12337925
  misc_feature (1)..(974): Ortholog of  Ceres SEQ ID NO 15177742 as cited in SEQ ID NO 1202
  misc_feature (1)..(974): Ortholog of  Ceres SEQ ID NO 15226750 as cited in SEQ ID NO 58711
caatatgattgaggctgctaggatcaatgggattaagaggttcttttatgcttcgagtgcttgtatctatccagagtttaagcagttggagactactaatgtgagcttgaaggagtcagatgcttggcctgcagagcctcaagatgcttatggtttggagaagcttgctacggaggagttgtgtaagcattacaacaaagattttggtattgagtgtcgaattggaaggttccataacatttatggtccttttggaacatggaaaggtggaagggagaaggctccagctgctttctgtaggaaggctcagacttccactgataggtttgagatgtggggagacgggcttcagacccgttcttttacctttatcgatgagtgtgttgaaggtgtactcaggttgacaaaatcagatttccgtgagccggtgaacatcggaagcgatgagatggtgagcatgaatgagatggctgagatggttctcagctttgaggaaaagaagcttccaattcaccacattcctggcccggaaggtgttcgtggtcgtaactcagacaacaatctgatcaaagaaaagcttggttgggctcctaatatgagattgaaggaggggcttagaataacctacttctggataaaggaacagatcgagaaagagaaagcaaagggaagcgatgtgtcgctttacgggtcatcaaaggtggttggaactcaagcaccggttcagctaggctcactccgcgcggctgatggaaaagagtgaagttcaccaaagtataagtcaagctcaaatatggccttttaagttcagcaaaatgtttagatatatttttaggtagcttcctattaaaaaagcaataataagtgttttggattttggttccttctcttctgctaatccttgtttatgtttagttgaaaaagtttgcttgcattgttaagtctgttataatattattgtggtcctttcatcc

SEQ ID NO: 21944 - protein, 253 aa, Arabidopsis thaliana
  peptide (1)..(253): Ceres Seq. ID no. 12337926
NMIEAARINGIKRFFYASSACIYPEFKQLETTNVSLKESDAWPAEPQDAYGLEKLATEELCKHYNKDFGIECRIGRFHNIYGPFGTWKGGREKAPAAFCRKAQTSTDRFEMWGDGLQTRSFTFIDECVEGVLRLTKSDFREPVNIGSDEMVSMNEMAEMVLSFEEKKLPIHHIPGPEGVRGRNSDNNLIKEKLGWAPNMRLKEGLRITYFWIKEQIEKEKAKGSDVSLYGSSKVVGTQAPVQLGSLRAADGKE

SEQ ID NO: 21945 - protein, 252 aa, Arabidopsis thaliana
  peptide (1)..(252): Ceres Seq. ID no. 12337927
MIEAARINGIKRFFYASSACIYPEFKQLETTNVSLKESDAWPAEPQDAYGLEKLATEELCKHYNKDFGIECRIGRFHNIYGPFGTWKGGREKAPAAFCRKAQTSTDRFEMWGDGLQTRSFTFIDECVEGVLRLTKSDFREPVNIGSDEMVSMNEMAEMVLSFEEKKLPIHHIPGPEGVRGRNSDNNLIKEKLGWAPNMRLKEGLRITYFWIKEQIEKEKAKGSDVSLYGSSKVVGTQAPVQLGSLRAADGKE

SEQ ID NO: 21946 - protein, 143 aa, Arabidopsis thaliana
  peptide (1)..(143): Ceres Seq. ID no. 12337928
MWGDGLQTRSFTFIDECVEGVLRLTKSDFREPVNIGSDEMVSMNEMAEMVLSFEEKKLPIHHIPGPEGVRGRNSDNNLIKEKLGWAPNMRLKEGLRITYFWIKEQIEKEKAKGSDVSLYGSSKVVGTQAPVQLGSLRAADGKE

SEQ ID NO: 21947 - DNA, 905 bp, Arabidopsis thaliana
  misc_feature (1)..(905): Ceres Seq. ID no. 12329740
  misc_feature (1)..(905): Ortholog of  Ceres SEQ ID NO 13662725 as cited in SEQ ID NO 64628
aatcgttcgtaaaattggggccgatagagaaacaaaaatttcccaggaaaaaggcagtgattgaagattgtattagatccgattaatcgtcttcctggtcgcttgaactgagaatcaaataattgagctcaactggatttggatatgggagagacagcaacagattcagaacatcgcatgatgatcggattatcggatcctatgaaaattgatcccaaaagagaccggtttccatgctgcattgtttggacacctcttcccttcatttcatggctggttcccttcatcggccacgtcggtatctgcagagaagacggtgtcatcctcgactttgcaggacctaattttgtctgtgttgataattttgcatttggagctgtttctcgatatattcaaatcaacaaagaaatggagtcatctcgttcttccagttctggtatgttcaatggtgagaggagatatgagcaagaagaagatagtcatgagaaagagccaacatgggatgatgcactgagaaaaagcacgcaagagtaccaacatcactcatataacatactcacatgcaactgtcattcctttgtagccaacaacctgaaccgtctatctataaagtcaggcggatggaacgtggtgaatctcgcgacactagtgcttttcaagggacgttgggtgaacaaaacggctatagtaaagtccttgttgcctccactcatagtctacactataggaatcttactcggtggttggactttcattgcctcctgctcgattctagtggttttgcttaccgggtggttcatcattggaacgtattgtttcaagaaactgattcagctgtagatttgaatcataatgtacaaatgatgtctacaaaatgttttttactttttacgatggatatttac

SEQ ID NO: 21948 - protein, 231 aa, Arabidopsis thaliana
  peptide (1)..(231): Ceres Seq. ID no. 12329741
MGETATDSEHRMMIGLSDPMKIDPKRDRFPCCIVWTPLPFISWLVPFIGHVGICREDGVILDFAGPNFVCVDNFAFGAVSRYIQINKEMESSRSSSSGMFNGERRYEQEEDSHEKEPTWDDALRKSTQEYQHHSYNILTCNCHSFVANNLNRLSIKSGGWNVVNLATLVLFKGRWVNKTAIVKSLLPPLIVYTIGILLGGWTFIASCSILVVLLTGWFIIGTYCFKKLIQL

SEQ ID NO: 21949 - protein, 220 aa, Arabidopsis thaliana
  peptide (1)..(220): Ceres Seq. ID no. 12329742
MMIGLSDPMKIDPKRDRFPCCIVWTPLPFISWLVPFIGHVGICREDGVILDFAGPNFVCVDNFAFGAVSRYIQINKEMESSRSSSSGMFNGERRYEQEEDSHEKEPTWDDALRKSTQEYQHHSYNILTCNCHSFVANNLNRLSIKSGGWNVVNLATLVLFKGRWVNKTAIVKSLLPPLIVYTIGILLGGWTFIASCSILVVLLTGWFIIGTYCFKKLIQL

SEQ ID NO: 21950 - protein, 219 aa, Arabidopsis thaliana
  peptide (1)..(219): Ceres Seq. ID no. 12329743
MIGLSDPMKIDPKRDRFPCCIVWTPLPFISWLVPFIGHVGICREDGVILDFAGPNFVCVDNFAFGAVSRYIQINKEMESSRSSSSGMFNGERRYEQEEDSHEKEPTWDDALRKSTQEYQHHSYNILTCNCHSFVANNLNRLSIKSGGWNVVNLATLVLFKGRWVNKTAIVKSLLPPLIVYTIGILLGGWTFIASCSILVVLLTGWFIIGTYCFKKLIQL

SEQ ID NO: 21951 - DNA, 1051 bp, Arabidopsis thaliana
  misc_feature (1)..(1051): Ceres Seq. ID no. 12393907
  misc_feature (1)..(1051): Ortholog of  Ceres SEQ ID NO 13599448 as cited in SEQ ID NO 521
  misc_feature (1)..(1051): Ortholog of  Ceres SEQ ID NO 14311918 as cited in SEQ ID NO 51684
  misc_feature (1)..(1051): Ortholog of  Ceres SEQ ID NO 13596408 as cited in SEQ ID NO 62028
aaatcgaaaggcacagcccaacttttcgcaagtcgctgtaaagtttgatttgcttctttttatatacacacatacttctcctccatacactttcctcttcaatcctcagttttttttctaagccctaataccatctcaaagaagagatcaagatttgaaatcaagaagacaccattactcagatcaacatgcttgccgttcaccgtccttcttccgccgtatcagacggagattccgttcagattccgatgatgatcgcgtcgtttcaaaaacgttttccttctctctcacgcgactccacggccgctcgttttcacacacacgaggttggtcctaatcagtgttgctccgccgttattcaagagatctccgctccaatctccaccgtttggtccgtcgtacgccgctttgataacccacaagcttacaaacactttctcaaaagctgtagcgtcatcggcggagacggcgataacgttggtagcctccgtcaagtccacgtcgtctctggtctccccgccgctagctccaccgagagactcgatatcctcgacgacgaacgccacgtcatcagcttcagcgttgttggtggtgaccaccggctctctaactaccgatccgtaacgacccttcacccttctccgatctccgggaccgtcgttgtcgagtcttacgtcgttgatgttcctccaggcaacacaaaggaagagacttgtgacttcgttgacgttatcgtacgatgcaatcttcaatctcttgcgaaaatagccgagaatactgcggctgagagcaagaagaagatgtctctgtgatgagtctttgtcgttgtcgggtagtttcgttagatccgacgtcgttttctagatttttagccgtcgtgtgatctatgttttttcggcttatgtgtgaaaaaaaagttacattagtgaattaatctctcatgcatatcataatccttcttttaatttttgtattttacatatcccataaagaaccgatttggatagccctattccggctttcaccacccaaagataataatattcaaact

SEQ ID NO: 21952 - protein, 207 aa, Arabidopsis thaliana
  peptide (1)..(207): Ceres Seq. ID no. 12393908
MLAVHRPSSAVSDGDSVQIPMMIASFQKRFPSLSRDSTAARFHTHEVGPNQCCSAVIQEISAPISTVWSVVRRFDNPQAYKHFLKSCSVIGGDGDNVGSLRQVHVVSGLPAASSTERLDILDDERHVISFSVVGGDHRLSNYRSVTTLHPSPISGTVVVESYVVDVPPGNTKEETCDFVDVIVRCNLQSLAKIAENTAAESKKKMSL

SEQ ID NO: 21953 - protein, 187 aa, Arabidopsis thaliana
  peptide (1)..(187): Ceres Seq. ID no. 12393909
MMIASFQKRFPSLSRDSTAARFHTHEVGPNQCCSAVIQEISAPISTVWSVVRRFDNPQAYKHFLKSCSVIGGDGDNVGSLRQVHVVSGLPAASSTERLDILDDERHVISFSVVGGDHRLSNYRSVTTLHPSPISGTVVVESYVVDVPPGNTKEETCDFVDVIVRCNLQSLAKIAENTAAESKKKMSL

SEQ ID NO: 21954 - protein, 186 aa, Arabidopsis thaliana
  peptide (1)..(186): Ceres Seq. ID no. 12393910
MIASFQKRFPSLSRDSTAARFHTHEVGPNQCCSAVIQEISAPISTVWSVVRRFDNPQAYKHFLKSCSVIGGDGDNVGSLRQVHVVSGLPAASSTERLDILDDERHVISFSVVGGDHRLSNYRSVTTLHPSPISGTVVVESYVVDVPPGNTKEETCDFVDVIVRCNLQSLAKIAENTAAESKKKMSL

SEQ ID NO: 21955 - DNA, 656 bp, Arabidopsis thaliana
  misc_feature (1)..(656): Ceres Seq. ID no. 12355540
  misc_feature (1)..(656): Ortholog of  Ceres SEQ ID NO 12780822 as cited in SEQ ID NO 67471
atccttgtaagacgaatcttctcaagctactcgttcgactttagcactcgtatagtctcaacgcttcacgcaacaatcgctgtcactttagcaactctctcgattcaagattggtcttgtcctgtttgtcccattgcttctacatcgtctctccggcagatggaaacgttggctttttcattgtcttacatgatctacgatctcatttgtagccactttgatcaagtccttagcattgataatgcggttcatcattctgtttgcattcttggttttgtagctggacttttctaccaaaagtgtggatccgagatggtggcagcaatatggataacagagatctcaagtccgtttcttcacctcagggagattcttaaagagattggttatagagacaccgacctaaatcttgcagccgatgtgtgttttgcaacaattttctcgttggccagaatggtgggtggaccttacctagtttacgtaacaatatcagccgataatcccattctcatcaaggtatatcctaatatatgaatatcagaaattcagaatatgacatacatttcgttttggtctatatttattatcgtttcatcaattgttcaaagtttttataaagatgtgaaactttcaagattgaaaagaatattttattt

SEQ ID NO: 21956 - protein, 177 aa, Arabidopsis thaliana
  peptide (1)..(177): Ceres Seq. ID no. 12355541
ILVRRIFSSYSFDFSTRIVSTLHATIAVTLATLSIQDWSCPVCPIASTSSLRQMETLAFSLSYMIYDLICSHFDQVLSIDNAVHHSVCILGFVAGLFYQKCGSEMVAAIWITEISSPFLHLREILKEIGYRDTDLNLAADVCFATIFSLARMVGGPYLVYVTISADNPILIKVYPNI

SEQ ID NO: 21957 - protein, 124 aa, Arabidopsis thaliana
  peptide (1)..(124): Ceres Seq. ID no. 12355542
METLAFSLSYMIYDLICSHFDQVLSIDNAVHHSVCILGFVAGLFYQKCGSEMVAAIWITEISSPFLHLREILKEIGYRDTDLNLAADVCFATIFSLARMVGGPYLVYVTISADNPILIKVYPNI

SEQ ID NO: 21958 - protein, 114 aa, Arabidopsis thaliana
  peptide (1)..(114): Ceres Seq. ID no. 12355543
MIYDLICSHFDQVLSIDNAVHHSVCILGFVAGLFYQKCGSEMVAAIWITEISSPFLHLREILKEIGYRDTDLNLAADVCFATIFSLARMVGGPYLVYVTISADNPILIKVYPNI

SEQ ID NO: 21959 - DNA, 1272 bp, Arabidopsis thaliana
  misc_feature (1)..(1272): Ceres Seq. ID no. 12333884
  misc_feature (1)..(1272): Ortholog of  Ceres SEQ ID NO 14311596 as cited in SEQ ID NO 51728
  misc_feature (1)..(1272): Ortholog of  Ceres SEQ ID NO 12617197 as cited in SEQ ID NO 63406
  misc_feature (1)..(1272): Ortholog of  Ceres SEQ ID NO 13597804 as cited in SEQ ID NO 64182
  misc_feature (1)..(1272): Ortholog of  Ceres SEQ ID NO 14302768 as cited in SEQ ID NO 64889
  misc_feature (1)..(1272): Ortholog of  Ceres SEQ ID NO 13598565 as cited in SEQ ID NO 65250
  misc_feature (1)..(1272): Ortholog of  Ceres SEQ ID NO 13598597 as cited in SEQ ID NO 65496
  misc_feature (1)..(1272): Ortholog of  Ceres SEQ ID NO 13596284 as cited in SEQ ID NO 68273
  misc_feature (1)..(1272): Ortholog of  Ceres SEQ ID NO 13596227 as cited in SEQ ID NO 68750
  misc_feature (1)..(1272): Ortholog of  Ceres SEQ ID NO 14308995 as cited in SEQ ID NO 0
  misc_feature (1)..(1272): Ortholog of  Ceres SEQ ID NO 15179068 as cited in SEQ ID NO 0
actactctcttaagccctttcataaccttgtaaaccattaagaggctttgctcaattacaagaagaagaaaaaatgcctgtcgacgggaaactcgtctgcgtcaccggagccggcggctacattgcttcttggatcgttaagttactcttagagagaggctacaccgttagaggaaccgtaaggaacccaactgatcccaagaacaaccatctcagagagcttcaaggagccaaggaaagactcactcttcacagtgcagatcttctcgactacgaagctctctgtgccgcaatcgacggttgcgatggcgttttccacactgcctctccgatgaccgacgatcccgagacaatgttggagccggcggtgaacggagccaagttcgtgattgacgcagcggctaaagccaaggtcaagcgcgtggttttcacgtcatcaattggtgcagtttacatgaaccctaaccgtgacactcaagccattgttgacgaaaactgctggagtgatcttgatttctgcaaaaacactaagaattggtattgctacgggaagatgttggcggaacaatcggcgtgggagacggccaaagcaaaaggtgtggacttagtggtgctaaatccggttttggttctcggaccaccgctccagtcagcgatcaacgctagtctagtccatattctcaagtacctcaccggctcagccaagacctacgctaacttgactcaggtctacgtggacgtccgtgacgtggcactaggccatgttctggtctacgaagcaccctccgcctcaggccgttacatcctcgccgagaccgcacttcaccgcggagaggttgttgagattctggccaaattcttcccggagtatccacttcccaccaagtgttcggacgagaagaatccgagggctaagccatacaagtttactacccaaaagataaaagacttaggcttggaatttaaacccatcaagcaatctctttacgaatatgtcaagagcttgcaagagaaaggtcatcttcctctacctcaagattcgaaccaaaacgaagtcatcatcgaaccttaggacacgatccacgaccctagaatctcttcatacctacatgaaaagctttattcttaagtaatacatacgttttggttttgactaaagtattgttaaatcttaaatcattatatatagctgattgttctttctttctttggttgtaattgagaatatgttacgcatatgtattatacgataatggaagcaatggttttatc

SEQ ID NO: 21960 - protein, 332 aa, Arabidopsis thaliana
  peptide (1)..(332): Ceres Seq. ID no. 12333885
MPVDGKLVCVTGAGGYIASWIVKLLLERGYTVRGTVRNPTDPKNNHLRELQGAKERLTLHSADLLDYEALCAAIDGCDGVFHTASPMTDDPETMLEPAVNGAKFVIDAAAKAKVKRVVFTSSIGAVYMNPNRDTQAIVDENCWSDLDFCKNTKNWYCYGKMLAEQSAWETAKAKGVDLVVLNPVLVLGPPLQSAINASLVHILKYLTGSAKTYANLTQVYVDVRDVALGHVLVYEAPSASGRYILAETALHRGEVVEILAKFFPEYPLPTKCSDEKNPRAKPYKFTTQKIKDLGLEFKPIKQSLYEYVKSLQEKGHLPLPQDSNQNEVIIEP

SEQ ID NO: 21961 - protein, 246 aa, Arabidopsis thaliana
  peptide (1)..(246): Ceres Seq. ID no. 12333886
MTDDPETMLEPAVNGAKFVIDAAAKAKVKRVVFTSSIGAVYMNPNRDTQAIVDENCWSDLDFCKNTKNWYCYGKMLAEQSAWETAKAKGVDLVVLNPVLVLGPPLQSAINASLVHILKYLTGSAKTYANLTQVYVDVRDVALGHVLVYEAPSASGRYILAETALHRGEVVEILAKFFPEYPLPTKCSDEKNPRAKPYKFTTQKIKDLGLEFKPIKQSLYEYVKSLQEKGHLPLPQDSNQNEVIIEP

SEQ ID NO: 21962 - protein, 239 aa, Arabidopsis thaliana
  peptide (1)..(239): Ceres Seq. ID no. 12333887
MLEPAVNGAKFVIDAAAKAKVKRVVFTSSIGAVYMNPNRDTQAIVDENCWSDLDFCKNTKNWYCYGKMLAEQSAWETAKAKGVDLVVLNPVLVLGPPLQSAINASLVHILKYLTGSAKTYANLTQVYVDVRDVALGHVLVYEAPSASGRYILAETALHRGEVVEILAKFFPEYPLPTKCSDEKNPRAKPYKFTTQKIKDLGLEFKPIKQSLYEYVKSLQEKGHLPLPQDSNQNEVIIEP

SEQ ID NO: 21963 - DNA, 1127 bp, Arabidopsis thaliana
  misc_feature (1)..(1127): Ceres Seq. ID no. 12385171
  misc_feature (1)..(1127): Ortholog of  Ceres SEQ ID NO 13600601 as cited in SEQ ID NO 497
  misc_feature (1)..(1127): Ortholog of  Ceres SEQ ID NO 13664283 as cited in SEQ ID NO 61283
  misc_feature (1)..(1127): Ortholog of  Ceres SEQ ID NO 12635513 as cited in SEQ ID NO 0
  misc_feature (1)..(1127): Ortholog of  Ceres SEQ ID NO 15179044 as cited in SEQ ID NO 0
  misc_feature (1)..(1127): Ortholog of  Ceres SEQ ID NO 15179333 as cited in SEQ ID NO 0
aaaaccagttgtgctatttcaaagccacaagtacttggaacctttgtttcttctaccctaacatagcccttgcaaaccataaccaaaccatcatcatcatcatcatctcttggtgacagaagaaaagagttgaggaacagagaaaatggcagcacaagcacttgtgtcttcttcacttacctcctctgttcagacagctagacagatatttggctcaaaaccagttgcgtctgcctcacagaagaagagttcctttgttgttaaagctgctgcaactccacctgtcaagcaaggagccaacagaccattgtggtttgcttcatcgcagagtctctcttacttggatggcagcttacctggtgactatggattcgaccctcttggtctttcagacccagaaggtactggaggattcattgagccaagatggctagcatacggagagatcatcaacggacggttcgccatgttgggtgcagctggagctattgctcctgagattttaggaaaggctggtctgattccagcagagactgctcttccttggttccaaaccggtgtgattccaccagcagggacatacacttactgggcagacaattacacactctttgttctcgagatggctctgatgggattcgctgagcaccggaggttacaggactggtacaacccaggatctatgggaaaacagtacttcttggggttagagaagggtttggccggttcaggtaacccggcttaccccggtggacctttcttcaaccctcttgggtttgggaaagatgagaagtcactgaaggagttgaaactcaaggaggtcaagaacggtagactggctatgctcgccatcctcggttactttatccaaggactagtgaccggtgtgggaccttatcagaacctgcttgatcacttggctgatcccgtcaacaacaacgtcttgaccagcctcaagttccactgaggtgatcatcatctcatgtgtttttatgtctcttgtatcgtacaatatttccatctttcgctaccattggcttcttcgtattgtaacaccctgtgtaaacatattcgtgttttgtaagaaatgacaatgtcaatggccaaacgaaaaaacttttaggact

SEQ ID NO: 21964 - protein, 273 aa, Arabidopsis thaliana
  peptide (1)..(273): Ceres Seq. ID no. 12385172
MAAQALVSSSLTSSVQTARQIFGSKPVASASQKKSSFVVKAAATPPVKQGANRPLWFASSQSLSYLDGSLPGDYGFDPLGLSDPEGTGGFIEPRWLAYGEIINGRFAMLGAAGAIAPEILGKAGLIPAETALPWFQTGVIPPAGTYTYWADNYTLFVLEMALMGFAEHRRLQDWYNPGSMGKQYFLGLEKGLAGSGNPAYPGGPFFNPLGFGKDEKSLKELKLKEVKNGRLAMLAILGYFIQGLVTGVGPYQNLLDHLADPVNNNVLTSLKFH

SEQ ID NO: 21965 - protein, 166 aa, Arabidopsis thaliana
  peptide (1)..(166): Ceres Seq. ID no. 12385173
MLGAAGAIAPEILGKAGLIPAETALPWFQTGVIPPAGTYTYWADNYTLFVLEMALMGFAEHRRLQDWYNPGSMGKQYFLGLEKGLAGSGNPAYPGGPFFNPLGFGKDEKSLKELKLKEVKNGRLAMLAILGYFIQGLVTGVGPYQNLLDHLADPVNNNVLTSLKFH

SEQ ID NO: 21966 - DNA, 776 bp, Arabidopsis thaliana
  misc_feature (1)..(776): Ceres Seq. ID no. 12331908
  misc_feature (1)..(776): Ortholog of  Ceres SEQ ID NO 14316320 as cited in SEQ ID NO 60027
gagatacggaagaatcagatcaacgcatgcgaccaagtaaatcaaaatcgggttgaagaagaaagagataagctttcacatcaatttttgaaggcgcgaaatggggaatacttcatcgatgctgactcagtacgacatcgaagaagttcagagtcattgtcatgatctatttgagcagcaggagattttatctctgtatcaacggttttgccagttagatcgaaacgcaaaaggatttatatctgctgatgagtttctctctgtgcctgagtttgcgatgaatccactctctcagaggctgcttaagatggttgatggtttgaactttaaggattttgttgctttcttgtctgcgtttagtgccaaggctagtctaagacagaaagttcaattgatctttaaagtctatgattcggactgcaacgggaaggtctcttttaaagatatcatggaagtgttgcgtgacttatcgggatcattcatgtctgatgagcaaagagagcaagtactgagccaggttttgaaggaatcgggctacacgagtgactcattcttaactctggaggatttcataaagatctttgggagtagtagaccggagatggacgttgaaattcctgtggattagactttatgatcatatatcatcaaacacaacactcaaatctcatcttgtattttgtccacactgtttctagaataatccttgttaattgatcacatcattgcaggctttttcagcacttgttaagtatttgtcaattgaaacttgttct

SEQ ID NO: 21967 - protein, 175 aa, Arabidopsis thaliana
  peptide (1)..(175): Ceres Seq. ID no. 12331909
MGNTSSMLTQYDIEEVQSHCHDLFEQQEILSLYQRFCQLDRNAKGFISADEFLSVPEFAMNPLSQRLLKMVDGLNFKDFVAFLSAFSAKASLRQKVQLIFKVYDSDCNGKVSFKDIMEVLRDLSGSFMSDEQREQVLSQVLKESGYTSDSFLTLEDFIKIFGSSRPEMDVEIPVD

SEQ ID NO: 21968 - protein, 169 aa, Arabidopsis thaliana
  peptide (1)..(169): Ceres Seq. ID no. 12331910
MLTQYDIEEVQSHCHDLFEQQEILSLYQRFCQLDRNAKGFISADEFLSVPEFAMNPLSQRLLKMVDGLNFKDFVAFLSAFSAKASLRQKVQLIFKVYDSDCNGKVSFKDIMEVLRDLSGSFMSDEQREQVLSQVLKESGYTSDSFLTLEDFIKIFGSSRPEMDVEIPVD

SEQ ID NO: 21969 - protein, 116 aa, Arabidopsis thaliana
  peptide (1)..(116): Ceres Seq. ID no. 12331911
MNPLSQRLLKMVDGLNFKDFVAFLSAFSAKASLRQKVQLIFKVYDSDCNGKVSFKDIMEVLRDLSGSFMSDEQREQVLSQVLKESGYTSDSFLTLEDFIKIFGSSRPEMDVEIPVD

SEQ ID NO: 21970 - DNA, 1005 bp, Arabidopsis thaliana
  misc_feature (1)..(1005): Ceres Seq. ID no. 12331904
  misc_feature (1)..(1005): Ortholog of  Ceres SEQ ID NO 13647754 as cited in SEQ ID NO 20415
atataatctcgattctcttcaacggtcctcaattatcctaaattcagatcataaaaaagctaacttttaatttctttctttctgagaaattggttctcatcgttggaatcgaaaaatgggacgaatcggtttagtagtgactgatctggtattgtcgttcatgtggatatgggcaggagttctggtcaacattttagtccatggagttcttggatttagccggaccgatccttccggtgagatcgttcgttatctcttctctatcatctccatgttcatcttcgcctaccttcaacaagccaccaaaggcgggctttataatcctttgaccgctttggctgctggagtctccggtggcttcagcagtttcatcttctccgtcttcgttcgaatccccgtcgaggtaataggatcaattcttgcggttaagcatatcattcacgtattccctgagattgggaaaggacctaaactaaatgtagcaattcaccacggtgctttaacagaagggatactaacattcttcattgtactgctctcaatgggactaacaagaaaaatcccgggaagtttcttcatgaagacttggatcggtagtcttgctaagttaactcttcatattcttggctctgatcttaccggtggatgcatgaaccctgcagctgttatgggatgggcttatgcacgcggtgaacatataacgaaagagcatttacttgtgtattggcttggacctgtgaaggctacgttgcttgcagtttggttcttcaaagttgtgtttaagcctctcaccgaagaacaagagaaacctaaggccaaatctgagtgaggaatgaggaatgagctcagctttcatatttaatcctctctggataaatctcctttacacaagacacagagggtaggattgtttccagggatattttcgtagattttgtaatgtgttttttttttatgttgcaaactcaactgtatcaaccagttcaataaaatctgaaatttaag

SEQ ID NO: 21971 - protein, 237 aa, Arabidopsis thaliana
  peptide (1)..(237): Ceres Seq. ID no. 12331905
MGRIGLVVTDLVLSFMWIWAGVLVNILVHGVLGFSRTDPSGEIVRYLFSIISMFIFAYLQQATKGGLYNPLTALAAGVSGGFSSFIFSVFVRIPVEVIGSILAVKHIIHVFPEIGKGPKLNVAIHHGALTEGILTFFIVLLSMGLTRKIPGSFFMKTWIGSLAKLTLHILGSDLTGGCMNPAAVMGWAYARGEHITKEHLLVYWLGPVKATLLAVWFFKVVFKPLTEEQEKPKAKSE

SEQ ID NO: 21972 - protein, 222 aa, Arabidopsis thaliana
  peptide (1)..(222): Ceres Seq. ID no. 12331906
MWIWAGVLVNILVHGVLGFSRTDPSGEIVRYLFSIISMFIFAYLQQATKGGLYNPLTALAAGVSGGFSSFIFSVFVRIPVEVIGSILAVKHIIHVFPEIGKGPKLNVAIHHGALTEGILTFFIVLLSMGLTRKIPGSFFMKTWIGSLAKLTLHILGSDLTGGCMNPAAVMGWAYARGEHITKEHLLVYWLGPVKATLLAVWFFKVVFKPLTEEQEKPKAKSE

SEQ ID NO: 21973 - protein, 185 aa, Arabidopsis thaliana
  peptide (1)..(185): Ceres Seq. ID no. 12331907
MFIFAYLQQATKGGLYNPLTALAAGVSGGFSSFIFSVFVRIPVEVIGSILAVKHIIHVFPEIGKGPKLNVAIHHGALTEGILTFFIVLLSMGLTRKIPGSFFMKTWIGSLAKLTLHILGSDLTGGCMNPAAVMGWAYARGEHITKEHLLVYWLGPVKATLLAVWFFKVVFKPLTEEQEKPKAKSE

SEQ ID NO: 21974 - DNA, 1293 bp, Arabidopsis thaliana
  misc_feature (1)..(1293): Ceres Seq. ID no. 12324105
  misc_feature (1)..(1293): Ortholog of  Ceres SEQ ID NO 14304863 as cited in SEQ ID NO 54200
  misc_feature (1)..(1293): Ortholog of  Ceres SEQ ID NO 13598340 as cited in SEQ ID NO 68543
agaccacaaacatcctccaacaagccaaaagaagacgagagaaggagaagagacgaaatcgccattgaaatggctctcaaagcttcacctgttaccggattattccctcctctccgtcctactgcttcttcttccccttcgacttcttctaatcgcccttgttccctcaggattctccctctcagaacatctttcttcggtaactcaagtggagcgctgagagtgaatgtgttgagattagcttgtgataatagactcaggtgcaatggtcatggtgctactatgaatctttttgaacgattttctagagtggtcaagtcatatgcaaatgcgctcataagctcttttgaagacccggagaaaatcctggagcaaactgtcattgaaatgaatagtgatttgacaaagatgcgtcaagccactgcacaggttttagcatcacaaaagcagttacagaacaaatataaagctgcacagcagtcttctgatgattggtacaaaagagcacaacttgctcttgcaaaaggagatgaggatcttgcacgtgaggcccttaaacgacgaaagtcttttgctgacaacgctactgctttgaaaactcaactagatcagcaaaaaggtgttgtcgacaatcttgtttcaaatacaaggctcttggagagtaagatacaagaggcaaaagcaaagaaagatacgctccttgcacgtgctcgcactgctaagactgcaaccaaagtgcaagagatgatagggacagtaaatacaagcggtgctctttcagcttttgagaaaatggaggagaaagttatggctatggagtctgaagcagatgcactaactcagattggaaccgatgaactcgaggggaagtttcaaatgcttgaaacttcatctgtggatgatgatcttgcagacttgaagaaagaattgtctggaagctcaaagaaaggagagcttcctccagggagaagcactgttgcagcaagcacgagataccctttcaaagactcagagatcgagaatgagttaaacgaactgcgaaggaaagctaacgacttttagatatcggctgtttccgaattgtgactgggttacattacgttcctgctgtaaactatcttgtgtcttgtagaaagacacaaaaagcatgtgtactcttaaagtaaatatccagctatctaatccccatttatagttgggttatgtacattcagacacttttgaaagtgtggtttccattttgactcactttgtgtcaagtggacacgtttttttataagctgttttactcgc

SEQ ID NO: 21975 - protein, 353 aa, Arabidopsis thaliana
  peptide (1)..(353): Ceres Seq. ID no. 12324106
RPQTSSNKPKEDERRRRDEIAIEMALKASPVTGLFPPLRPTASSSPSTSSNRPCSLRILPLRTSFFGNSSGALRVNVLRLACDNRLRCNGHGATMNLFERFSRVVKSYANALISSFEDPEKILEQTVIEMNSDLTKMRQATAQVLASQKQLQNKYKAAQQSSDDWYKRAQLALAKGDEDLAREALKRRKSFADNATALKTQLDQQKGVVDNLVSNTRLLESKIQEAKAKKDTLLARARTAKTATKVQEMIGTVNTSGALSAFEKMEEKVMAMESEADALTQIGTDELEGKFQMLETSSVDDDLADLKKELSGSSKKGELPPGRSTVAASTRYPFKDSEIENELNELRRKANDF

SEQ ID NO: 21976 - protein, 330 aa, Arabidopsis thaliana
  peptide (1)..(330): Ceres Seq. ID no. 12324107
MALKASPVTGLFPPLRPTASSSPSTSSNRPCSLRILPLRTSFFGNSSGALRVNVLRLACDNRLRCNGHGATMNLFERFSRVVKSYANALISSFEDPEKILEQTVIEMNSDLTKMRQATAQVLASQKQLQNKYKAAQQSSDDWYKRAQLALAKGDEDLAREALKRRKSFADNATALKTQLDQQKGVVDNLVSNTRLLESKIQEAKAKKDTLLARARTAKTATKVQEMIGTVNTSGALSAFEKMEEKVMAMESEADALTQIGTDELEGKFQMLETSSVDDDLADLKKELSGSSKKGELPPGRSTVAASTRYPFKDSEIENELNELRRKANDF

SEQ ID NO: 21977 - protein, 259 aa, Arabidopsis thaliana
  peptide (1)..(259): Ceres Seq. ID no. 12324108
MNLFERFSRVVKSYANALISSFEDPEKILEQTVIEMNSDLTKMRQATAQVLASQKQLQNKYKAAQQSSDDWYKRAQLALAKGDEDLAREALKRRKSFADNATALKTQLDQQKGVVDNLVSNTRLLESKIQEAKAKKDTLLARARTAKTATKVQEMIGTVNTSGALSAFEKMEEKVMAMESEADALTQIGTDELEGKFQMLETSSVDDDLADLKKELSGSSKKGELPPGRSTVAASTRYPFKDSEIENELNELRRKANDF

SEQ ID NO: 21978 - DNA, 814 bp, Arabidopsis thaliana
  misc_feature (1)..(814): Ceres Seq. ID no. 13491746
  misc_feature (1)..(814): Ortholog of  Ceres SEQ ID NO 13597058 as cited in SEQ ID NO 63499
aagaaaagggaaaacaaaggatcttccatgggcgatcgctgagaagatccgcaagaacaaacacatcaaattccttgaaatcaggaatcttattcgatagtctatttgagcccttgatctggttttatatttggtggaagttttgaaatggtgctggtattggcattgggggatctccatgtaccccatagagcggctgatctacctcctaagttcaaatcaatgcttgttcctgggaagattcaacacatcatctgcactggaaatctctgcatcaaagaaatccatgactacttgaagactatctgccctgatttgcatatagttcgaggggagtttgacgaagatgcgcgataccctgagaataaaaccttgactattgggcaattcaagctgggattgtgtcatggccaccaggtgatcccatggggtgatctagactcactcgccatgcttcagagacaactgggcgtcgacattctcgtaacaggccatacccaccagttcacagcgtacaaacacgagggaggagtggtgataaacccgggctctgcaaccggagcttacagcagcataaaccaagacgttaacccaagctttgtccttatggacatcgatggtttccgagctgtagtctatgtctatgagctaatcgatggagaagttaaagtcgacaagatcgagttcaagaagccccctactaccagctctggtccgtagttccttaaaaaaaaacttaaaccgttttatgttttcgtcctaaacatttagaactttcttgtgaaaaataatcttgttaacaattttcaaatcc

SEQ ID NO: 21979 - protein, 190 aa, Arabidopsis thaliana
  peptide (1)..(190): Ceres Seq. ID no. 13491747
MVLVLALGDLHVPHRAADLPPKFKSMLVPGKIQHIICTGNLCIKEIHDYLKTICPDLHIVRGEFDEDARYPENKTLTIGQFKLGLCHGHQVIPWGDLDSLAMLQRQLGVDILVTGHTHQFTAYKHEGGVVINPGSATGAYSSINQDVNPSFVLMDIDGFRAVVYVYELIDGEVKVDKIEFKKPPTTSSGP

SEQ ID NO: 21980 - protein, 165 aa, Arabidopsis thaliana
  peptide (1)..(165): Ceres Seq. ID no. 13491748
MLVPGKIQHIICTGNLCIKEIHDYLKTICPDLHIVRGEFDEDARYPENKTLTIGQFKLGLCHGHQVIPWGDLDSLAMLQRQLGVDILVTGHTHQFTAYKHEGGVVINPGSATGAYSSINQDVNPSFVLMDIDGFRAVVYVYELIDGEVKVDKIEFKKPPTTSSGP

SEQ ID NO: 21981 - DNA, 1246 bp, Arabidopsis thaliana
  misc_feature (1)..(1246): Ceres Seq. ID no. 12371605
  misc_feature (1)..(1246): Ortholog of  Ceres SEQ ID NO 13595341 as cited in SEQ ID NO 56398
  misc_feature (1)..(1246): Ortholog of  Ceres SEQ ID NO 15173764 as cited in SEQ ID NO 57550
  misc_feature (1)..(1246): Ortholog of  Ceres SEQ ID NO 15227118 as cited in SEQ ID NO 59038
  misc_feature (1)..(1246): Ortholog of  Ceres SEQ ID NO 13597299 as cited in SEQ ID NO 63785
  misc_feature (1)..(1246): Ortholog of  Ceres SEQ ID NO 13663895 as cited in SEQ ID NO 66923
acaattatctcagttttgacctctctgaagattaagcaaaataacacttcgttcgttcgtactctatgaactcgctgctgacctcctccacatccttagccctgccgtgtgcgataccgatcgtcttcgtcaatttcttaagttctttttgttctccaattcatggtgtaccaacgatttagctactgaagtttagaaagcccccaatttttgttttcgttttagcgtttcccgatctgtgaattgggtatcagctccaaaggtttaatgcccagtaaagttatcgaggacgagagtttaggggtcttacagtgcgagtgaatttagattaaaaggtacaaactttaccttttggtcggaactgggaagagggggaatcggacatgattcagttactattcctggttctgttcgtagaaggtgcgattgcgttcttactactggtaaagattggtcctttaagggagcttgtaatgaagagcttagaccagcttaaattggggaaacgtcctgctactctgaaaaccatcgctggaaccatgtctgtgatcctcctgtcgaatctcatgaatatcattaagatccagaacaagggtgccaaacttgggacaatgtctccaatggatcaagtcctctggagaacacacttgctcgaggcttctcttatgggtgttgtgctcttttttggcttcattattgaccggacacatcattacctcgaaaagctaatcactttaagaagcaatgtcgggtcatcgaaaggagaactagaagaacttaggaaggagagaatcgaactgaaggagaaagaagagaagacatccaaggaaattaagcagctgaaagaaaaactgtcgtgtgtttcagagaatctcaagaaactagagaaggaatccaaagagaaagaaacgaagctcgaaacagctgaagcccatgtcacagctctccaaaagcagtcttcagagctattgttggagtatgacagattgctagaagacaaccaaaatctccaaagccagattttggttggaaccaagaaaacctgaagtgatttaagattcttaagagctctttgatagagttttagagtgttttgtgaacgaatgcggaaatggtaagtggcaaccaaggaattcttgtactcgttttttttttgcgctcttggttcctacccattgatgctgtcttccaaatattataatgttacgtaaattaacaacatcagtaagaagccatctaaacaatg

SEQ ID NO: 21982 - protein, 220 aa, Arabidopsis thaliana
  peptide (1)..(220): Ceres Seq. ID no. 12371606
MIQLLFLVLFVEGAIAFLLLVKIGPLRELVMKSLDQLKLGKRPATLKTIAGTMSVILLSNLMNIIKIQNKGAKLGTMSPMDQVLWRTHLLEASLMGVVLFFGFIIDRTHHYLEKLITLRSNVGSSKGELEELRKERIELKEKEEKTSKEIKQLKEKLSCVSENLKKLEKESKEKETKLETAEAHVTALQKQSSELLLEYDRLLEDNQNLQSQILVGTKKT

SEQ ID NO: 21983 - protein, 190 aa, Arabidopsis thaliana
  peptide (1)..(190): Ceres Seq. ID no. 12371607
MKSLDQLKLGKRPATLKTIAGTMSVILLSNLMNIIKIQNKGAKLGTMSPMDQVLWRTHLLEASLMGVVLFFGFIIDRTHHYLEKLITLRSNVGSSKGELEELRKERIELKEKEEKTSKEIKQLKEKLSCVSENLKKLEKESKEKETKLETAEAHVTALQKQSSELLLEYDRLLEDNQNLQSQILVGTKKT

SEQ ID NO: 21984 - protein, 168 aa, Arabidopsis thaliana
  peptide (1)..(168): Ceres Seq. ID no. 12371608
MSVILLSNLMNIIKIQNKGAKLGTMSPMDQVLWRTHLLEASLMGVVLFFGFIIDRTHHYLEKLITLRSNVGSSKGELEELRKERIELKEKEEKTSKEIKQLKEKLSCVSENLKKLEKESKEKETKLETAEAHVTALQKQSSELLLEYDRLLEDNQNLQSQILVGTKKT

SEQ ID NO: 21985 - DNA, 2208 bp, Arabidopsis thaliana
  misc_feature (1)..(2208): Ceres Seq. ID no. 13490374
  misc_feature (1)..(2208): Ortholog of  Ceres SEQ ID NO 13594549 as cited in SEQ ID NO 51707
  misc_feature (1)..(2208): Ortholog of  Ceres SEQ ID NO 13595294 as cited in SEQ ID NO 55998
  misc_feature (1)..(2208): Ortholog of  Ceres SEQ ID NO 14302012 as cited in SEQ ID NO 56618
  misc_feature (1)..(2208): Ortholog of  Ceres SEQ ID NO 12598102 as cited in SEQ ID NO 61029
  misc_feature (1)..(2208): Ortholog of  Ceres SEQ ID NO 12625361 as cited in SEQ ID NO 62928
  misc_feature (1)..(2208): Ortholog of  Ceres SEQ ID NO 13599424 as cited in SEQ ID NO 0
attgggatataacataactaagaaagtatagccatcacatctgaagctctgagggcaatgtagttggaaccatctttgcccttgaagtcgttaccagcatacttggagtaaagtactgtgcttccggttgatactggtagaggcgtaattttaccttcctcgtctagggaacccggtccaactgctatcaccgtgccaatagaaggcttctctttggtagtctcggttaacaacaaccctccagctgttttctcctccgcctcagcaaccttaataaagactcggtcattcaaaggtttgagatctttgatgtcctctgtctcaagaatgccaacaatatcatcttccttgaggataagatgcttcacatcattgaactccacctcagttcctgcgtatttggagtagataatttgtgctccagtagggacagtgatatcaattttgttcttcccaatagttcttccttcacccacggcaacgacttcacctccttgaggttttgattgagcagtggatggaagtaagataccacctaaagtcttctcctctgcctccttgatcttcaccaaaactcgatctcccaatggcttaattgaagtatacttaggggcaacaacagaagcagctttgacaaccaaacgacggaactggctctgtctaagggtccctggtttcaaagatgaaaacttgacactcgaagctctgagaccatccagcgaggctaagctccttgctgacatagtcactggtgacgctgtaagttgagtcgccgccatttctccttgttgaggataagaaaaaggttgagactttcggaggataaaaccctaaaaattgcagtagagagagagttagatcggttctcgagaaccggagcaaatattttactctcttatttcgaagagagagagagaagaagacggaagctagaagaaatcgtttttgatcggagatagtgtatgagctagttgtttgtaatttgacggctctcgggaactgatctatctccggtgtctctgctttgtcggtagctacaggagtgaagagagtttctacaagggttttaatggaagatgatgactctccttcttctcgggatttggatgcacagaacccttatgatcgattgcttgctctagatacaagtaccgtagatccaaattgtaacttggattcggtttctgccatttatctagcgatgaagagctctaagctggaatgtgttgacgagcgtggtcaagattcccttattacttcggtatgcatggaggatgaagaggatgaggagctcgatgagtttgatccttatctgtttatcaagaacttgccgaacctgtcttctgttgtcccaactttcaggccggtcttgcttcctaaacaaacccgaagctgtcctcctatttctcttgtcctagaccttgatgaaactcttgtgcactcgactctagagccgtgtggtgaggtagatttcacattcccagtgaattttaatgaagaagagcatatggtgtatgtgcgatgccgtcctcacctcaaagagtttatggagagagtgtcccgactttttgagatcattatatttacagctagccaaagtatttatgctgagcaacttctgaacgtgcttgaccctaagagaaagctctttcgccatagagtgtaccgtgactcgtgtgttttctttgatggtaactacctcaaggatttgtcagtcctcgggcgtgatttatctcgtgttatcattgttgataactccccacaggcatttggtttccaagtggaaaatggagtgccaatagagagctggtttaatgacccatcagataaagaactccttcacttgctgccatttcttgaaagcctaattggagttgaagatgtaaggccaatgatcgccaagaaattcaatctaagggagaagattgatgcagctgtagccgcacctgaatatcctgctgaggcgggagatcctttcgaaaggtaaagtctatcgccaaaacacttttaaaggaagaatctggcacaagagcagaggttggagaagatatataagtatatcaatgttgttttcttattagtttaaattaagaacttggtatacagagaaagacaggatatgcctgtaaaaacagtttaaggcacaataactgtataattgttttctcgtttatttactagtacacatagattaacatttcaagtttc

SEQ ID NO: 21986 - protein, 305 aa, Arabidopsis thaliana
  peptide (1)..(305): Ceres Seq. ID no. 13490375
MEDDDSPSSRDLDAQNPYDRLLALDTSTVDPNCNLDSVSAIYLAMKSSKLECVDERGQDSLITSVCMEDEEDEELDEFDPYLFIKNLPNLSSVVPTFRPVLLPKQTRSCPPISLVLDLDETLVHSTLEPCGEVDFTFPVNFNEEEHMVYVRCRPHLKEFMERVSRLFEIIIFTASQSIYAEQLLNVLDPKRKLFRHRVYRDSCVFFDGNYLKDLSVLGRDLSRVIIVDNSPQAFGFQVENGVPIESWFNDPSDKELLHLLPFLESLIGVEDVRPMIAKKFNLREKIDAAVAAPEYPAEAGDPFER

SEQ ID NO: 21987 - protein, 261 aa, Arabidopsis thaliana
  peptide (1)..(261): Ceres Seq. ID no. 13490376
MKSSKLECVDERGQDSLITSVCMEDEEDEELDEFDPYLFIKNLPNLSSVVPTFRPVLLPKQTRSCPPISLVLDLDETLVHSTLEPCGEVDFTFPVNFNEEEHMVYVRCRPHLKEFMERVSRLFEIIIFTASQSIYAEQLLNVLDPKRKLFRHRVYRDSCVFFDGNYLKDLSVLGRDLSRVIIVDNSPQAFGFQVENGVPIESWFNDPSDKELLHLLPFLESLIGVEDVRPMIAKKFNLREKIDAAVAAPEYPAEAGDPFER

SEQ ID NO: 21988 - protein, 239 aa, Arabidopsis thaliana
  peptide (1)..(239): Ceres Seq. ID no. 13490377
MEDEEDEELDEFDPYLFIKNLPNLSSVVPTFRPVLLPKQTRSCPPISLVLDLDETLVHSTLEPCGEVDFTFPVNFNEEEHMVYVRCRPHLKEFMERVSRLFEIIIFTASQSIYAEQLLNVLDPKRKLFRHRVYRDSCVFFDGNYLKDLSVLGRDLSRVIIVDNSPQAFGFQVENGVPIESWFNDPSDKELLHLLPFLESLIGVEDVRPMIAKKFNLREKIDAAVAAPEYPAEAGDPFER

SEQ ID NO: 21989 - DNA, 1415 bp, Arabidopsis thaliana
  misc_feature (1)..(1415): Ceres Seq. ID no. 12396260
  misc_feature (1)..(1415): Ortholog of  Ceres SEQ ID NO 14307801 as cited in SEQ ID NO 59512
  misc_feature (1)..(1415): Ortholog of  Ceres SEQ ID NO 14309110 as cited in SEQ ID NO 0
  misc_feature (1)..(1415): Ortholog of  Ceres SEQ ID NO 15225903 as cited in SEQ ID NO 0
gattataaattttctcgtgaagctaatttttcctgagaaagaaagcgaaacttcgctggcgactaaagattgctgagaagacacgtcgtctctgtgagaactttttctttttcttctggtatattctggagacagatattgttttttcttctgattagagaataatatgacggaagtgattagcaaaacgagtttgttcttaggagcttgtggtaatcatcaccgtgttgatgatttctctttctctccggtgagttttggtgggtttggtttgaaaaagagtttctcttgtctgaagcttaagagtcagaagcctcttagaagtgtattttacggaaaacagatcgttttcggagattctcaagacgagagcttcagaagatcatcagctatcacagctcagacaactttgaggattgggacagctcagaagtggtgggagaaaggtctgaaagataacatgagagagatctcttcagctcaagagctcgttgattctcttactaacgctggtgataagcttgttgttgttgatttcttctcacctggctgtggtggctgcaaggctctccatcctaagatatgtcagtttgcagagatgaacccggatgtgcagtttcttcaggtgaattacgaggagcataagtccatgtgttatagtcttggtgtccatgttctcccttttttccgattctaccgtggctctcagggtcgtgtttgcagctttagctgtaccaatgccacgatcaagaaattcagagatgccttggcaaagcatggtccagataggtgcagcctcggaccgaccaaaggccttgaagagaaagagcttgtggcacttgcagccaacaaagaactcaactttacttacacaccaaagcctgtaccagttgagaaagaagcagccactcctgattcaaacccaagtctccctgttcctcttccttcgatgagctccaatgacgaaaaaacattggtctccgcagggagatgagactgaataaacatttccctgtatagtttgcgtgatagtagtagtagcagcagctggatatattgcagtacctaaagatgtcagttctcggagcagccagccggtttagtggggtttagttttttttcgggtcccctgagcaaaatcggttcttggcctctgggtttacctagagcaaaaccagttccgatggttacttgagttttgctcagttcttatgggattggagtggaaggtcgtgcgctcggcagcatggaagctttctcctttcaatcagcttcagtagagttttggtttctttgtttgttttttatttgctttaagaatttaatgtaaataaaaatccaatgaggattatcatacaatgtcatgaaggatctatgaattagtatctaatgttagtatatattatggtttttcc

SEQ ID NO: 21990 - protein, 275 aa, Arabidopsis thaliana
  peptide (1)..(275): Ceres Seq. ID no. 12396261
MTEVISKTSLFLGACGNHHRVDDFSFSPVSFGGFGLKKSFSCLKLKSQKPLRSVFYGKQIVFGDSQDESFRRSSAITAQTTLRIGTAQKWWEKGLKDNMREISSAQELVDSLTNAGDKLVVVDFFSPGCGGCKALHPKICQFAEMNPDVQFLQVNYEEHKSMCYSLGVHVLPFFRFYRGSQGRVCSFSCTNATIKKFRDALAKHGPDRCSLGPTKGLEEKELVALAANKELNFTYTPKPVPVEKEAATPDSNPSLPVPLPSMSSNDEKTLVSAGR

SEQ ID NO: 21991 - protein, 177 aa, Arabidopsis thaliana
  peptide (1)..(177): Ceres Seq. ID no. 12396262
MREISSAQELVDSLTNAGDKLVVVDFFSPGCGGCKALHPKICQFAEMNPDVQFLQVNYEEHKSMCYSLGVHVLPFFRFYRGSQGRVCSFSCTNATIKKFRDALAKHGPDRCSLGPTKGLEEKELVALAANKELNFTYTPKPVPVEKEAATPDSNPSLPVPLPSMSSNDEKTLVSAGR

SEQ ID NO: 21992 - DNA, 1179 bp, Arabidopsis thaliana
  misc_feature (1)..(1179): Ceres Seq. ID no. 12579429
  misc_feature (1)..(1179): Ortholog of  Ceres SEQ ID NO 13639124 as cited in SEQ ID NO 56718
  misc_feature (1)..(1179): Ortholog of  Ceres SEQ ID NO 13596474 as cited in SEQ ID NO 62169
  misc_feature (1)..(1179): Ortholog of  Ceres SEQ ID NO 13598714 as cited in SEQ ID NO 62656
  misc_feature (1)..(1179): Ortholog of  Ceres SEQ ID NO 13596969 as cited in SEQ ID NO 63375
  misc_feature (1)..(1179): Ortholog of  Ceres SEQ ID NO 14302240 as cited in SEQ ID NO 64162
  misc_feature (1)..(1179): Ortholog of  Ceres SEQ ID NO 13584480 as cited in SEQ ID NO 64751
  misc_feature (1)..(1179): Ortholog of  Ceres SEQ ID NO 13597519 as cited in SEQ ID NO 64759
  misc_feature (1)..(1179): Ortholog of  Ceres SEQ ID NO 13595926 as cited in SEQ ID NO 67778
  misc_feature (1)..(1179): Ortholog of  Ceres SEQ ID NO 13596362 as cited in SEQ ID NO 67877
  misc_feature (1)..(1179): Ortholog of  Ceres SEQ ID NO 13587054 as cited in SEQ ID NO 0
atcttaattatactgatctttatcgttgactagatttaagaaacaaaataataagatggttagggcaaatatagtgagcatggttctgttgatgcatgccatcgttgggtttccttttcatgcgaggggattaagtatgacttactacatgatgagctgtcctttcgctgaacagattgtgaagaacagtgttaacaatgctcttcaagccgatcccactttagccgctggtcttatccgtatgttgttccacgactgtttcatcgagggatgtgatgcgtcaattctgctagattcaacgaaagacaacactgcggaaaaggattcgcctgcgaatctgagtctacgtggctacgagatcatcgatgatgcaaaggagaaaatcgagaatagatgtccaggagttgtatcatgcgcagatatagttgccatggctgctagagatgctgtcttttgggctggtggtccatattatgacataccgaaaggaaggtttgatggtaaaagatcaaagatagaagatacaagaaatctaccttcaccttttcttaatgcctctcaactcattcaaacttttggccaacgtggtttcactccacaagatgttgttgctctctctggagcacataccctaggagttgcacgatgctcctccttcaaggctagacttaccgtcccagactcttcattagactcgacttttgcaaacactctctctaaaacatgcagcgcgggtgacaatgcagagcaaccctttgatgctacgcgcaacgatttcgacaatgcttacttcaatgcgcttcagatgaaatcaggagtcctcttttcagaccaaactttattcaacacaccaaggaccaggaatcttgttaacggctatgcacttaaccaagccaagttcttctttgatttccaacaggccatgcgcaagatgagcaatcttgatgttaaacttggctctcaaggtgaagtccgtcaaaattgtcggagtattaattaggctagaccacatctacttacgatttttgtatttataataagttctctactcttgttatatgaagaatcatgaatcttctaggctactatgtaaaaattgtgtactctcgtaatatgcagttgtatacttattgcttgtgtggttcagatatccatcaaaaagtaatatactttggttgc

SEQ ID NO: 21993 - protein, 314 aa, Arabidopsis thaliana
  peptide (1)..(314): Ceres Seq. ID no. 12579430
MVRANIVSMVLLMHAIVGFPFHARGLSMTYYMMSCPFAEQIVKNSVNNALQADPTLAAGLIRMLFHDCFIEGCDASILLDSTKDNTAEKDSPANLSLRGYEIIDDAKEKIENRCPGVVSCADIVAMAARDAVFWAGGPYYDIPKGRFDGKRSKIEDTRNLPSPFLNASQLIQTFGQRGFTPQDVVALSGAHTLGVARCSSFKARLTVPDSSLDSTFANTLSKTCSAGDNAEQPFDATRNDFDNAYFNALQMKSGVLFSDQTLFNTPRTRNLVNGYALNQAKFFFDFQQAMRKMSNLDVKLGSQGEVRQNCRSIN

SEQ ID NO: 21994 - protein, 306 aa, Arabidopsis thaliana
  peptide (1)..(306): Ceres Seq. ID no. 12579431
MVLLMHAIVGFPFHARGLSMTYYMMSCPFAEQIVKNSVNNALQADPTLAAGLIRMLFHDCFIEGCDASILLDSTKDNTAEKDSPANLSLRGYEIIDDAKEKIENRCPGVVSCADIVAMAARDAVFWAGGPYYDIPKGRFDGKRSKIEDTRNLPSPFLNASQLIQTFGQRGFTPQDVVALSGAHTLGVARCSSFKARLTVPDSSLDSTFANTLSKTCSAGDNAEQPFDATRNDFDNAYFNALQMKSGVLFSDQTLFNTPRTRNLVNGYALNQAKFFFDFQQAMRKMSNLDVKLGSQGEVRQNCRSIN

SEQ ID NO: 21995 - protein, 302 aa, Arabidopsis thaliana
  peptide (1)..(302): Ceres Seq. ID no. 12579432
MHAIVGFPFHARGLSMTYYMMSCPFAEQIVKNSVNNALQADPTLAAGLIRMLFHDCFIEGCDASILLDSTKDNTAEKDSPANLSLRGYEIIDDAKEKIENRCPGVVSCADIVAMAARDAVFWAGGPYYDIPKGRFDGKRSKIEDTRNLPSPFLNASQLIQTFGQRGFTPQDVVALSGAHTLGVARCSSFKARLTVPDSSLDSTFANTLSKTCSAGDNAEQPFDATRNDFDNAYFNALQMKSGVLFSDQTLFNTPRTRNLVNGYALNQAKFFFDFQQAMRKMSNLDVKLGSQGEVRQNCRSIN

SEQ ID NO: 21996 - DNA, 1617 bp, Arabidopsis thaliana
  misc_feature (1)..(1617): Ceres Seq. ID no. 13486880
  misc_feature (1)..(1617): Ortholog of  Ceres SEQ ID NO 13592768 as cited in SEQ ID NO 20317
  misc_feature (1)..(1617): Ortholog of  Ceres SEQ ID NO 14303656 as cited in SEQ ID NO 61363
cacgcgtccggaaatttgttctgagctcaacgccatttttgacgatttcgaatctctgtcttctctgagttgttccaagtaatcggagggaactcgtaaagtggaagaataggagaaagagagaaggaagaagatttgtgaatagctcttgatctggtgaagaatggatgcaattagaaaacaagctagcaggttgagagaacaagttgcgagacagcagcaggctgtctttaagcaatttggaggagggggatatggctctggtttagctgatgaagcagaactcaatcagcatcagaagctagaaaagctttacatatccactcgtgctgctaagcattaccaaagagatattgttcgtggtgtggaaggttatatagttacagggtcaaaacaagttgaaataggtacgaaattgtctgaggatagcaggaaatatggttcagagaatacatgtacgaatggtaacgtattaacacgggctgcactgaactatgggcgtgctcgagcacaaatggagaaggaacgtggaaatatgttgaaggctcttggtacacaggttgctgagccattacgggcaatggttttgggagctccattggaggatgctagacatcttgctcaacgctatgacagaatgcgccaagaagctgaagctcaggctacagaagttgccagacgccaagcaaaggcgagagagtctcaaggtaatcctgacatcttgatgaaactggaatctgctgaagcaaaacttcacgacctaaaatcaaatatgacaatattggggaaagaagctgcttctgctttagcttccgttgaagatcaacaacagaaattgactcttgaacgacttctttcaatggttgaatctgaacgcgcctaccatcaaagagtcctccaaatacttgatcagctcgaaggagagatggtatctgagaggcaacgtatagaagctccctctactccctcaagcgcagacagtatgccgccacctccatcatatgaggaagctaatggagtgtttgcatctcagatgcatgacacgtcaacagatagcatgggttacttcttaggagaggtcttgttcccatatcacggtgtgacagatgtcgagctcagcttatcaactggtgaatacgttgttgttagaaaggttacaggcagtggatgggccgaaggtgaatgcaaaggcaaagctggttggttcccttatgggtacattgaaagacgggaacgagttcttgctagcaaagtgtccgaagttttctgagaatttgaaggtaacattatggttctttgttggttatggaattgagttgcttctgtagaagagttgtgtgttctgtagaagaaaaagaaagaaaagattcacgggctaaaacagaagtccatatgcatgaggatcagagttgatgcgggtttctgccatgttctgaatctaatagtgatgccacttgaacaagagttcagtttttaggtattatcttcatattggatttggatattttctttgtcatttgatgtaaacgccacatctctgtttatcttcgtatgtgaatacacttcttttcgggtcttatttgtgattttttgtctaaattactttcatttgatagc

SEQ ID NO: 21997 - protein, 368 aa, Arabidopsis thaliana
  peptide (1)..(368): Ceres Seq. ID no. 13486881
MDAIRKQASRLREQVARQQQAVFKQFGGGGYGSGLADEAELNQHQKLEKLYISTRAAKHYQRDIVRGVEGYIVTGSKQVEIGTKLSEDSRKYGSENTCTNGNVLTRAALNYGRARAQMEKERGNMLKALGTQVAEPLRAMVLGAPLEDARHLAQRYDRMRQEAEAQATEVARRQAKARESQGNPDILMKLESAEAKLHDLKSNMTILGKEAASALASVEDQQQKLTLERLLSMVESERAYHQRVLQILDQLEGEMVSERQRIEAPSTPSSADSMPPPPSYEEANGVFASQMHDTSTDSMGYFLGEVLFPYHGVTDVELSLSTGEYVVVRKVTGSGWAEGECKGKAGWFPYGYIERRERVLASKVSEVF

SEQ ID NO: 21998 - protein, 251 aa, Arabidopsis thaliana
  peptide (1)..(251): Ceres Seq. ID no. 13486882
MEKERGNMLKALGTQVAEPLRAMVLGAPLEDARHLAQRYDRMRQEAEAQATEVARRQAKARESQGNPDILMKLESAEAKLHDLKSNMTILGKEAASALASVEDQQQKLTLERLLSMVESERAYHQRVLQILDQLEGEMVSERQRIEAPSTPSSADSMPPPPSYEEANGVFASQMHDTSTDSMGYFLGEVLFPYHGVTDVELSLSTGEYVVVRKVTGSGWAEGECKGKAGWFPYGYIERRERVLASKVSEVF

SEQ ID NO: 21999 - protein, 244 aa, Arabidopsis thaliana
  peptide (1)..(244): Ceres Seq. ID no. 13486883
MLKALGTQVAEPLRAMVLGAPLEDARHLAQRYDRMRQEAEAQATEVARRQAKARESQGNPDILMKLESAEAKLHDLKSNMTILGKEAASALASVEDQQQKLTLERLLSMVESERAYHQRVLQILDQLEGEMVSERQRIEAPSTPSSADSMPPPPSYEEANGVFASQMHDTSTDSMGYFLGEVLFPYHGVTDVELSLSTGEYVVVRKVTGSGWAEGECKGKAGWFPYGYIERRERVLASKVSEVF

SEQ ID NO: 22000 - DNA, 1730 bp, Arabidopsis thaliana
  misc_feature (1)..(1730): Ceres Seq. ID no. 13496336
  misc_feature (1)..(1730): Ortholog of  Ceres SEQ ID NO 14308813 as cited in SEQ ID NO 55485
  misc_feature (1)..(1730): Ortholog of  Ceres SEQ ID NO 13655744 as cited in SEQ ID NO 64032
  misc_feature (1)..(1730): Ortholog of  Ceres SEQ ID NO 13590394 as cited in SEQ ID NO 66581
gtgttcgcctttctctcgtacaagtcaaaatggcgtccgttgttcttcgaaaccctagctcgaagcgccttgttccattctcttcccagatctactctcgctgtggtgcttccgttacttcctcttactcgatctctcattctatcggtggagatgatctctcttcctctaccttcggaacctcctccttctggagatccatggccacttttactcgaaataaacctcatgtaaatgttggaactattgggcatgttgatcatggcaagaccactttaactgctgcaatcacaaaggttcttgctgaggagggcaaagctaaagctattgcctttgatgaaattgataaagctcctgaagagaagaagagaggaattactattgccacggctcatgtggagtatgaaactgcaaagcgtcactatgctcatgtggattgccctggacacgcagattatgttaaaaatatgattactggagctgcgcaaatggatggcggaattcttgtggtttcaggaccagatggacccatgccgcagacaaaggaacatattctacttgcacgccaggttggtgttccctcacttgtgtgcttcttgaacaaagttgatgtggtggatgaccctgagctcttggagcttgtcgagatggaactacgtgagctcctcagcttctacaagtttcctggggatgatattcccatcatccgaggatctgctctgtccgcattacagggcaccaatgatgaaattggaaggcaagctatattaaagctgatggatgctgttgatgaatatatacctgaccctgttcgcgtccttgacaagcctttcttgatgccaattgaagatgttttctcaattcaaggacgtggaactgttgcaaccggtcgtatcgaacagggagtcattaaagtgggtgaagaagttgagatattgggtttacgtgaggggggtgttccactgaaatcgactgtaactggggttgagatgttcaagaagattttggataatggacaggctggtgataatgtaggacttcttctgcgtgggctaaagagagaagacattcagcgtggaatggtgattgctaagcctggttcatgcaagacatacaagaagtttgaagcagagatttacgtgctcacaaaggatgaaggtggacgtcacactgcatttttctctaactacaggcctcagttttacttgaggactgcagatatcactggcaaagtggaattacccgaaaacgtgaagatggttatgcctggtgacaatgtcacagctgttttcgagttaatcatgcctgtcccactcgaaacaggtcaaagatttgccttaagggaaggaggtagaacagttggagctggtgttgtatcaaaagtgatgacctaaactactcaaaagcacattcttctccttcgttctctaggaatccatcaatttcgagatttttctttttgtctttttgctgctttgagatttctttgggtagatcaaataaacagagagaaacttaatttatgtttccaatgagaaagattagggcagagggcacgaaacgtctatttctttttgatgcttcctactttgtgaaactttcaaaaagccacttccaattctttctcaccttcgtggtttgtcaagtatttgtttttatttctttaaaccaaaatcatgaattttcgattattaaattaagttgaccagaaatgaaatatttatttcatg

SEQ ID NO: 22001 - protein, 463 aa, Arabidopsis thaliana
  peptide (1)..(463): Ceres Seq. ID no. 13496337
VRLSLVQVKMASVVLRNPSSKRLVPFSSQIYSRCGASVTSSYSISHSIGGDDLSSSTFGTSSFWRSMATFTRNKPHVNVGTIGHVDHGKTTLTAAITKVLAEEGKAKAIAFDEIDKAPEEKKRGITIATAHVEYETAKRHYAHVDCPGHADYVKNMITGAAQMDGGILVVSGPDGPMPQTKEHILLARQVGVPSLVCFLNKVDVVDDPELLELVEMELRELLSFYKFPGDDIPIIRGSALSALQGTNDEIGRQAILKLMDAVDEYIPDPVRVLDKPFLMPIEDVFSIQGRGTVATGRIEQGVIKVGEEVEILGLREGGVPLKSTVTGVEMFKKILDNGQAGDNVGLLLRGLKREDIQRGMVIAKPGSCKTYKKFEAEIYVLTKDEGGRHTAFFSNYRPQFYLRTADITGKVELPENVKMVMPGDNVTAVFELIMPVPLETGQRFALREGGRTVGAGVVSKVMT

SEQ ID NO: 22002 - protein, 454 aa, Arabidopsis thaliana
  peptide (1)..(454): Ceres Seq. ID no. 13496338
MASVVLRNPSSKRLVPFSSQIYSRCGASVTSSYSISHSIGGDDLSSSTFGTSSFWRSMATFTRNKPHVNVGTIGHVDHGKTTLTAAITKVLAEEGKAKAIAFDEIDKAPEEKKRGITIATAHVEYETAKRHYAHVDCPGHADYVKNMITGAAQMDGGILVVSGPDGPMPQTKEHILLARQVGVPSLVCFLNKVDVVDDPELLELVEMELRELLSFYKFPGDDIPIIRGSALSALQGTNDEIGRQAILKLMDAVDEYIPDPVRVLDKPFLMPIEDVFSIQGRGTVATGRIEQGVIKVGEEVEILGLREGGVPLKSTVTGVEMFKKILDNGQAGDNVGLLLRGLKREDIQRGMVIAKPGSCKTYKKFEAEIYVLTKDEGGRHTAFFSNYRPQFYLRTADITGKVELPENVKMVMPGDNVTAVFELIMPVPLETGQRFALREGGRTVGAGVVSKVMT

SEQ ID NO: 22003 - protein, 397 aa, Arabidopsis thaliana
  peptide (1)..(397): Ceres Seq. ID no. 13496339
MATFTRNKPHVNVGTIGHVDHGKTTLTAAITKVLAEEGKAKAIAFDEIDKAPEEKKRGITIATAHVEYETAKRHYAHVDCPGHADYVKNMITGAAQMDGGILVVSGPDGPMPQTKEHILLARQVGVPSLVCFLNKVDVVDDPELLELVEMELRELLSFYKFPGDDIPIIRGSALSALQGTNDEIGRQAILKLMDAVDEYIPDPVRVLDKPFLMPIEDVFSIQGRGTVATGRIEQGVIKVGEEVEILGLREGGVPLKSTVTGVEMFKKILDNGQAGDNVGLLLRGLKREDIQRGMVIAKPGSCKTYKKFEAEIYVLTKDEGGRHTAFFSNYRPQFYLRTADITGKVELPENVKMVMPGDNVTAVFELIMPVPLETGQRFALREGGRTVGAGVVSKVMT

SEQ ID NO: 22004 - DNA, 2292 bp, Arabidopsis thaliana
  misc_feature (1)..(2292): Ceres Seq. ID no. 13486668
  misc_feature (1)..(2292): Ortholog of  Ceres SEQ ID NO 12612314 as cited in SEQ ID NO 51420
  misc_feature (1)..(2292): Ortholog of  Ceres SEQ ID NO 14306493 as cited in SEQ ID NO 53170
  misc_feature (1)..(2292): Ortholog of  Ceres SEQ ID NO 14311095 as cited in SEQ ID NO 53197
gtcaaggacgttttaagaatctggtggaattgatttgatagtagtatacaattgtgatgtatatatacatacaaatattaactgttcttggatttattgaaaggaaatgactttaaattacaagaagcgtgacccacacgttaagtcagtctttctttactaatattcttttcgattagtcaaataaacctcatgaacaagtcattggagcccacttaaactctacttttctattcttcttctttctttttgttattctatatattagttagcaacttccacgttgtagcgatggaaggatccaagctacttccttgcgtccataagtctccggttcccacctcccaccaattatatataaattatgagattttgggtttaacaaaactcaaaaaacacaaatacacccaaaacaagatgagctcctctgactcttcttccgccgaatcccgtctagccacggctaagacggttctcaccaccgcggcttcggtggctgcgaccgcaatgctagctcgatctttagtccaagattatttgcctgacgaggtgcatcactacatttcctatggattccgttccatctttggttacttctcatcccaaatgacgataatcatcgaagaatttgaaggttttgctcacaatgaagtctttgaagctgcagaggcctatctagccaccaagatctctccttctaacaaaagaatcaaagtgagtaaacatgagaaagaaaacaactacaatgtcaccgtggagcgtgacgaagaagttgttgacacctacaatggcgtcaaattccagtggatcctccattgtcgtcatgtcgagtccaagcacttccacaacccacgggatctaaactccacactgagatctgaggtccgatcattcgaactcaacttccacaagaaattcaaagacgtagctcttgaatcttacttgccattcatggtgaaaagagccacgttgatgaagcaagagaagaaaacactcaagatcttcactctctccccagaaaacatgtatgggaactactctgacgcgtggacctctgttactcttgaccatccttctaccttcaaaactctagcaatggattcagatgtcaagacaagtgtgatggaagatctagacaaattcgtaaagcgaagagacttctataaaagggttggtaaagcttggaagagaggttacttgctgtacggtccaccaggcacagggaagtcaagcttgatcgcagccatggccaatcatctcaactttgatatatacgacctagagttgaccgcggttaacaacaattctgagctccggcgattattgattgccactgctaatcgttcgattcttatcgtagaagatatcgattgttcactagaattgaaagataggactagcgatgaacctcctcgggaatctgacgatatagaagatccacggtataaaaaagtgacactctctggactgttgaatttcatagatggtctatggtcaagctgcggtgacgaaaggatcataatcttcacaaccaattacaaagagaaactcgacgcggccttgctgagaccaggacgtatggatatgcacatccacatgtcgtattgcacaccaagtactttcaaagctcttgctttgaactatcttgagatcaaagagcaccgccttttcagcaagatcgaggaaggtattgaggcgacagaggtcactccagcagaagtagctgaacagcttatgagaaatgactctgtagacaaggttcttgagggtttgattgagttcttgaaagtcaagaagatcgaaaacgaacaagataaggccaaaacagagaagcaagagttggagaacaagaaaaagaccaaggagggaacagattccgtagtcaagaaagaggttgatgaacagctagtgaggaatgaccgtgttgataaggttcttgagggtttggtcgagttgttaaaagccaagaagatcgaggacgaccaagataaagccaaacatgaggaggttgaacaacattaacttgtgagatatcaatacctaaatcattaaatcgccagttactgtctataatctacagattcatttataaacctagtcctaagataaaataatcttagagagattgagaccaaaaaagggaaaaaattgaggagatcagataaaacacctctgcatccgagtggtagctgtaaagagaagagcacgtgtatttatacaaaactatgcgtttagcttgttttttctctctgttttttttctaactttttttagcacaatttgttttaagct

SEQ ID NO: 22005 - protein, 576 aa, Arabidopsis thaliana
  peptide (1)..(576): Ceres Seq. ID no. 13486669
MEGSKLLPCVHKSPVPTSHQLYINYEILGLTKLKKHKYTQNKMSSSDSSSAESRLATAKTVLTTAASVAATAMLARSLVQDYLPDEVHHYISYGFRSIFGYFSSQMTIIIEEFEGFAHNEVFEAAEAYLATKISPSNKRIKVSKHEKENNYNVTVERDEEVVDTYNGVKFQWILHCRHVESKHFHNPRDLNSTLRSEVRSFELNFHKKFKDVALESYLPFMVKRATLMKQEKKTLKIFTLSPENMYGNYSDAWTSVTLDHPSTFKTLAMDSDVKTSVMEDLDKFVKRRDFYKRVGKAWKRGYLLYGPPGTGKSSLIAAMANHLNFDIYDLELTAVNNNSELRRLLIATANRSILIVEDIDCSLELKDRTSDEPPRESDDIEDPRYKKVTLSGLLNFIDGLWSSCGDERIIIFTTNYKEKLDAALLRPGRMDMHIHMSYCTPSTFKALALNYLEIKEHRLFSKIEEGIEATEVTPAEVAEQLMRNDSVDKVLEGLIEFLKVKKIENEQDKAKTEKQELENKKKTKEGTDSVVKKEVDEQLVRNDRVDKVLEGLVELLKAKKIEDDQDKAKHEEVEQH

SEQ ID NO: 22006 - protein, 534 aa, Arabidopsis thaliana
  peptide (1)..(534): Ceres Seq. ID no. 13486670
MSSSDSSSAESRLATAKTVLTTAASVAATAMLARSLVQDYLPDEVHHYISYGFRSIFGYFSSQMTIIIEEFEGFAHNEVFEAAEAYLATKISPSNKRIKVSKHEKENNYNVTVERDEEVVDTYNGVKFQWILHCRHVESKHFHNPRDLNSTLRSEVRSFELNFHKKFKDVALESYLPFMVKRATLMKQEKKTLKIFTLSPENMYGNYSDAWTSVTLDHPSTFKTLAMDSDVKTSVMEDLDKFVKRRDFYKRVGKAWKRGYLLYGPPGTGKSSLIAAMANHLNFDIYDLELTAVNNNSELRRLLIATANRSILIVEDIDCSLELKDRTSDEPPRESDDIEDPRYKKVTLSGLLNFIDGLWSSCGDERIIIFTTNYKEKLDAALLRPGRMDMHIHMSYCTPSTFKALALNYLEIKEHRLFSKIEEGIEATEVTPAEVAEQLMRNDSVDKVLEGLIEFLKVKKIENEQDKAKTEKQELENKKKTKEGTDSVVKKEVDEQLVRNDRVDKVLEGLVELLKAKKIEDDQDKAKHEEVEQH

SEQ ID NO: 22007 - protein, 504 aa, Arabidopsis thaliana
  peptide (1)..(504): Ceres Seq. ID no. 13486671
MLARSLVQDYLPDEVHHYISYGFRSIFGYFSSQMTIIIEEFEGFAHNEVFEAAEAYLATKISPSNKRIKVSKHEKENNYNVTVERDEEVVDTYNGVKFQWILHCRHVESKHFHNPRDLNSTLRSEVRSFELNFHKKFKDVALESYLPFMVKRATLMKQEKKTLKIFTLSPENMYGNYSDAWTSVTLDHPSTFKTLAMDSDVKTSVMEDLDKFVKRRDFYKRVGKAWKRGYLLYGPPGTGKSSLIAAMANHLNFDIYDLELTAVNNNSELRRLLIATANRSILIVEDIDCSLELKDRTSDEPPRESDDIEDPRYKKVTLSGLLNFIDGLWSSCGDERIIIFTTNYKEKLDAALLRPGRMDMHIHMSYCTPSTFKALALNYLEIKEHRLFSKIEEGIEATEVTPAEVAEQLMRNDSVDKVLEGLIEFLKVKKIENEQDKAKTEKQELENKKKTKEGTDSVVKKEVDEQLVRNDRVDKVLEGLVELLKAKKIEDDQDKAKHEEVEQH

SEQ ID NO: 22008 - DNA, 1132 bp, Arabidopsis thaliana
  misc_feature (1)..(1132): Ceres Seq. ID no. 12348495
  misc_feature (1)..(1132): Ortholog of  Ceres SEQ ID NO 15177031 as cited in SEQ ID NO 60171
  misc_feature (1)..(1132): Ortholog of  Ceres SEQ ID NO 12617197 as cited in SEQ ID NO 63406
  misc_feature (1)..(1132): Ortholog of  Ceres SEQ ID NO 13597804 as cited in SEQ ID NO 64182
  misc_feature (1)..(1132): Ortholog of  Ceres SEQ ID NO 15179788 as cited in SEQ ID NO 64818
  misc_feature (1)..(1132): Ortholog of  Ceres SEQ ID NO 14301622 as cited in SEQ ID NO 65156
  misc_feature (1)..(1132): Ortholog of  Ceres SEQ ID NO 13598565 as cited in SEQ ID NO 65250
  misc_feature (1)..(1132): Ortholog of  Ceres SEQ ID NO 13598597 as cited in SEQ ID NO 65496
  misc_feature (1)..(1132): Ortholog of  Ceres SEQ ID NO 13596284 as cited in SEQ ID NO 68273
aaaaaaacaattattttcagacacagagagactcagacaggagatatgaactgcggaggaaaggtggtctgcgttaccggagcttccggctacatagcgtcttggattgtcaagcttttgctcctccgtggctacaccgtcaatgccactgttcgagatccaaaggacaagaagaaaacagaacatcttcttgcactagacggtgcaaaagaaagactcaaattgttcaaagcagatcttttggaagaatcttcttttgatcaagctatcgatggttgtgatgctgtcttccacactgcttctccagttctattcactgtcacagatcctcagactgagctgattgatccagccttaaagggtactattaacgtccttaatacatgcaaacaagtttcttctgtcaagagggtcattctgacatcttccacggctgcggttctctctcgtcagcctcctattgggccaaacgacctggtggacgagactttcttctccgatccaagtctatgcagggagacaaagaattggtattcactctccaagattttggccgagaatgcagcgtggcaatttgccaaagacaatggaatcgacatggttgtgttgaatcctggatttatttgcggaccactcttgcaaccaactcttaacatgtcggtagagctaattgtggatttcataaatggtaagaaccctttcaataaaagatactacaggttctcggacgtaagagatgtcgccttggttcatatcaaagcgttggagactccttcagccaatggcagatacatcatcgatggtccaaatatgagtgtaaacgacattatagacattcttcggaagctgttcccagatttgtctattgctgatacgaatgaagaaagtgagatgaatgagatgatatgccaagtgtgtgtggagaaagtgaaaaatttgggagtagagttcactcctatgaaatcaagccttagagacactattgttagcctcaaggagaaatgtcttttatgattctgttcgtatatttgtaactattatgtgtatttttattttgttagtattactaattcaagtggtttaagttgttgagactctttaaaatctaagcattttataaagaataatatat

SEQ ID NO: 22009 - protein, 337 aa, Arabidopsis thaliana
  peptide (1)..(337): Ceres Seq. ID no. 12348496
KKTIIFRHRETQTGDMNCGGKVVCVTGASGYIASWIVKLLLLRGYTVNATVRDPKDKKKTEHLLALDGAKERLKLFKADLLEESSFDQAIDGCDAVFHTASPVLFTVTDPQTELIDPALKGTINVLNTCKQVSSVKRVILTSSTAAVLSRQPPIGPNDLVDETFFSDPSLCRETKNWYSLSKILAENAAWQFAKDNGIDMVVLNPGFICGPLLQPTLNMSVELIVDFINGKNPFNKRYYRFSDVRDVALVHIKALETPSANGRYIIDGPNMSVNDIIDILRKLFPDLSIADTNEESEMNEMICQVCVEKVKNLGVEFTPMKSSLRDTIVSLKEKCLL

SEQ ID NO: 22010 - protein, 322 aa, Arabidopsis thaliana
  peptide (1)..(322): Ceres Seq. ID no. 12348497
MNCGGKVVCVTGASGYIASWIVKLLLLRGYTVNATVRDPKDKKKTEHLLALDGAKERLKLFKADLLEESSFDQAIDGCDAVFHTASPVLFTVTDPQTELIDPALKGTINVLNTCKQVSSVKRVILTSSTAAVLSRQPPIGPNDLVDETFFSDPSLCRETKNWYSLSKILAENAAWQFAKDNGIDMVVLNPGFICGPLLQPTLNMSVELIVDFINGKNPFNKRYYRFSDVRDVALVHIKALETPSANGRYIIDGPNMSVNDIIDILRKLFPDLSIADTNEESEMNEMICQVCVEKVKNLGVEFTPMKSSLRDTIVSLKEKCLL

SEQ ID NO: 22011 - DNA, 945 bp, Arabidopsis thaliana
  misc_feature (1)..(945): Ceres Seq. ID no. 13592238
  misc_feature (1)..(945): Ortholog of  Ceres SEQ ID NO 13594593 as cited in SEQ ID NO 52026
gggaaagagcagaagaaatttgcagaagagagaaaaacaaaaatggcggttctttgctcgtcttcgacggtgatactctcttcttcttccgtgaaatcctccggaagtgagagaaagtctccgtttttagggttctctttaacggctatctcgaagccgtcggtacgagtcggcatttatgcgaattcgaaaagaggattgcaagtgaagtgtgaagctgagccgacgacgacgacttctcttgttccggcgaatcaacgatggatgttcgacgaagaagaagctaatggccctgacatctggaacacgacatggtatccaaaagcttcagaccatgtgaacacggacaagccctggtttgtggttgatgcaactgacaaaattcttggtagattggcatcgacaattgctaatcacatccgtgggaagaatcttgcctcttacactcctagtgtcgacatgggagcttttgtgattgtggtgaatgctgagaaagttgctgtatctggaaagaagcgtaaccaaaagctgtacaggaggcattcaggacgacctggtggtatgacagtagagacatttgatcaattgcagcagagaattcctgaaagaatcgttgagcatgctgttcgtggaatgcttccaaagggacggcttgggagagctctgttcaatcacctgaaggtgtacaaaggccctgaccatcctcacgaggcccagaaaccgcttgatctgcctatcagggacaagagaatacagctgcaaaaatagaagctccaccactgttccattatcgccaagcgcagagagttttttcttctcaggtttctgtagtttcttcatcccaaaaccagaggaggctttacagattcttgttttcgcttctatcaactctgttatgctacaaaactttctaatttgaaatatttctcgttatttttttttgcc

SEQ ID NO: 22012 - protein, 255 aa, Arabidopsis thaliana
  peptide (1)..(255): Ceres Seq. ID no. 13592239
GKEQKKFAEERKTKMAVLCSSSTVILSSSSVKSSGSERKSPFLGFSLTAISKPSVRVGIYANSKRGLQVKCEAEPTTTTSLVPANQRWMFDEEEANGPDIWNTTWYPKASDHVNTDKPWFVVDATDKILGRLASTIANHIRGKNLASYTPSVDMGAFVIVVNAEKVAVSGKKRNQKLYRRHSGRPGGMTVETFDQLQQRIPERIVEHAVRGMLPKGRLGRALFNHLKVYKGPDHPHEAQKPLDLPIRDKRIQLQK

SEQ ID NO: 22013 - protein, 241 aa, Arabidopsis thaliana
  peptide (1)..(241): Ceres Seq. ID no. 13592240
MAVLCSSSTVILSSSSVKSSGSERKSPFLGFSLTAISKPSVRVGIYANSKRGLQVKCEAEPTTTTSLVPANQRWMFDEEEANGPDIWNTTWYPKASDHVNTDKPWFVVDATDKILGRLASTIANHIRGKNLASYTPSVDMGAFVIVVNAEKVAVSGKKRNQKLYRRHSGRPGGMTVETFDQLQQRIPERIVEHAVRGMLPKGRLGRALFNHLKVYKGPDHPHEAQKPLDLPIRDKRIQLQK

SEQ ID NO: 22014 - protein, 167 aa, Arabidopsis thaliana
  peptide (1)..(167): Ceres Seq. ID no. 13592241
MFDEEEANGPDIWNTTWYPKASDHVNTDKPWFVVDATDKILGRLASTIANHIRGKNLASYTPSVDMGAFVIVVNAEKVAVSGKKRNQKLYRRHSGRPGGMTVETFDQLQQRIPERIVEHAVRGMLPKGRLGRALFNHLKVYKGPDHPHEAQKPLDLPIRDKRIQLQK

SEQ ID NO: 22015 - DNA, 922 bp, Arabidopsis thaliana
  misc_feature (1)..(922): Ceres Seq. ID no. 12333301
  misc_feature (1)..(922): Ortholog of  Ceres SEQ ID NO 15178042 as cited in SEQ ID NO 54787
  misc_feature (1)..(922): Ortholog of  Ceres SEQ ID NO 13597899 as cited in SEQ ID NO 64374
ctctccaaatttcttcttcttctccggcgaagaaatcgaaaagtcattaccctaagagtcccagagtcgtcagaaggaacagcttttgaaatggacggtgtcacataccaaagattcccaacggtgaagatccgtgagcttaaagatgactacgccaagttcgagcttcgtgaaaccgacgtttcaatggccaacgctctccgtcgcgtaatgatctccgaagtccccaccatggcaatccatctcgtcaaaatcgaggttaattcctctgttctcaacgacgagttcattgctcaacgacttcgtctcatccctctcactagcgagcgtgctatgagcatgcggttctgtcaagattgtgaagattgtaacggagatgaacattgcgagttctgctctgttgagtttccccttagtgctaagtgtgttactgaccaaaccctagatgttactagtagggatctctacagtgctgatcctactgttactcctgttgatttcactagtaactcatctacttctgattcaagcgagcacaagggaattatcattgcgaaactacgcaggggacaagagttgaagcttaaagcattagcgaggaaaggaattgggaaagatcatgcgaaatggtctcctgcagctactgttacgtatatgtatgagcctgacattattatcaatgaagagatgatgaacactttgacagatgaggaaaaaattgacttgattgagagcagtcctaccaaagtgtttggcattaccggacaggttaatttcgatgttctgtaagaataacatctatacaagtttatagctttgagacttcaatatgattgtactactttataggctaccatgctttgaaatatatgtatgtgatgtggtgtatgaattttctttaagtgtttagtgcgtttagccc

SEQ ID NO: 22016 - protein, 262 aa, Arabidopsis thaliana
  peptide (1)..(262): Ceres Seq. ID no. 12333302
LSKFLLLLRRRNRKVITLRVPESSEGTAFEMDGVTYQRFPTVKIRELKDDYAKFELRETDVSMANALRRVMISEVPTMAIHLVKIEVNSSVLNDEFIAQRLRLIPLTSERAMSMRFCQDCEDCNGDEHCEFCSVEFPLSAKCVTDQTLDVTSRDLYSADPTVTPVDFTSNSSTSDSSEHKGIIIAKLRRGQELKLKALARKGIGKDHAKWSPAATVTYMYEPDIIINEEMMNTLTDEEKIDLIESSPTKVFGITGQVNFDVL

SEQ ID NO: 22017 - protein, 232 aa, Arabidopsis thaliana
  peptide (1)..(232): Ceres Seq. ID no. 12333303
MDGVTYQRFPTVKIRELKDDYAKFELRETDVSMANALRRVMISEVPTMAIHLVKIEVNSSVLNDEFIAQRLRLIPLTSERAMSMRFCQDCEDCNGDEHCEFCSVEFPLSAKCVTDQTLDVTSRDLYSADPTVTPVDFTSNSSTSDSSEHKGIIIAKLRRGQELKLKALARKGIGKDHAKWSPAATVTYMYEPDIIINEEMMNTLTDEEKIDLIESSPTKVFGITGQVNFDVL

SEQ ID NO: 22018 - protein, 200 aa, Arabidopsis thaliana
  peptide (1)..(200): Ceres Seq. ID no. 12333304
MANALRRVMISEVPTMAIHLVKIEVNSSVLNDEFIAQRLRLIPLTSERAMSMRFCQDCEDCNGDEHCEFCSVEFPLSAKCVTDQTLDVTSRDLYSADPTVTPVDFTSNSSTSDSSEHKGIIIAKLRRGQELKLKALARKGIGKDHAKWSPAATVTYMYEPDIIINEEMMNTLTDEEKIDLIESSPTKVFGITGQVNFDVL

SEQ ID NO: 22019 - DNA, 1605 bp, Arabidopsis thaliana
  misc_feature (1)..(1605): Ceres Seq. ID no. 13501416
  misc_feature (1)..(1605): Ortholog of  Ceres SEQ ID NO 14314464 as cited in SEQ ID NO 52405
  misc_feature (1)..(1605): Ortholog of  Ceres SEQ ID NO 15177592 as cited in SEQ ID NO 58436
  misc_feature (1)..(1605): Ortholog of  Ceres SEQ ID NO 13655251 as cited in SEQ ID NO 62888
  misc_feature (1)..(1605): Ortholog of  Ceres SEQ ID NO 13597194 as cited in SEQ ID NO 63661
  misc_feature (1)..(1605): Ortholog of  Ceres SEQ ID NO 14302883 as cited in SEQ ID NO 66384
  misc_feature (1)..(1605): Ortholog of  Ceres SEQ ID NO 13662855 as cited in SEQ ID NO 69059
acgagacaaccaaacacagatctgcttccttcttcacctttttttttttttttttgtaattttggtttccctttttttttattaaataagatttattcctccatcgttacctaatccccttcttcgtcttcttcagcttcactgagtcttacgaacatagcaaaatccaaatcaaattcctgaagaaacctctttcgctctcgtcttcgttttcagatcaacaagaaatggcaacagcaacatcagcttctctgttttcaactgtttcttcatcttactccaaagctagctccataccacattcaagactccaatctgtgaaatttaactcagtccctagcttcaccggtctcaaatcaacctctctcatctccggatctgattcctcttccttaaccaagactctccgcggttccgtaacgaatgcacaaacatctgacaagaagccttacggattcaaaatcaacgcttcgtacaaagtagctgttcttggtgctgctggtggtataggtcagcctttatcacttctcatcaagatgtctccgttagtctctacgcttcatctttacgatatcgccaatgttaaaggagttgctgctgatctaagtcattgtaacactccttctcaagttcgtgatttcactggtccttctgagttagctgattgtttgaaagatgttaacgttgttgtcatccctgctggtgtgccgaggaaacccggtatgactcgtgacgatcttttcaacatcaatgccaatattgtcaagactcttgttgaagctgttgctgagaattgccctaatgctttcattcatattattagtaacccggttaactctacggtacctattgctgctgaagtgttgaagaagaaaggtgtttatgatcctaagaagctgtttggtgtcactactttggatgttgtgagggctaacacttttgtttctcagaagaagaatcttaagcttattgatgttgatgttccggttattggtggacatgctggaatcaccattttgcctctcctctcgaagacaaaaccgtctgttaactttactgatgaagagatccaagagctcactgttaggattcagaacgctggtactgaggttgttgatgctaaggcaggtgcaggttcagctactttgtcaatggcttatgctgctgctagatttgtggagtcatctcttcgtgctcttgatggagacggagatgtctacgagtgctcgtttgtggagtcgactctgactgatcttcctttctttgcatcacgggttaagatagggaagaacggtcttgaagctgtgattgagtcagaccttcagggattgactgagtatgagcagaaagcactagaagctcttaaggtagaattgaaagctagcattgacaagggtgtcgcatttgcaaacaaaccagctgctgcagcagctaactagatcgcaagctgataacatttttcttctgatcatttcgagttttgttttatttttcatatttgttgcatcggcgagacattttcgtgttgtagaataaagaatgtatttgcttcagtttgaagattttggaacatggcattgaagcagaatttataaatcatcaccg

SEQ ID NO: 22020 - protein, 403 aa, Arabidopsis thaliana
  peptide (1)..(403): Ceres Seq. ID no. 13501417
MATATSASLFSTVSSSYSKASSIPHSRLQSVKFNSVPSFTGLKSTSLISGSDSSSLTKTLRGSVTNAQTSDKKPYGFKINASYKVAVLGAAGGIGQPLSLLIKMSPLVSTLHLYDIANVKGVAADLSHCNTPSQVRDFTGPSELADCLKDVNVVVIPAGVPRKPGMTRDDLFNINANIVKTLVEAVAENCPNAFIHIISNPVNSTVPIAAEVLKKKGVYDPKKLFGVTTLDVVRANTFVSQKKNLKLIDVDVPVIGGHAGITILPLLSKTKPSVNFTDEEIQELTVRIQNAGTEVVDAKAGAGSATLSMAYAAARFVESSLRALDGDGDVYECSFVESTLTDLPFFASRVKIGKNGLEAVIESDLQGLTEYEQKALEALKVELKASIDKGVAFANKPAAAAAN

SEQ ID NO: 22021 - protein, 300 aa, Arabidopsis thaliana
  peptide (1)..(300): Ceres Seq. ID no. 13501418
MSPLVSTLHLYDIANVKGVAADLSHCNTPSQVRDFTGPSELADCLKDVNVVVIPAGVPRKPGMTRDDLFNINANIVKTLVEAVAENCPNAFIHIISNPVNSTVPIAAEVLKKKGVYDPKKLFGVTTLDVVRANTFVSQKKNLKLIDVDVPVIGGHAGITILPLLSKTKPSVNFTDEEIQELTVRIQNAGTEVVDAKAGAGSATLSMAYAAARFVESSLRALDGDGDVYECSFVESTLTDLPFFASRVKIGKNGLEAVIESDLQGLTEYEQKALEALKVELKASIDKGVAFANKPAAAAAN

SEQ ID NO: 22022 - protein, 238 aa, Arabidopsis thaliana
  peptide (1)..(238): Ceres Seq. ID no. 13501419
MTRDDLFNINANIVKTLVEAVAENCPNAFIHIISNPVNSTVPIAAEVLKKKGVYDPKKLFGVTTLDVVRANTFVSQKKNLKLIDVDVPVIGGHAGITILPLLSKTKPSVNFTDEEIQELTVRIQNAGTEVVDAKAGAGSATLSMAYAAARFVESSLRALDGDGDVYECSFVESTLTDLPFFASRVKIGKNGLEAVIESDLQGLTEYEQKALEALKVELKASIDKGVAFANKPAAAAAN

SEQ ID NO: 22023 - DNA, 1625 bp, Arabidopsis thaliana
  misc_feature (1)..(1625): Ceres Seq. ID no. 13490326
  misc_feature (1)..(1625): Ortholog of  Ceres SEQ ID NO 13660287 as cited in SEQ ID NO 67316
aaagattggatatgatctaaaaaatcagaggcaaatcaatcaagattaagaagacgacaatggaagagccatttcttccgagagacgagcagttagtctcttgtaaatccacatggcaaagtggtcaggtcaccgtcgagctgaagaaagtgagccgcttggccgctcctatggccaccgtaaccatagctcagtacttattgcctgtcatctcagtcatggtcgccggccacatcggcgagttggagctcgccggtgtcgcgcttgccacgtctttcacaaacgtttccggcttcagcataatgtttgggttagttggtgcattggaaactctttgtggccaagcctatggagcagaacaatacgaaaaaatcggaacctatacatactctgcaatggcttccaacataccaatttgtttcatcatatcaattctatggatttacatcgaaaagctcttgatcactctcgggcaagagcctgacatctctagagtcgctggctcctactcattgtggctcgtaccggctttgtttgcccatgctattttcttaccactgactcggtttctgctagcacaagggttggttatttccctgctatactctgccatgaccacccttttgttccatattgcggtttgctggactttggttttcgcgcttggtcttggaagcaatggagctgctattgctattagtttgtctttctggttttacgctgtgatactctcatgtcatgtgagatttttcagctcttgcgagaagactcgcggatttgtatcaaatgattttatgtctagtatcaagcagtacttccagtacggagtcccatccgctggattgatttgcttagaatggtggctgtttgagctactcatactctgctcaggtcttctcccaaacccaaaactcgagacatctgttctttcgatttgtcttacaataggaactttacactatgtgattccatctggagtcgcggcggctgtgagcacacgagtgtcaaacaaattgggagctggaaatcctcaagttgctagggtttccgtattggcagggctttgtctctggcttgtagagtcagctttctttagcacacttctcttcacctgccgaaacatcataggctacacattcagcaacagcaaagaagttgttgactatgttgctgacatatctcctttgctctgtctctccttcatcctcgacggattaacggcagttctaaatggagtggctaggggatgtgggtggcaacacattggagctttgatcaacgtggtggcttattatcttgtaggagctcctgttggagtttacttagctttcagtcgtgagtggaatggaaaaggactctggtgcggtgttatggttggatccgcggtgcaagccactttactggctatcgtcacagcctccatgaactggaaggaacaggctgagaaagcaaggaagagaataatctctactgaaaatggattggtttaaataaaggttgttcctaagagctatctcaaagtatttgcaagtcatgtgcaaaaaaacatgtaatgttattttgatgggttataatatttttttgtaaaacttttatccaggatttatacattttttcttgagttg

SEQ ID NO: 22024 - protein, 476 aa, Arabidopsis thaliana
  peptide (1)..(476): Ceres Seq. ID no. 13490327
MEEPFLPRDEQLVSCKSTWQSGQVTVELKKVSRLAAPMATVTIAQYLLPVISVMVAGHIGELELAGVALATSFTNVSGFSIMFGLVGALETLCGQAYGAEQYEKIGTYTYSAMASNIPICFIISILWIYIEKLLITLGQEPDISRVAGSYSLWLVPALFAHAIFLPLTRFLLAQGLVISLLYSAMTTLLFHIAVCWTLVFALGLGSNGAAIAISLSFWFYAVILSCHVRFFSSCEKTRGFVSNDFMSSIKQYFQYGVPSAGLICLEWWLFELLILCSGLLPNPKLETSVLSICLTIGTLHYVIPSGVAAAVSTRVSNKLGAGNPQVARVSVLAGLCLWLVESAFFSTLLFTCRNIIGYTFSNSKEVVDYVADISPLLCLSFILDGLTAVLNGVARGCGWQHIGALINVVAYYLVGAPVGVYLAFSREWNGKGLWCGVMVGSAVQATLLAIVTASMNWKEQAEKARKRIISTENGLV

SEQ ID NO: 22025 - protein, 439 aa, Arabidopsis thaliana
  peptide (1)..(439): Ceres Seq. ID no. 13490328
MATVTIAQYLLPVISVMVAGHIGELELAGVALATSFTNVSGFSIMFGLVGALETLCGQAYGAEQYEKIGTYTYSAMASNIPICFIISILWIYIEKLLITLGQEPDISRVAGSYSLWLVPALFAHAIFLPLTRFLLAQGLVISLLYSAMTTLLFHIAVCWTLVFALGLGSNGAAIAISLSFWFYAVILSCHVRFFSSCEKTRGFVSNDFMSSIKQYFQYGVPSAGLICLEWWLFELLILCSGLLPNPKLETSVLSICLTIGTLHYVIPSGVAAAVSTRVSNKLGAGNPQVARVSVLAGLCLWLVESAFFSTLLFTCRNIIGYTFSNSKEVVDYVADISPLLCLSFILDGLTAVLNGVARGCGWQHIGALINVVAYYLVGAPVGVYLAFSREWNGKGLWCGVMVGSAVQATLLAIVTASMNWKEQAEKARKRIISTENGLV

SEQ ID NO: 22026 - protein, 423 aa, Arabidopsis thaliana
  peptide (1)..(423): Ceres Seq. ID no. 13490329
MVAGHIGELELAGVALATSFTNVSGFSIMFGLVGALETLCGQAYGAEQYEKIGTYTYSAMASNIPICFIISILWIYIEKLLITLGQEPDISRVAGSYSLWLVPALFAHAIFLPLTRFLLAQGLVISLLYSAMTTLLFHIAVCWTLVFALGLGSNGAAIAISLSFWFYAVILSCHVRFFSSCEKTRGFVSNDFMSSIKQYFQYGVPSAGLICLEWWLFELLILCSGLLPNPKLETSVLSICLTIGTLHYVIPSGVAAAVSTRVSNKLGAGNPQVARVSVLAGLCLWLVESAFFSTLLFTCRNIIGYTFSNSKEVVDYVADISPLLCLSFILDGLTAVLNGVARGCGWQHIGALINVVAYYLVGAPVGVYLAFSREWNGKGLWCGVMVGSAVQATLLAIVTASMNWKEQAEKARKRIISTENGLV

SEQ ID NO: 22027 - DNA, 808 bp, Arabidopsis thaliana
  misc_feature (1)..(808): Ceres Seq. ID no. 13592444
  misc_feature (1)..(808): Ortholog of  Ceres SEQ ID NO 12610334 as cited in SEQ ID NO 56235
  misc_feature (1)..(808): Ortholog of  Ceres SEQ ID NO 13654825 as cited in SEQ ID NO 62409
actcacagagacacacaaaacaaatcccaaagcttcagaggaagaagaagaagagagtgagaaacaatggcgtcgacgactctctcaatcgcaacaacaatccgttcctcttctcctctcacttccgcttccactcatcacttcctttccaaacccaccgcaatcgaattcccatttcgtctcagctcttcttctagccaccgtgcaatcaacctccgtcctatctccgccgtcgaagctccggagaaaatcgagaagatcggatccgaaatctcatccctaaccctcgaagaagctcgtatcctcgtcgactatctccaagacaaattcggtgtctccccactctctttagcccccgcagcagcggcggttgctgctccagccgacggtggcgcggcggctgtagtggaggagcaaacaaagttcgatgtggttatcaatgaagttcccagcagttcccgtattgcagtgattaaagctgttagggctttaactagcttggcgttgaaggaagctaaggagctaatcgaaggattaccaaagaagtttaaagaaggtatcactaaagatgaagctgaagaagctaagaagactcttgaagaagctggtgctaaagtctccattgcttaagtttcttcaacaatcggaaaaaaaaaaatgtgatcttttcggaatttatgagtctttttgttgtttagtatagtttgtgtttgagttgttgattcagcttttgagaaattgttgtactttgaatcaatttggtttcgtattacagttttagtcttcaacaagttcttcctctagatgc

SEQ ID NO: 22028 - protein, 187 aa, Arabidopsis thaliana
  peptide (1)..(187): Ceres Seq. ID no. 15221104
MASTTLSIATTIRSSSPLTSASTHHFLSKPTAIEFPFRLSSSSSHRAINLRPISAVEAPEKIEKIGSEISSLTLEEARILVDYLQDKFGVSPLSLAPAAAAVAAPADGGAAAVVEEQTKFDVVINEVPSSSRIAVIKAVRALTSLALKEAKELIEGLPKKFKEGITKDEAEEAKKTLEEAGAKVSIA

SEQ ID NO: 22029 - protein, 93 aa, Arabidopsis thaliana
  peptide (1)..(93): Ceres Seq. ID no. 15221105
LTETHKTNPKASEEEEEESEKQWRRRLSQSQQQSVPLLLSLPLPLITSFPNPPQSNSHFVSALLLATVQSTSVLSPPSKLRRKSRRSDPKSHP

SEQ ID NO: 22030 - DNA, 1243 bp, Arabidopsis thaliana
  misc_feature (1)..(1243): Ceres Seq. ID no. 12562371
  misc_feature (1)..(1243): Ortholog of  Ceres SEQ ID NO 13581848 as cited in SEQ ID NO 51340
  misc_feature (1)..(1243): Ortholog of  Ceres SEQ ID NO 13595392 as cited in SEQ ID NO 56164
  misc_feature (1)..(1243): Ortholog of  Ceres SEQ ID NO 14316412 as cited in SEQ ID NO 59209
  misc_feature (1)..(1243): Ortholog of  Ceres SEQ ID NO 12618341 as cited in SEQ ID NO 64256
attgtaacttgtaaccagtgtcggctaatttcgacttttgtagatctttttctgctctttctctctctctctctctctctctctctctctctctcttgtattatttctatctcccccgccgtcgaaagagaaacgtcgatcggagaacctttgaaatgtcgactggattagatatgtctctcgacgacatgatcgccaagaaccgtaagtctcgtggtggagccggccccgctcgtggaaccggatccggatccggaccgggtccgactcgccgcaacaaccctaatcggaaatcaacccgatctgctccataccaatcagccaaggcgccggagtccacctggggtcacgacatgttctccgatagatctgaagatcaccgatcgggacgttcctccgccggaatcgaaactggaaccaagctctacatttccaatttggattacggtgtcatgaacgaagacatcaaggaactgtttgctgaagttggagaacttaaacgctacacagttcattttgatagaagtggaagatcaaagggaactgctgaagtagtgtattctcggcgtggcgatgcactcgcagctgtgaagaagtataatgatgttcagctggatggaaaacccatgaagatagagattgtgggcactaatcttcaaactgctgcagccccgtctggtagacctgcgaatggaaactccaatggtgctccatggagaggaggacaagggagaggaggtcaacaacgaggtggtggacgaggaggcggtggccgaggtggtggtggtcgtggtaggcgtcctggtaagggccctgcagagaagatttctgcggaagatcttgatgcggatcttgataagtaccattctggagatatggagacaaactaaggaacgtgactgatcttctcaaaccggtaggggttttaggaggaagagaatcgagaaaatgtttgccagaggctttaccacttagcgcctttttggctgtgttgttcatttgtttcattagaatgactttacagaattgagaatatgtgttatttaaagttgttgtctatcttaataccctcaagtgaaaggcagaggaaggaataccaatttcgtttacagatcatatgcaggcaaaagagttttcagaaatcaggtttagttacttgtattgtgtctcttatccaagccatgccttgtggtattatgagcgcagaattttgattgaatattgttcatttgcattaaagtat

SEQ ID NO: 22031 - protein, 244 aa, Arabidopsis thaliana; identical to SEQ ID NO: 20888
  peptide (1)..(244): Ceres Seq. ID no. 12562372

SEQ ID NO: 22032 - protein, 238 aa, Arabidopsis thaliana; identical to SEQ ID NO: 20889
  peptide (1)..(238): Ceres Seq. ID no. 12562373

SEQ ID NO: 22033 - protein, 233 aa, Arabidopsis thaliana
  peptide (1)..(233): Ceres Seq. ID no. 12562374
MIAKNRKSRGGAGPARGTGSGSGPGPTRRNNPNRKSTRSAPYQSAKAPESTWGHDMFSDRSEDHRSGRSSAGIETGTKLYISNLDYGVMNEDIKELFAEVGELKRYTVHFDRSGRSKGTAEVVYSRRGDALAAVKKYNDVQLDGKPMKIEIVGTNLQTAAAPSGRPANGNSNGAPWRGGQGRGGQQRGGGRGGGGRGGGGRGRRPGKGPAEKISAEDLDADLDKYHSGDMETN

SEQ ID NO: 22034 - DNA, 1146 bp, Arabidopsis thaliana
  misc_feature (1)..(1146): Ceres Seq. ID no. 12325970
  misc_feature (1)..(1146): Ortholog of  Ceres SEQ ID NO 14314434 as cited in SEQ ID NO 52401
  misc_feature (1)..(1146): Ortholog of  Ceres SEQ ID NO 14303939 as cited in SEQ ID NO 54286
  misc_feature (1)..(1146): Ortholog of  Ceres SEQ ID NO 14307760 as cited in SEQ ID NO 54741
  misc_feature (1)..(1146): Ortholog of  Ceres SEQ ID NO 14313391 as cited in SEQ ID NO 58556
  misc_feature (1)..(1146): Ortholog of  Ceres SEQ ID NO 14307540 as cited in SEQ ID NO 59670
  misc_feature (1)..(1146): Ortholog of  Ceres SEQ ID NO 15179003 as cited in SEQ ID NO 0
  misc_feature (1)..(1146): Ortholog of  Ceres SEQ ID NO 15179235 as cited in SEQ ID NO 0
ctttttctctttcacatcgttctttctctcgcaaacccaaattctctcagcgccggtcaaatacttgtctctctctctctctctctttcactcttgtcttgtctccttcgaagctgtttgttctgtaagaaagatggaagcaggtggcgcgtacaatccacgcactgttgaagaggtgtttagggattttaagggtcgtagagctggcatgattaaggctttaaccactgatgttcaggagtttttccgactttgtgatcccgaaaaggagaacctttgcctttacggacatccaaatgagcactgggaagtgaatttgccagctgaagaggttcctcctgagctcccagagcctgtcttgggtatcaattttgccagagacgggatggcggaaaaggattggttgtcccttgttgctgtccacagtgatgcttggcttcttgctgttgctttcttttttggagccaggtttggatttgacaaagctgataggaagaggcttttcaatatggtgaatgacctcccaacaatctttgaggttgtagctggcactgctaagaaacaaggaaaagataagtcctctgtttccaacaacagcagcaacagatccaaatcaagctccaagcgaggatctgaatcccgtgccaagttctcaaagccggagccgaaagatgatgaggaggaggaagaggaaggtgtggaagaggaggatgaggatgagcaaggtgaaacacagtgtggagcatgtggtgagagctatgcagctgatgagttctggatttgctgtgacctctgtgagatgtggtttcatggaaagtgtgttaagataacaccagcaagagctgagcacatcaagcaatacaagtgcccttcttgcagcaacaaaagggctcgttcctaaatttgttgaccgctcgcttctgtgtatctacctttgcatatgatgatgaacagcttaactgtttggtttagatcagatttgtcatatggatttggtaattttaggaagacattttagttttttcattgttacattttggcgattgaagggataactctttgtttaggggtaatgatcttttgctctgttttatgtttgtttattaacattcttcaaactcaatcaaaagtattttggttagtctt

SEQ ID NO: 22035 - protein, 299 aa, Arabidopsis thaliana
  peptide (1)..(299): Ceres Seq. ID no. 12325971
FFSFTSFFLSQTQILSAPVKYLSLSLSLFHSCLVSFEAVCSVRKMEAGGAYNPRTVEEVFRDFKGRRAGMIKALTTDVQEFFRLCDPEKENLCLYGHPNEHWEVNLPAEEVPPELPEPVLGINFARDGMAEKDWLSLVAVHSDAWLLAVAFFFGARFGFDKADRKRLFNMVNDLPTIFEVVAGTAKKQGKDKSSVSNNSSNRSKSSSKRGSESRAKFSKPEPKDDEEEEEEGVEEEDEDEQGETQCGACGESYAADEFWICCDLCEMWFHGKCVKITPARAEHIKQYKCPSCSNKRARS

SEQ ID NO: 22036 - protein, 255 aa, Arabidopsis thaliana
  peptide (1)..(255): Ceres Seq. ID no. 12325972
MEAGGAYNPRTVEEVFRDFKGRRAGMIKALTTDVQEFFRLCDPEKENLCLYGHPNEHWEVNLPAEEVPPELPEPVLGINFARDGMAEKDWLSLVAVHSDAWLLAVAFFFGARFGFDKADRKRLFNMVNDLPTIFEVVAGTAKKQGKDKSSVSNNSSNRSKSSSKRGSESRAKFSKPEPKDDEEEEEEGVEEEDEDEQGETQCGACGESYAADEFWICCDLCEMWFHGKCVKITPARAEHIKQYKCPSCSNKRARS

SEQ ID NO: 22037 - protein, 230 aa, Arabidopsis thaliana
  peptide (1)..(230): Ceres Seq. ID no. 12325973
MIKALTTDVQEFFRLCDPEKENLCLYGHPNEHWEVNLPAEEVPPELPEPVLGINFARDGMAEKDWLSLVAVHSDAWLLAVAFFFGARFGFDKADRKRLFNMVNDLPTIFEVVAGTAKKQGKDKSSVSNNSSNRSKSSSKRGSESRAKFSKPEPKDDEEEEEEGVEEEDEDEQGETQCGACGESYAADEFWICCDLCEMWFHGKCVKITPARAEHIKQYKCPSCSNKRARS

SEQ ID NO: 22038 - DNA, 2256 bp, Arabidopsis thaliana
  misc_feature (1)..(2256): Ceres Seq. ID no. 13646318
  misc_feature (1)..(2256): Ortholog of  Ceres SEQ ID NO 14303276 as cited in SEQ ID NO 1264
  misc_feature (1)..(2256): Ortholog of  Ceres SEQ ID NO 15170536 as cited in SEQ ID NO 52791
  misc_feature (1)..(2256): Ortholog of  Ceres SEQ ID NO 15171813 as cited in SEQ ID NO 57309
  misc_feature (1)..(2256): Ortholog of  Ceres SEQ ID NO 14314378 as cited in SEQ ID NO 57601
  misc_feature (1)..(2256): Ortholog of  Ceres SEQ ID NO 12465083 as cited in SEQ ID NO 68239
gaccaaatacaaaccctagccgccttattcgtcttcttcgttctctagttttttcctcagtctctgttcttagatcccttgtagtttccaaatcttccgataaaaatgtcgggtaaaggagaaggaccagctatcggtatcgatcttggtaccacttactcttgcgtcggagtatggcaacacgaccgtgttgagatcattgctaatgatcaaggaaacagaaccacgccatcttacgttgctttcaccgactccgagaggttgatcggtgacgcagctaagaatcaggtcgccatgaaccccgttaacaccgttttcgacgctaagaggttgatcggtcgtcgtttctctgacagctctgttcagagtgacatgaaattgtggccattcaagattcaagccggacctgccgataagccaatgatctacgtcgaatacaagggtgaagagaaagagttcgcagctgaggagatttcttccatggttcttattaagatgcgtgagattgctgaggcttaccttggtgtcacaatcaagaacgccgttgttaccgttccagcttacttcaacgactctcagcgtcaggctacaaaggatgctggtgtcatcgctggtttgaacgttatgcgaatcatcaacgagcctacagccgccgctattgcctacggtcttgacaaaaaggctaccagcgttggagagaagaatgttcttatcttcgatcttggtggtggcacttttgatgtctctcttcttaccattgaagagggtatctttgaggtgaaggcaactgctggtgacacccatcttggtggggaagattttgacaacagaatggttaaccactttgtccaagagttcaagaggaagagtaagaaggatatcaccggtaacccaagagctcttaggaggttgagaacttcctgtgagagagcgaagaggactctttcttccactgctcagaccaccatcgagattgactctctatacgagggtatcgacttctactccaccatcacccgtgctagatttgaggagctcaacatggatctcttcaggaagtgtatggagccagttgagaagtgtcttcgtgatgctaagatggacaagagcactgttcatgatgttgtccttgttggtggttctacccgtatccctaaggttcagcaattgctccaggacttcttcaacggcaaagagctttgcaagtctattaaccctgatgaggctgttgcctacggtgctgctgtccagggagctattctcagcggtgaaggaaacgagaaggttcaagatcttctattgctcgatgtcactcctctctcccttggtttggaaactgccggtggtgtcatgaccactttgatcccaaggaacacaaccatcccaaccaagaaggaacaagtcttctccacctactcagacaaccaacccggtgtgttgatccaggtgtacgaaggagagagagccagaaccaaggacaacaaccttcttggtaaatttgagctctccggaattcctccagctcctcgtggtgtcccccagatcacagtctgctttgacattgatgccaatggtatcctcaatgtctctgctgaggacaagaccaccggacagaagaacaagatcaccatcaccaatgacaagggtcgtctctccaaggatgagattgagaagatggttcaagaggctgagaagtacaagtccgaagacgaggagcacaagaagaaggttgaagccaagaacgctctcgagaactacgcttacaacatgaggaacaccatccaagacgagaagattggtgagaagctcccggctgcagacaagaagaagatcgaggattctattgagcaggcgattcaatggctcgagggtaaccagttggctgaggctgatgagttcgaagacaagatgaaggaattggagagcatctgcaacccaatcattgccaagatgtaccaaggagctggtggtgaagccggtggtccaggtgcctctggtatggacgatgatgctccccctgcttcaggcggtgctggacctaagatcgaggaggtcgactaatttgttggacaatgacctctctctttctcctatctctatctcttttacttgcttttttttgatctgttaagactttttatgttgggcttttttaaagaagcccattttgtggtgttttttggttagtacttttttgaacaatggttggttctataccagtttagctacgatgacggataaaattaaaagtttgcc

SEQ ID NO: 22039 - protein, 651 aa, Arabidopsis thaliana
  peptide (1)..(651): Ceres Seq. ID no. 13646319
MSGKGEGPAIGIDLGTTYSCVGVWQHDRVEIIANDQGNRTTPSYVAFTDSERLIGDAAKNQVAMNPVNTVFDAKRLIGRRFSDSSVQSDMKLWPFKIQAGPADKPMIYVEYKGEEKEFAAEEISSMVLIKMREIAEAYLGVTIKNAVVTVPAYFNDSQRQATKDAGVIAGLNVMRIINEPTAAAIAYGLDKKATSVGEKNVLIFDLGGGTFDVSLLTIEEGIFEVKATAGDTHLGGEDFDNRMVNHFVQEFKRKSKKDITGNPRALRRLRTSCERAKRTLSSTAQTTIEIDSLYEGIDFYSTITRARFEELNMDLFRKCMEPVEKCLRDAKMDKSTVHDVVLVGGSTRIPKVQQLLQDFFNGKELCKSINPDEAVAYGAAVQGAILSGEGNEKVQDLLLLDVTPLSLGLETAGGVMTTLIPRNTTIPTKKEQVFSTYSDNQPGVLIQVYEGERARTKDNNLLGKFELSGIPPAPRGVPQITVCFDIDANGILNVSAEDKTTGQKNKITITNDKGRLSKDEIEKMVQEAEKYKSEDEEHKKKVEAKNALENYAYNMRNTIQDEKIGEKLPAADKKKIEDSIEQAIQWLEGNQLAEADEFEDKMKELESICNPIIAKMYQGAGGEAGGPGASGMDDDAPPASGGAGPKIEEVD

SEQ ID NO: 22040 - protein, 588 aa, Arabidopsis thaliana
  peptide (1)..(588): Ceres Seq. ID no. 13646320
MNPVNTVFDAKRLIGRRFSDSSVQSDMKLWPFKIQAGPADKPMIYVEYKGEEKEFAAEEISSMVLIKMREIAEAYLGVTIKNAVVTVPAYFNDSQRQATKDAGVIAGLNVMRIINEPTAAAIAYGLDKKATSVGEKNVLIFDLGGGTFDVSLLTIEEGIFEVKATAGDTHLGGEDFDNRMVNHFVQEFKRKSKKDITGNPRALRRLRTSCERAKRTLSSTAQTTIEIDSLYEGIDFYSTITRARFEELNMDLFRKCMEPVEKCLRDAKMDKSTVHDVVLVGGSTRIPKVQQLLQDFFNGKELCKSINPDEAVAYGAAVQGAILSGEGNEKVQDLLLLDVTPLSLGLETAGGVMTTLIPRNTTIPTKKEQVFSTYSDNQPGVLIQVYEGERARTKDNNLLGKFELSGIPPAPRGVPQITVCFDIDANGILNVSAEDKTTGQKNKITITNDKGRLSKDEIEKMVQEAEKYKSEDEEHKKKVEAKNALENYAYNMRNTIQDEKIGEKLPAADKKKIEDSIEQAIQWLEGNQLAEADEFEDKMKELESICNPIIAKMYQGAGGEAGGPGASGMDDDAPPASGGAGPKIEEVD

SEQ ID NO: 22041 - protein, 562 aa, Arabidopsis thaliana
  peptide (1)..(562): Ceres Seq. ID no. 13646321
MKLWPFKIQAGPADKPMIYVEYKGEEKEFAAEEISSMVLIKMREIAEAYLGVTIKNAVVTVPAYFNDSQRQATKDAGVIAGLNVMRIINEPTAAAIAYGLDKKATSVGEKNVLIFDLGGGTFDVSLLTIEEGIFEVKATAGDTHLGGEDFDNRMVNHFVQEFKRKSKKDITGNPRALRRLRTSCERAKRTLSSTAQTTIEIDSLYEGIDFYSTITRARFEELNMDLFRKCMEPVEKCLRDAKMDKSTVHDVVLVGGSTRIPKVQQLLQDFFNGKELCKSINPDEAVAYGAAVQGAILSGEGNEKVQDLLLLDVTPLSLGLETAGGVMTTLIPRNTTIPTKKEQVFSTYSDNQPGVLIQVYEGERARTKDNNLLGKFELSGIPPAPRGVPQITVCFDIDANGILNVSAEDKTTGQKNKITITNDKGRLSKDEIEKMVQEAEKYKSEDEEHKKKVEAKNALENYAYNMRNTIQDEKIGEKLPAADKKKIEDSIEQAIQWLEGNQLAEADEFEDKMKELESICNPIIAKMYQGAGGEAGGPGASGMDDDAPPASGGAGPKIEEVD

SEQ ID NO: 22042 - DNA, 1430 bp, Arabidopsis thaliana
  misc_feature (1)..(1430): Ceres Seq. ID no. 12482890
  misc_feature (1)..(1430): Ortholog of  Ceres SEQ ID NO 14316017 as cited in SEQ ID NO 67028
  misc_feature (1)..(1430): Ortholog of  Ceres SEQ ID NO 15177500 as cited in SEQ ID NO 0
aaatatcttcgaaaccccattactctcaaatccaaccaacctttcaaaacagaacacgaagacatggaccgaacacaatctccaaagacagctctgttcgccgtgttggcaacactccttgtcttaaccgtgaacggccagtcactttgtaacacacacaggttcaccaataacctcgccttcgcagattgctctgacctctcggccttaggctctttccttcactggacctacaatgaacaaaacggtaccgtctcaatcgcctatcgccaccctggaacctctgcttcttcttgggttgcttggggacttaacccaagtagtactcagatggttgggacgcaagctctcgtagccttcacaaacacaacaactaaccaattccaggcctatacctcttccgtgagttcctatggtacgcggcttgaacgtagtagcctaagtttcggtgtgagtggcctctccgcgactctggtcagtggcgaggttacgatctttgcaactcttgagttgtctccgaatctgatcacggccaaccagctttggcaggtgggacctgttgtcaacggtgttcctgcgagtcatcaaacctcaggagataatatgagatcgagtggtaggattgatttccggactggtcaggcatcagctggtggtggtggttccggtgacaggctgaggaagagaaacacgcatggagtactaaatgcggtcagctggggagtactaatgccaatgggagcaatgatggctcggtacatgaaagtcttcgccgatccaacatggttctatctccacattgcctttcaagtgtcgggttacgtcatcggggtagccggttgggccaccggaatcaagcttggtaacgactcaccaggcacatcttactcaacccatcgtaaccttggaatagcactcttcacatttgccacacttcaagtatttgctctgcttgtaaggccaaagccagaccacaaatatcgaacgtactggaacgtgtaccatcacaccgttggatacacaaccatcatcctctctattgtcaacattttcaaaggattcgacattttggacccggaggataaatggcgatgggcttacattgggatcctcatctttcttggtgcttgtgtccttattctcgagccactcacttggttcattgttcttcgccgtaagagccgtggaggtaacacagtcgctgcaccaacttcgagcaagtactctaacggcgtcaatggtaccaccaccactggaccacatcaccaggacgcctagtttcactttttgtttctacacttgttcttgtttgttctacttctactcgattttggattcttttttgatttgatattttgtaggctcatgtatgtattatgtatacaattttattcattgtgttatagatatatcgatttatggagtcaaat

SEQ ID NO: 22043 - protein, 425 aa, Arabidopsis thaliana
  peptide (1)..(425): Ceres Seq. ID no. 12482891
KYLRNPITLKSNQPFKTEHEDMDRTQSPKTALFAVLATLLVLTVNGQSLCNTHRFTNNLAFADCSDLSALGSFLHWTYNEQNGTVSIAYRHPGTSASSWVAWGLNPSSTQMVGTQALVAFTNTTTNQFQAYTSSVSSYGTRLERSSLSFGVSGLSATLVSGEVTIFATLELSPNLITANQLWQVGPVVNGVPASHQTSGDNMRSSGRIDFRTGQASAGGGGSGDRLRKRNTHGVLNAVSWGVLMPMGAMMARYMKVFADPTWFYLHIAFQVSGYVIGVAGWATGIKLGNDSPGTSYSTHRNLGIALFTFATLQVFALLVRPKPDHKYRTYWNVYHHTVGYTTIILSIVNIFKGFDILDPEDKWRWAYIGILIFLGACVLILEPLTWFIVLRRKSRGGNTVAAPTSSKYSNGVNGTTTTGPHHQDA

SEQ ID NO: 22044 - protein, 404 aa, Arabidopsis thaliana
  peptide (1)..(404): Ceres Seq. ID no. 12482892
MDRTQSPKTALFAVLATLLVLTVNGQSLCNTHRFTNNLAFADCSDLSALGSFLHWTYNEQNGTVSIAYRHPGTSASSWVAWGLNPSSTQMVGTQALVAFTNTTTNQFQAYTSSVSSYGTRLERSSLSFGVSGLSATLVSGEVTIFATLELSPNLITANQLWQVGPVVNGVPASHQTSGDNMRSSGRIDFRTGQASAGGGGSGDRLRKRNTHGVLNAVSWGVLMPMGAMMARYMKVFADPTWFYLHIAFQVSGYVIGVAGWATGIKLGNDSPGTSYSTHRNLGIALFTFATLQVFALLVRPKPDHKYRTYWNVYHHTVGYTTIILSIVNIFKGFDILDPEDKWRWAYIGILIFLGACVLILEPLTWFIVLRRKSRGGNTVAAPTSSKYSNGVNGTTTTGPHHQDA

SEQ ID NO: 22045 - protein, 315 aa, Arabidopsis thaliana
  peptide (1)..(315): Ceres Seq. ID no. 12482893
MVGTQALVAFTNTTTNQFQAYTSSVSSYGTRLERSSLSFGVSGLSATLVSGEVTIFATLELSPNLITANQLWQVGPVVNGVPASHQTSGDNMRSSGRIDFRTGQASAGGGGSGDRLRKRNTHGVLNAVSWGVLMPMGAMMARYMKVFADPTWFYLHIAFQVSGYVIGVAGWATGIKLGNDSPGTSYSTHRNLGIALFTFATLQVFALLVRPKPDHKYRTYWNVYHHTVGYTTIILSIVNIFKGFDILDPEDKWRWAYIGILIFLGACVLILEPLTWFIVLRRKSRGGNTVAAPTSSKYSNGVNGTTTTGPHHQDA

SEQ ID NO: 22046 - DNA, 646 bp, Arabidopsis thaliana
  misc_feature (1)..(646): Ceres Seq. ID no. 12393648
  misc_feature (1)..(646): Ortholog of  Ceres SEQ ID NO 13583505 as cited in SEQ ID NO 62240
tctcgagtacacctcatcattcttcttcgtgtgagagagatctttttggaaaacgaaagcgggatttagcgtatagcagcttccaccgtttcgccgaatttcatcgagcttcaagtgaacatgagtaaaccaatggaagaggataccaaccagggaaagactgaggaggaggagttcaacactggaccactctctgttttgatgatgagtgttaagaataacactcaggtgttgatcaattgccgtaacaacaggaaactccttggccgagttagggcttttgacaggcactgcaacatggttcttgaaaatgtcagagaaatgtggactgaggttccgaaaaccggaaaaggaaagaagaaagctcttcctgttaacagagatcgattcatcagcaagatgttcctgcgtggagactcagtcattatcgtcctcaggaaccccaagtgaaagaagctcttcttatgataattctcgcttcttcttgtcaaatcctaattgttgcatcaacagtgagaacatgttttgattatgagccttaaatctactagtgttgccttgtatttttcacttgtcttctatctttgacttgaaacgcagccagtgaactttgtaatatcaaaagagaagttctttnnttcttttt

SEQ ID NO: 22047 - protein, 109 aa, Arabidopsis thaliana
  peptide (1)..(109): Ceres Seq. ID no. 12393649
MSKPMEEDTNQGKTEEEEFNTGPLSVLMMSVKNNTQVLINCRNNRKLLGRVRAFDRHCNMVLENVREMWTEVPKTGKGKKKALPVNRDRFISKMFLRGDSVIIVLRNPK

SEQ ID NO: 22048 - protein, 105 aa, Arabidopsis thaliana
  peptide (1)..(105): Ceres Seq. ID no. 12393650
MEEDTNQGKTEEEEFNTGPLSVLMMSVKNNTQVLINCRNNRKLLGRVRAFDRHCNMVLENVREMWTEVPKTGKGKKKALPVNRDRFISKMFLRGDSVIIVLRNPK

SEQ ID NO: 22049 - protein, 82 aa, Arabidopsis thaliana
  peptide (1)..(82): Ceres Seq. ID no. 12393651
MMSVKNNTQVLINCRNNRKLLGRVRAFDRHCNMVLENVREMWTEVPKTGKGKKKALPVNRDRFISKMFLRGDSVIIVLRNPK

SEQ ID NO: 22050 - DNA, 956 bp, Arabidopsis thaliana
  misc_feature (1)..(956): Ceres Seq. ID no. 13489803
  misc_feature (1)..(956): Ortholog of  Ceres SEQ ID NO 15178887 as cited in SEQ ID NO 1099
  misc_feature (1)..(956): Ortholog of  Ceres SEQ ID NO 15177541 as cited in SEQ ID NO 0
gacgttctttcatttttcccgttatccagacacactcgcgaaaatggcggctcactcttcttgcaactttgctttgacgaatccgatcatctcacaaatcgattctttctctaagaagaaactatctgttccattatacttcttctctacaagaaaagcattgacgaatccttggttaggcgttgttgattcatccctctctctcacttctccagtctccgctctacaaactaatcgcccaagaagaatccataaatccgccatctccagcttacccaccgcgaatccagatttagtggtttctgatgcgaaaaagcccaaatggtcatggagggcaattaaatcatttgcaatgggagagcttgaagctaggaagctcaagtatccaaatactggaactgaagcacttctcatgggtattttgattgaaggaactagttttacttcaaagtttttgcgggcgaataagattatgctttacaaagtgcgtgaagaaacggtcaagttactaggaaaggcagatatgtatttctttagcccggaacatcctcctttaactgaagatgctcaaagagcacttgactctgctctggatcagaatctaaaagcaggtggtatcggggaagtaatgccagcacatatactacttgggatttggtctgaagttgaatctccaggtcacaagatactggcaactcttggtttcactgatgagaaatctaaagagttagagtcttttgcctctgaatctggctttttagatgaatagtatattacatccatatcatttctccattaatgcaaaatctccaagttcatagttgctgtttgcaataatattcgtatgtgttcgtctttgctcattcttattttcggttctttgtttcgcctttaagactttaagcttttttcacaaaaactactaacacttgatccttaagctttacttgctatat

SEQ ID NO: 22051 - protein, 255 aa, Arabidopsis thaliana
  peptide (1)..(255): Ceres Seq. ID no. 13489804
TFFHFSRYPDTLAKMAAHSSCNFALTNPIISQIDSFSKKKLSVPLYFFSTRKALTNPWLGVVDSSLSLTSPVSALQTNRPRRIHKSAISSLPTANPDLVVSDAKKPKWSWRAIKSFAMGELEARKLKYPNTGTEALLMGILIEGTSFTSKFLRANKIMLYKVREETVKLLGKADMYFFSPEHPPLTEDAQRALDSALDQNLKAGGIGEVMPAHILLGIWSEVESPGHKILATLGFTDEKSKELESFASESGFLDE

SEQ ID NO: 22052 - protein, 241 aa, Arabidopsis thaliana
  peptide (1)..(241): Ceres Seq. ID no. 13489805
MAAHSSCNFALTNPIISQIDSFSKKKLSVPLYFFSTRKALTNPWLGVVDSSLSLTSPVSALQTNRPRRIHKSAISSLPTANPDLVVSDAKKPKWSWRAIKSFAMGELEARKLKYPNTGTEALLMGILIEGTSFTSKFLRANKIMLYKVREETVKLLGKADMYFFSPEHPPLTEDAQRALDSALDQNLKAGGIGEVMPAHILLGIWSEVESPGHKILATLGFTDEKSKELESFASESGFLDE

SEQ ID NO: 22053 - protein, 138 aa, Arabidopsis thaliana
  peptide (1)..(138): Ceres Seq. ID no. 13489806
MGELEARKLKYPNTGTEALLMGILIEGTSFTSKFLRANKIMLYKVREETVKLLGKADMYFFSPEHPPLTEDAQRALDSALDQNLKAGGIGEVMPAHILLGIWSEVESPGHKILATLGFTDEKSKELESFASESGFLDE

SEQ ID NO: 22054 - DNA, 2035 bp, Arabidopsis thaliana
  misc_feature (1)..(2035): Ceres Seq. ID no. 12327285
  misc_feature (1)..(2035): Ortholog of  Ceres SEQ ID NO 12566921 as cited in SEQ ID NO 0
aatctctctctctctccctctcccaaaatctcacgatgcaacctcagccgcatatttctccgaacaccgcaactgccgcgatctcagccgcgcttgaatctcagcgcagtagaaaaaaccgaggaagttacaattgcggtagatgtggtcaacctaagaaaggccatgtctgtcttttaactgctccacctgatattcccactactccgatcgcttctgagccagtgagctgcatctccgccgccgcatcttcttcccgttctactgtcttatctttaacagcggcgccgtcatcgcgacagaccttcactcacttacgccgagctttatcgttcgatgacgtcgatgcgcgtaattcactcgatgaatccgatctggatgctgcatcgatggatctggatctacaattggatacggatattgttcagcctgggaggtttcatgcggtgggtttatgggaggtgcttaagcggctacctccgtctagtttactgatggcggctagggtttgcaaaggatggagagagacatcgaggaagatgtggaaagcggctgaggagcttcggattagggttccggagagagctcagattggatacattggatccttattacaaaaatgtcctcgacttattagactctcacttaaaatcgagagtgattttgacgcgacgactctggcttgcattgcattttcttgtcctaacctggaggttttggagattacaacttcgggtgcagctgtcaataggatttctggggatgagctgagtcggtttgttgctaataaacgaggactaacaagccttaagatggaaggatgttccaatttgggaggattttccctctcttcatcaagcctctccactctttggctctcggatcttcattctctctcaaagatgatcttcaactgtccaaatcttacggaaatatcacttgaattttctcgccaagaagatgattcaactgatcttgtaacaatggttgatggtttgggaaggacttgcactagattgcagaacatccatatagcctctttgaagctttcacatactgttgtactttctcttactgctgtgaatttcaggtatttgagaatgctctcgctagttcttggaataaatatcactgatgcatctgtagctgccatttcctcaggttacaaaaaccttgaactgcttgatctgagtggttccagcattactgatactggcctcgggatgatctgcgatgtcttacctgatacactctcaaaattacttgttgctctttgtcccaacattacatcaagtggcattcaatttgctactgctcaattgccccttcttgagctgatggattgtggcatgactgtctctgatcccaactcagataatccgacctttgtagagaatccaagtccacataaaacaccaggctacaatcaaaagatgtttatcaaacataaacggctgaagaaacttagtttgtggggatgctccagtttggacgctttgttcctaaactgcccagagctcatggacttgaacttgaacttatgcagtaatttgcatccggagagtctggtgctacaatgtccaaagttacaacttgtgtacgcatcaggatgtcaaggcctattgaccggagctatccgaaaacaggtttctgaaaacttctcggctggtgagaaccatatgccacggaaacgcttggctgatgcatctaaaaggattcaagctttaccttcattataccaagaaacaagggaagatggtatttatgcagggaagagaaggaagttggagaaagaaatgtgtaccattatacattaataatccttttattggactcgtcacaattttcgtctaccatatttatatttactgtactgtgtacatcagattatgttggatcacgttctcttctgttgtttcacttatcaactttacatgtttatcattgttctccaattgcttcgaataaattgtatgataacattctgtatttgtttaaattatatactactagagtactaggggtattttcttcg

SEQ ID NO: 22055 - protein, 604 aa, Arabidopsis thaliana
  peptide (1)..(604): Ceres Seq. ID no. 12327286
SLSLSLSQNLTMQPQPHISPNTATAAISAALESQRSRKNRGSYNCGRCGQPKKGHVCLLTAPPDIPTTPIASEPVSCISAAASSSRSTVLSLTAAPSSRQTFTHLRRALSFDDVDARNSLDESDLDAASMDLDLQLDTDIVQPGRFHAVGLWEVLKRLPPSSLLMAARVCKGWRETSRKMWKAAEELRIRVPERAQIGYIGSLLQKCPRLIRLSLKIESDFDATTLACIAFSCPNLEVLEITTSGAAVNRISGDELSRFVANKRGLTSLKMEGCSNLGGFSLSSSSLSTLWLSDLHSLSKMIFNCPNLTEISLEFSRQEDDSTDLVTMVDGLGRTCTRLQNIHIASLKLSHTVVLSLTAVNFRYLRMLSLVLGINITDASVAAISSGYKNLELLDLSGSSITDTGLGMICDVLPDTLSKLLVALCPNITSSGIQFATAQLPLLELMDCGMTVSDPNSDNPTFVENPSPHKTPGYNQKMFIKHKRLKKLSLWGCSSLDALFLNCPELMDLNLNLCSNLHPESLVLQCPKLQLVYASGCQGLLTGAIRKQVSENFSAGENHMPRKRLADASKRIQALPSLYQETREDGIYAGKRRKLEKEMCTIIH

SEQ ID NO: 22056 - protein, 593 aa, Arabidopsis thaliana
  peptide (1)..(593): Ceres Seq. ID no. 12327287
MQPQPHISPNTATAAISAALESQRSRKNRGSYNCGRCGQPKKGHVCLLTAPPDIPTTPIASEPVSCISAAASSSRSTVLSLTAAPSSRQTFTHLRRALSFDDVDARNSLDESDLDAASMDLDLQLDTDIVQPGRFHAVGLWEVLKRLPPSSLLMAARVCKGWRETSRKMWKAAEELRIRVPERAQIGYIGSLLQKCPRLIRLSLKIESDFDATTLACIAFSCPNLEVLEITTSGAAVNRISGDELSRFVANKRGLTSLKMEGCSNLGGFSLSSSSLSTLWLSDLHSLSKMIFNCPNLTEISLEFSRQEDDSTDLVTMVDGLGRTCTRLQNIHIASLKLSHTVVLSLTAVNFRYLRMLSLVLGINITDASVAAISSGYKNLELLDLSGSSITDTGLGMICDVLPDTLSKLLVALCPNITSSGIQFATAQLPLLELMDCGMTVSDPNSDNPTFVENPSPHKTPGYNQKMFIKHKRLKKLSLWGCSSLDALFLNCPELMDLNLNLCSNLHPESLVLQCPKLQLVYASGCQGLLTGAIRKQVSENFSAGENHMPRKRLADASKRIQALPSLYQETREDGIYAGKRRKLEKEMCTIIH

SEQ ID NO: 22057 - protein, 475 aa, Arabidopsis thaliana
  peptide (1)..(475): Ceres Seq. ID no. 12327288
MDLDLQLDTDIVQPGRFHAVGLWEVLKRLPPSSLLMAARVCKGWRETSRKMWKAAEELRIRVPERAQIGYIGSLLQKCPRLIRLSLKIESDFDATTLACIAFSCPNLEVLEITTSGAAVNRISGDELSRFVANKRGLTSLKMEGCSNLGGFSLSSSSLSTLWLSDLHSLSKMIFNCPNLTEISLEFSRQEDDSTDLVTMVDGLGRTCTRLQNIHIASLKLSHTVVLSLTAVNFRYLRMLSLVLGINITDASVAAISSGYKNLELLDLSGSSITDTGLGMICDVLPDTLSKLLVALCPNITSSGIQFATAQLPLLELMDCGMTVSDPNSDNPTFVENPSPHKTPGYNQKMFIKHKRLKKLSLWGCSSLDALFLNCPELMDLNLNLCSNLHPESLVLQCPKLQLVYASGCQGLLTGAIRKQVSENFSAGENHMPRKRLADASKRIQALPSLYQETREDGIYAGKRRKLEKEMCTIIH

SEQ ID NO: 22058 - DNA, 756 bp, Arabidopsis thaliana
  misc_feature (1)..(756): Ceres Seq. ID no. 12653898
  misc_feature (1)..(756): Ortholog of  Ceres SEQ ID NO 12563124 as cited in SEQ ID NO 57104
  misc_feature (1)..(756): Ortholog of  Ceres SEQ ID NO 13598373 as cited in SEQ ID NO 62185
  misc_feature (1)..(756): Ortholog of  Ceres SEQ ID NO 12584664 as cited in SEQ ID NO 62232
  misc_feature (1)..(756): Ortholog of  Ceres SEQ ID NO 12617639 as cited in SEQ ID NO 65219
  misc_feature (1)..(756): Ortholog of  Ceres SEQ ID NO 15179982 as cited in SEQ ID NO 0
aaaatcacataagtctctctcttacattttgaaaccctaatttctcaaaataaatgtctgaagttgagtaccggtgctttgtcggcggccttgcctgggccaccaatgatgaagatcttcaaaggacgttctcacagttcggcgacgttatcgattctaagatcattaacgaccgcgagagtggaagatcaaggggattcggattcgtcaccttcaaggacgagaaagccatgagggatgcgattgaagagatgaacggtaaagagctcgatggacgtgtcatcaccgtgaacgaggctcagtcgagaggtagcggcggtggcggaggaggccgtggtggaagcggtggtggttaccgcagcggaggcggtggtggatactcaggaggcggtggcggcggatactcaggaggaggcggtggtggttacgagagacgtagcggaggttacggatctggtggaggcggtggtggccgaggatacggtggtggtggacgccgtgagggaggtggctacggaggcggtgatggtggaagttacggaggcggtggtggcggctggtaatcaaagatagagttgtttgcgtgctgctgctctgtttttggtttagatttggatttgtgtcaccacttctggtttggttatcgttcgtttggtttacttttttgatgaaacagtttcgtttaagtcttctttgtctggatcgaaatgttaattcgcgtgttgtttactaaatttataacgtttccttttaacc

SEQ ID NO: 22059 - protein, 169 aa, Arabidopsis thaliana
  peptide (1)..(169): Ceres Seq. ID no. 12653899
MSEVEYRCFVGGLAWATNDEDLQRTFSQFGDVIDSKIINDRESGRSRGFGFVTFKDEKAMRDAIEEMNGKELDGRVITVNEAQSRGSGGGGGGRGGSGGGYRSGGGGGYSGGGGGGYSGGGGGGYERRSGGYGSGGGGGGRGYGGGGRREGGGYGGGDGGSYGGGGGGW

SEQ ID NO: 22060 - protein, 110 aa, Arabidopsis thaliana
  peptide (1)..(110): Ceres Seq. ID no. 12653900
MRDAIEEMNGKELDGRVITVNEAQSRGSGGGGGGRGGSGGGYRSGGGGGYSGGGGGGYSGGGGGGYERRSGGYGSGGGGGGRGYGGGGRREGGGYGGGDGGSYGGGGGGW

SEQ ID NO: 22061 - protein, 103 aa, Arabidopsis thaliana
  peptide (1)..(103): Ceres Seq. ID no. 12653901
MNGKELDGRVITVNEAQSRGSGGGGGGRGGSGGGYRSGGGGGYSGGGGGGYSGGGGGGYERRSGGYGSGGGGGGRGYGGGGRREGGGYGGGDGGSYGGGGGGW

SEQ ID NO: 22062 - DNA, 1221 bp, Arabidopsis thaliana
  misc_feature (1)..(1221): Ceres Seq. ID no. 12324916
  misc_feature (1)..(1221): Ortholog of  Ceres SEQ ID NO 13595351 as cited in SEQ ID NO 55934
  misc_feature (1)..(1221): Ortholog of  Ceres SEQ ID NO 13639645 as cited in SEQ ID NO 57488
aatcaacacacacaaacacacacacacacagcctttttccttcgttgatcgattgttaagctcgatccaatggcggataacaccgataatcggagatccttatggggagttccggagaagcttcagcttcacatagcgatgctgacgttgcaattcggttacgccggattccacgtggtgtctcgagctgctcttaacatgggaatcagcaaactcgtcttccctgtttatcgtaacatcatcgccttgcttcttctccttcccttcgcttacttccttgaaaagaaggagagaccagcgattactctcaactttctcatccagttcttctttttggcactcataggaataacagcgaggctctcggttacgtcttacacttgtttcttcggaatcattcagttcttgatcattgctgctttctgtgaaagagattctcaggcttgggtttttcactccggttgggagcttttcaccatcctctacgccggaatcgtagcgtctggaatcgcgtttgcggttcagatttggtgtattgacagagggggtccagtcttcgttgctgtttaccagcctgttcagactcttgtcgttgcgatcatggcttctattgcgttaggcgaagaattttatttgggcgggattattggagcggtcttgatcatagcgggactttacttcgtattgtacggtaagagcgaagagaggaaatttgcagcgcttgagaaggcagagatccagtcctccgcggagcatggtattgaacgtgcacctgtttctcgcaactccatcaagtcgtccatcacaacaccactactccatcagtcaacggacaatgtttgactactttggacaaatcactctccagctaataattacaaatgccattacccaattaaaagggaacaatggtgtgccgttgtgttttatgacttttgtgtctgctttttttcttagtgttttctcttcttttttttttctaaaaaattattaattacctaagaaaggtttttgaagaaaggaaaaaaaaatggtggatgagacatcattgttcatgaggatgatgatgatgatgatagtgatgaagaagactatgtgggagctttggattgagacttttctatatataatatctggctgatatattagtgccattttttcttacatttcttgtggggttnttctttcctttatcatcaatagaatgttataatttgcatc

SEQ ID NO: 22063 - protein, 257 aa, Arabidopsis thaliana
  peptide (1)..(257): Ceres Seq. ID no. 12324917
MADNTDNRRSLWGVPEKLQLHIAMLTLQFGYAGFHVVSRAALNMGISKLVFPVYRNIIALLLLLPFAYFLEKKERPAITLNFLIQFFFLALIGITARLSVTSYTCFFGIIQFLIIAAFCERDSQAWVFHSGWELFTILYAGIVASGIAFAVQIWCIDRGGPVFVAVYQPVQTLVVAIMASIALGEEFYLGGIIGAVLIIAGLYFVLYGKSEERKFAALEKAEIQSSAEHGIERAPVSRNSIKSSITTPLLHQSTDNV

SEQ ID NO: 22064 - protein, 234 aa, Arabidopsis thaliana
  peptide (1)..(234): Ceres Seq. ID no. 12324918
MLTLQFGYAGFHVVSRAALNMGISKLVFPVYRNIIALLLLLPFAYFLEKKERPAITLNFLIQFFFLALIGITARLSVTSYTCFFGIIQFLIIAAFCERDSQAWVFHSGWELFTILYAGIVASGIAFAVQIWCIDRGGPVFVAVYQPVQTLVVAIMASIALGEEFYLGGIIGAVLIIAGLYFVLYGKSEERKFAALEKAEIQSSAEHGIERAPVSRNSIKSSITTPLLHQSTDNV

SEQ ID NO: 22065 - protein, 214 aa, Arabidopsis thaliana
  peptide (1)..(214): Ceres Seq. ID no. 12324919
MGISKLVFPVYRNIIALLLLLPFAYFLEKKERPAITLNFLIQFFFLALIGITARLSVTSYTCFFGIIQFLIIAAFCERDSQAWVFHSGWELFTILYAGIVASGIAFAVQIWCIDRGGPVFVAVYQPVQTLVVAIMASIALGEEFYLGGIIGAVLIIAGLYFVLYGKSEERKFAALEKAEIQSSAEHGIERAPVSRNSIKSSITTPLLHQSTDNV

SEQ ID NO: 22066 - DNA, 1224 bp, Arabidopsis thaliana
  misc_feature (1)..(1224): Ceres Seq. ID no. 13500056
  misc_feature (1)..(1224): Ortholog of  Ceres SEQ ID NO 14313014 as cited in SEQ ID NO 54841
  misc_feature (1)..(1224): Ortholog of  Ceres SEQ ID NO 14316091 as cited in SEQ ID NO 57622
  misc_feature (1)..(1224): Ortholog of  Ceres SEQ ID NO 13639317 as cited in SEQ ID NO 59781
  misc_feature (1)..(1224): Ortholog of  Ceres SEQ ID NO 13654578 as cited in SEQ ID NO 68583
aaaagagcaaagggaacgataccattagtcccaataccaatccttgcaaaattcaaactcaaacaaaccgtttatctcacgcgccgccgtactcgccacgatccgtctttggagaccaatttatggagccgccgaagggagataccgtagtgaagactgaggtcccggtgaaggatccatcgctaagcgtcgtcgattcgaaaacgaagggagtcgaggatgcgaacactgagatagccttgtccgatgaggttgaaatcgagacgaagggaagcgattcgacaccggtgaaagctccgagtcgaacatcgtctggatcgaagaaatctgtacattggagccccgaattggtgtctggatctcaggaaccggatcagaaagctgcatcgtcttcttcggctggatctaatccgtatattgctcgttctccagctgagacttcagatgcttcgttgaaagatacgatggagactgtgaaaggagtgcttggtagatggggaaagagggttgcagaagcagcaaagaagacggagagccttgccgggaacacatggcaacacctgagaactgctccgagttttgcggatgctgcaatgggaagaattgcacagagtacaaaggtctttgcagaaggaggatatgagaagatattccgacaaacctttgagacagatcccgaagaacagttgctaaattcttttgcatgttacttgtcaacatcagctggcctagttatgggagttctatatatatccagtgccaaacttgcttactgtagtgacaaccctctctcctataaaaacggtgatcaaaccgaatggagctattacaaggtagtaattccattacatcaacttaaagcagtgaatccatcagcgagcatagtcaatcctgcagagaagtacatacaggtgatttcggtagacaatcatgagttttggttcatgggttttttaaactacgacggcgctgtcacgtctctgcaagattctttgcaagccggtgctttaaggtcggtgtgatacataactggatgactgatgaccataaaagcatgttgatctccacctcttcttgcttagtcatatcagaagactcaaatttttacattattttgcatttaatctcaatatcctatttactacagaaactagctgaattttacaaatttactttaaaatgttttatcttttgatatttttatgagaagacagcttaattgcg

SEQ ID NO: 22067 - protein, 339 aa, Arabidopsis thaliana
  peptide (1)..(339): Ceres Seq. ID no. 13500057
KSKGNDTISPNTNPCKIQTQTNRLSHAPPYSPRSVFGDQFMEPPKGDTVVKTEVPVKDPSLSVVDSKTKGVEDANTEIALSDEVEIETKGSDSTPVKAPSRTSSGSKKSVHWSPELVSGSQEPDQKAASSSSAGSNPYIARSPAETSDASLKDTMETVKGVLGRWGKRVAEAAKKTESLAGNTWQHLRTAPSFADAAMGRIAQSTKVFAEGGYEKIFRQTFETDPEEQLLNSFACYLSTSAGLVMGVLYISSAKLAYCSDNPLSYKNGDQTEWSYYKVVIPLHQLKAVNPSASIVNPAEKYIQVISVDNHEFWFMGFLNYDGAVTSLQDSLQAGALRSV

SEQ ID NO: 22068 - protein, 299 aa, Arabidopsis thaliana
  peptide (1)..(299): Ceres Seq. ID no. 13500058
MEPPKGDTVVKTEVPVKDPSLSVVDSKTKGVEDANTEIALSDEVEIETKGSDSTPVKAPSRTSSGSKKSVHWSPELVSGSQEPDQKAASSSSAGSNPYIARSPAETSDASLKDTMETVKGVLGRWGKRVAEAAKKTESLAGNTWQHLRTAPSFADAAMGRIAQSTKVFAEGGYEKIFRQTFETDPEEQLLNSFACYLSTSAGLVMGVLYISSAKLAYCSDNPLSYKNGDQTEWSYYKVVIPLHQLKAVNPSASIVNPAEKYIQVISVDNHEFWFMGFLNYDGAVTSLQDSLQAGALRSV

SEQ ID NO: 22069 - protein, 185 aa, Arabidopsis thaliana
  peptide (1)..(185): Ceres Seq. ID no. 13500059
METVKGVLGRWGKRVAEAAKKTESLAGNTWQHLRTAPSFADAAMGRIAQSTKVFAEGGYEKIFRQTFETDPEEQLLNSFACYLSTSAGLVMGVLYISSAKLAYCSDNPLSYKNGDQTEWSYYKVVIPLHQLKAVNPSASIVNPAEKYIQVISVDNHEFWFMGFLNYDGAVTSLQDSLQAGALRSV

SEQ ID NO: 22070 - DNA, 1696 bp, Arabidopsis thaliana
  misc_feature (1)..(1696): Ceres Seq. ID no. 12371981
  misc_feature (1)..(1696): Ortholog of  Ceres SEQ ID NO 14311203 as cited in SEQ ID NO 53639
  misc_feature (1)..(1696): Ortholog of  Ceres SEQ ID NO 15176053 as cited in SEQ ID NO 57792
  misc_feature (1)..(1696): Ortholog of  Ceres SEQ ID NO 14311175 as cited in SEQ ID NO 60223
  misc_feature (1)..(1696): Ortholog of  Ceres SEQ ID NO 12614670 as cited in SEQ ID NO 68565
atcctgagaatggtcacaaattctctacctctctctctctctctctctggtagagaaaatggagatatcagttgcatcggtaacagtttctgtagctgtagttgttgtgtcatggtgggtatggagaactttacagtgggtttggcttaaaccaaagatgcttgagagttacctgagaagacaaggtcttgccggaactccttacacgcctcttgtcggtgatttgaagagaaattttagcatgctggctgaggcaagatccaaacccatcaacctaacagatgatatcacaccacgtatcgtgccttatccgttgcaaatgctcaagactcatgggaggactttctttacatggtttggacccataccaacaatcaccataatggatcctgagcaaatcaaagaagtgttcaacaaagtttatgatttccagaaggcacatacgtttcctctgggcagattaatagcggctggactcgttagttatgatggtgataaatggacaaaacaccgaagaatcatcaacccggctttccaccttgagaagatcaaaaatatggtacctgcgttccaccagagctgcagcgagattgttggcgaatgggacaagttagtgacggataaacagtcatcctgtgaggtggatatttggccttggcttgtgagtatgactgcagatgtgatctcccgtactgcatttggcagcagctacaaagaagggcagaggatatttgagctccaagcggaattagcacagctcatcattcaagcttttcggaaagctattatccctggatatcgttatcttcctacaaagggtaatagaaggatgaaagcagcagctagagaaatcaaatttatactgagagggatcgttaacaaaaggcttagggcaagagacctggggaagcaccaagtgacgatttgctgggtatacttcttgaatcgaatttgggacaaacaaaaggaaatggaatgagtaccgaggaactgatggaggagtgcaagttgttctatttcgctgggcaagagactactacagtacttctggtttggacaatggtgttgttaagccaacaccaagattggcaggctcgtgcaagagaagaagtgaagcaagtttttggcgataaagaacctgatgcagaaggcttgaaccagctcaaagttgtaagtaaaccgaaccaaaaaccttcaagtgacgtgagttctttcgttgcattgaagctgaaagatttgatccctcacagatgacgatgatattatatgaagtccttaggctatatcctccagtagtccagctgacccgagccattcacaaagagatgcagctaggtgacctgacactaccaggcggcgttcagataagtctaccaattctgctaatccaacgcgacagggagctgtggggaaacgatgcaggggagttcaagccagatagattcaaagacggtctctcaaaggcaacaaagaaccaagtctccttctttccttttgcgtggggaccgaggatctgcattggccaaaattttgcactgcttgaggcaaagatggcaatgacactgattctacggaaattctcctttgagctttctccttcttatgtttcacgcgccttacacagtcctcactactcacccacagttcggtgctcctctcatcttgcacaagctctaatcgtataaaccccttgttc

SEQ ID NO: 22071 - protein, 306 aa, Arabidopsis thaliana
  peptide (1)..(306): Ceres Seq. ID no. 12371982
MEISVASVTVSVAVVVVSWWVWRTLQWVWLKPKMLESYLRRQGLAGTPYTPLVGDLKRNFSMLAEARSKPINLTDDITPRIVPYPLQMLKTHGRTFFTWFGPIPTITIMDPEQIKEVFNKVYDFQKAHTFPLGRLIAAGLVSYDGDKWTKHRRIINPAFHLEKIKNMVPAFHQSCSEIVGEWDKLVTDKQSSCEVDIWPWLVSMTADVISRTAFGSSYKEGQRIFELQAELAQLIIQAFRKAIIPGYRYLPTKGNRRMKAAAREIKFILRGIVNKRLRARDLGKHQVTICWVYFLNRIWDKQKEME

SEQ ID NO: 22072 - protein, 273 aa, Arabidopsis thaliana
  peptide (1)..(273): Ceres Seq. ID no. 12371983
MLESYLRRQGLAGTPYTPLVGDLKRNFSMLAEARSKPINLTDDITPRIVPYPLQMLKTHGRTFFTWFGPIPTITIMDPEQIKEVFNKVYDFQKAHTFPLGRLIAAGLVSYDGDKWTKHRRIINPAFHLEKIKNMVPAFHQSCSEIVGEWDKLVTDKQSSCEVDIWPWLVSMTADVISRTAFGSSYKEGQRIFELQAELAQLIIQAFRKAIIPGYRYLPTKGNRRMKAAAREIKFILRGIVNKRLRARDLGKHQVTICWVYFLNRIWDKQKEME

SEQ ID NO: 22073 - protein, 245 aa, Arabidopsis thaliana
  peptide (1)..(245): Ceres Seq. ID no. 12371984
MLAEARSKPINLTDDITPRIVPYPLQMLKTHGRTFFTWFGPIPTITIMDPEQIKEVFNKVYDFQKAHTFPLGRLIAAGLVSYDGDKWTKHRRIINPAFHLEKIKNMVPAFHQSCSEIVGEWDKLVTDKQSSCEVDIWPWLVSMTADVISRTAFGSSYKEGQRIFELQAELAQLIIQAFRKAIIPGYRYLPTKGNRRMKAAAREIKFILRGIVNKRLRARDLGKHQVTICWVYFLNRIWDKQKEME

SEQ ID NO: 22074 - DNA, 1034 bp, Arabidopsis thaliana
  misc_feature (1)..(1034): Ceres Seq. ID no. 12338375
  misc_feature (1)..(1034): Ortholog of  Ceres SEQ ID NO 15178884 as cited in SEQ ID NO 0
aaaaaggtcactggtcttcttcgtgtgacttcaccactttctcatctcccacaaaaatggctctctcacttctttcagtctttatctttttccatgtctttaccaatgttgtttttgctgcttcaaatgaggaatccaaggccttagtttctttaccaacgccaacacttccatcgccatctccggctaccaaaccgccgtcgccagctctcaaaccgccgacgccgtcgtacaagccacccacgctgccaactactcctattaaaccacccaccacaaaacctccggtcaaacctccaactacttcggttacaccagtaaaacctccggtttcaactcctccgatcaaactaccgccggtacaaccacctacgtacaaacccccaacgccaacagttaaaccaccgtccgtccaaccacctacgtacaaacccccaactccaacggttaaaccacccactacatcaccggttaaaccacccactacgccaccagtccaatcaccgccggtccaaccacctacgtacaaacccccaacgtcaccggttaaaccacccaccacaactccaccggttaaaccccccaccacgacgccaccggtccaaccacctacgtacaatcccccaactacaccggttaaaccacctacagcgccgcctgtcaaacctccaacaccacctcccgtaagaactcggatagattgcgtgcctttatgtgggacgaggtgtgggcaacactcgaggaagaacgtatgtatgagagcgtgcgtcacgtgctgctaccgctgcaagtgtgttcccccaggcacctacggtaataaggagaagtgtggatcttgttacgccaacatgaagacacgtggtggaaaatccaaatgtccttgaacctttatatgacgatggttgttaaacgaaataatttaaatcaatggagtttttataagtttgtaatgcgtttgtttttgttatagtaatattgagttggatctttgtttacgggacgtagaatactaaataatgaaaaaaaccttctcg

SEQ ID NO: 22075 - protein, 293 aa, Arabidopsis thaliana
  peptide (1)..(293): Ceres Seq. ID no. 12338376
KGHWSSSCDFTTFSSPTKMALSLLSVFIFFHVFTNVVFAASNEESKALVSLPTPTLPSPSPATKPPSPALKPPTPSYKPPTLPTTPIKPPTTKPPVKPPTTSVTPVKPPVSTPPIKLPPVQPPTYKPPTPTVKPPSVQPPTYKPPTPTVKPPTTSPVKPPTTPPVQSPPVQPPTYKPPTSPVKPPTTTPPVKPPTTTPPVQPPTYNPPTTPVKPPTAPPVKPPTPPPVRTRIDCVPLCGTRCGQHSRKNVCMRACVTCCYRCKCVPPGTYGNKEKCGSCYANMKTRGGKSKCP

SEQ ID NO: 22076 - protein, 275 aa, Arabidopsis thaliana
  peptide (1)..(275): Ceres Seq. ID no. 12338377
MALSLLSVFIFFHVFTNVVFAASNEESKALVSLPTPTLPSPSPATKPPSPALKPPTPSYKPPTLPTTPIKPPTTKPPVKPPTTSVTPVKPPVSTPPIKLPPVQPPTYKPPTPTVKPPSVQPPTYKPPTPTVKPPTTSPVKPPTTPPVQSPPVQPPTYKPPTSPVKPPTTTPPVKPPTTTPPVQPPTYNPPTTPVKPPTAPPVKPPTPPPVRTRIDCVPLCGTRCGQHSRKNVCMRACVTCCYRCKCVPPGTYGNKEKCGSCYANMKTRGGKSKCP

SEQ ID NO: 22077 - DNA, 1442 bp, Arabidopsis thaliana
  misc_feature (1)..(1442): Ceres Seq. ID no. 12372071
  misc_feature (1)..(1442): Ortholog of  Ceres SEQ ID NO 14311207 as cited in SEQ ID NO 60304
acatgttttgctctgcttctctctttatcttcttcttcatcttttgtcactcttttcttctgctctaaactttttcttttcgctgcaaaaaattttcccaggaatatttcttaaaagaaatttcatccctaaataagaaaaaagcatctccttctttagtgtcctccttcaccaaactcttgattccataagcatatattaaaaaagctctctgctttcttcaactttcccgggaaaatcttcttgttacaaagcatcaatctcttgttttaccagttttctctctttattccttttttgccctttacttttcctaactttggtctttatatataaacacacgacacaaagaagaacacacataagttaaaactattacaacagttttaaagagagagatttaaaaaatggagacagagaagaaagtttctctcccaagaatcttacgaatctctgttactgatccttacgcaacagattcgtcaagcgacgaagaagaagaagttgattttgatgcattatctacaaaacgacgtcgtgttaagaagtacgtgaaggaagtggtgcttgattcggtggtttctgataaagagaagccgatgaagaagaagagaaagaagcgcgttgttactgttccagtggttgttacgacagcgacgaggaagtttcgtggagtgaggcaaagaccgtggggaaaatgggcggcggagattagagatccgagtagacgtgttagggtttggttaggtacttttgacacggcggaggaagctgccattgtttacgataacgcagctattcagctacgtggtcctaacgcagagcttaacttccctcctgctccggtgacggagaatgttgaagaagcttcgacggaggtgaaaggagtttcggattttatcattggcggtggagaatatcttcgttcgccggtttctgttctcgaatctccgttctccggcgagtctactgcggttaaagaggagtttgtcggtgtatcgacggcggagattgtggttaaaaaggagccgtcttttaacggttcagatttctcggcgccgttgttctcggacgacgacgtttttggtttctcgacgtcgatgagtgaaagtttcggcggcgatttatttggagataatctttttgcggatatgagttttggatccgggtttggattcgggtctgggtctggattctccagctggcacgttgaggaccattttcaagatattggggatttattcgagtcggatcctgtcttaactgtttaagaaataactggccgtttaacggcgtttagtgaagttttgttaccggcgacggcgaggattaaaaaaaaacggcgatttattttttgaatgaagatttgttaaatatattaaacttttttgtaacttaattaatggtgattttatttttaaataaaactaatggtaaatggt

SEQ ID NO: 22078 - protein, 287 aa, Arabidopsis thaliana
  peptide (1)..(287): Ceres Seq. ID no. 12372072
METEKKVSLPRILRISVTDPYATDSSSDEEEEVDFDALSTKRRRVKKYVKEVVLDSVVSDKEKPMKKKRKKRVVTVPVVVTTATRKFRGVRQRPWGKWAAEIRDPSRRVRVWLGTFDTAEEAAIVYDNAAIQLRGPNAELNFPPAPVTENVEEASTEVKGVSDFIIGGGEYLRSPVSVLESPFSGESTAVKEEFVGVSTAEIVVKKEPSFNGSDFSAPLFSDDDVFGFSTSMSESFGGDLFGDNLFADMSFGSGFGFGSGSGFSSWHVEDHFQDIGDLFESDPVLTV

SEQ ID NO: 22079 - protein, 223 aa, Arabidopsis thaliana
  peptide (1)..(223): Ceres Seq. ID no. 12372073
MKKKRKKRVVTVPVVVTTATRKFRGVRQRPWGKWAAEIRDPSRRVRVWLGTFDTAEEAAIVYDNAAIQLRGPNAELNFPPAPVTENVEEASTEVKGVSDFIIGGGEYLRSPVSVLESPFSGESTAVKEEFVGVSTAEIVVKKEPSFNGSDFSAPLFSDDDVFGFSTSMSESFGGDLFGDNLFADMSFGSGFGFGSGSGFSSWHVEDHFQDIGDLFESDPVLTV

SEQ ID NO: 22080 - DNA, 972 bp, Arabidopsis thaliana
  misc_feature (1)..(972): Ceres Seq. ID no. 13494544
  misc_feature (1)..(972): Ortholog of  Ceres SEQ ID NO 13637842 as cited in SEQ ID NO 54650
  misc_feature (1)..(972): Ortholog of  Ceres SEQ ID NO 12608127 as cited in SEQ ID NO 57579
  misc_feature (1)..(972): Ortholog of  Ceres SEQ ID NO 12634558 as cited in SEQ ID NO 0
aaaacaccataaactaaacaataaaccatacaaaaaaatatgaaaatcctctcactttcactactcttgctcttggccgctacggtctcccacgtccagtcttcggcatccgttccagggctcatcgaactcctcgaatcgaacaccatctttgggaacgaagccgaactcttagagaaagagggactgtccatcaactaccccaactgcagaagctggcaccttggtgttgagacctctaacatcataaacttcgacacggtgcccgcaaattgcaaagcctatgttgaagactacttgatcacttccaaacagtaccaatacgactccaaaactgtaaacaaagaggcatatttctacgccaaaggacttgccctaaagaacgataccatcaatgtttggatctttgacctagacgacactctcctctctagtattccctactacgccaaatatggatatgggaccgagaacacagccccgggggcgtactggtcgtggttagagtccggagaatcaacaccaggactcccggagaccttgcatctatacgaaaacctcttggaactcgggattgaacccatcataatctctgaccgatggaaaaagttgtcagaaatcactatcgagaatctcaaggctgttggtgtgacaaaatggaagcatctcatactcaagccaaacggatcgaagttgacgcaagtggtgtacaagtcaaaggtgaggaatagccttgtgaagaaaggatacaacatcgttggcaatattggagaccaatgggctgatttggttgaggatactcctggaagggtttttaagctcccaaatccactctactacgtaccttcttaattaagcatatatcttcatggcattgtccccttgtatccatttcaaatctatgtcgtttcgtttatctttgtagccgttttggcaccactgcttataaaatgccaatcctagattcctatc

SEQ ID NO: 22081 - protein, 270 aa, Arabidopsis thaliana
  peptide (1)..(270): Ceres Seq. ID no. 15222936
MKILSLSLLLLLAATVSHVQSSASVPGLIELLESNTIFGNEAELLEKEGLSINYPNCRSWHLGVETSNIINFDTVPANCKAYVEDYLITSKQYQYDSKTVNKEAYFYAKGLALKNDTINVWIFDLDDTLLSSIPYYAKYGYGTENTAPGAYWSWLESGESTPGLPETLHLYENLLELGIEPIIISDRWKKLSEITIENLKAVGVTKWKHLILKPNGSKLTQVVYKSKVRNSLVKKGYNIVGNIGDQWADLVEDTPGRVFKLPNPLYYVPS

SEQ ID NO: 22082 - DNA, 975 bp, Arabidopsis thaliana
  misc_feature (1)..(975): Ceres Seq. ID no. 12357695
  misc_feature (1)..(975): Ortholog of  Ceres SEQ ID NO 14313302 as cited in SEQ ID NO 51621
aaagaaagaaaaaaaagaaacaaataattccaaaaccttctctcttaatcaaaatcaagaaacttacaagatctggtgaaaaccatggaagaaggagattttttcaactgctgtttcagcgagattagtagtggcatgaccatgaataagaagaagatgaagaagagcaataaccaaaagaggtttagcgaggaacagatcaagtcacttgagcttatatttgagtctgagacgaggcttgagccgaggaagaaggttcaggtagctagagagctagggctgcaaccaagacaagtggctatatggtttcaaaacaagagggctcgatggaaaactaagcaacttgagaaagagtataacactcttagagccaattacaacaatttggcttcacaatttgaaatcatgaagaaagaaaagcaatctctggtctctgagctgcagagactaaacgaagagatgcaaaggcctaaagaagaaaagcatcatgagtgttgtggtgatcaaggactggctctaagcagcagcacagagtcgcataatggaaagagtgagccagaagggaggttagaccaagggagtgttctatgtaatgatggtgattacaacaacaacattaaaacagagtattttgggttcgaggaagagactgatcatgagctgatgaacattgtggagaaagctgatgatagttgcttgacatcttctgagaattggggaggtttcaattctgattctctcttagaccaatctagcagcaattaccctaactggtgggagttttggtcataaaagcatataagaaaaaaacagaacataagcgaagagaaagagtgtgaatagtttgtaaattatgtgttaagaaaaataaatttagtttagtttaaatcttgtttcgatctatgtatctactatgttcaatactctttgtagctaattagtagcttataatgagactagaaaagttttgaagtc

SEQ ID NO: 22083 - protein, 235 aa, Arabidopsis thaliana
  peptide (1)..(235): Ceres Seq. ID no. 12357696
MEEGDFFNCCFSEISSGMTMNKKKMKKSNNQKRFSEEQIKSLELIFESETRLEPRKKVQVARELGLQPRQVAIWFQNKRARWKTKQLEKEYNTLRANYNNLASQFEIMKKEKQSLVSELQRLNEEMQRPKEEKHHECCGDQGLALSSSTESHNGKSEPEGRLDQGSVLCNDGDYNNNIKTEYFGFEEETDHELMNIVEKADDSCLTSSENWGGFNSDSLLDQSSSNYPNWWEFWS

SEQ ID NO: 22084 - protein, 218 aa, Arabidopsis thaliana
  peptide (1)..(218): Ceres Seq. ID no. 12357697
MTMNKKKMKKSNNQKRFSEEQIKSLELIFESETRLEPRKKVQVARELGLQPRQVAIWFQNKRARWKTKQLEKEYNTLRANYNNLASQFEIMKKEKQSLVSELQRLNEEMQRPKEEKHHECCGDQGLALSSSTESHNGKSEPEGRLDQGSVLCNDGDYNNNIKTEYFGFEEETDHELMNIVEKADDSCLTSSENWGGFNSDSLLDQSSSNYPNWWEFWS

SEQ ID NO: 22085 - protein, 216 aa, Arabidopsis thaliana
  peptide (1)..(216): Ceres Seq. ID no. 12357698
MNKKKMKKSNNQKRFSEEQIKSLELIFESETRLEPRKKVQVARELGLQPRQVAIWFQNKRARWKTKQLEKEYNTLRANYNNLASQFEIMKKEKQSLVSELQRLNEEMQRPKEEKHHECCGDQGLALSSSTESHNGKSEPEGRLDQGSVLCNDGDYNNNIKTEYFGFEEETDHELMNIVEKADDSCLTSSENWGGFNSDSLLDQSSSNYPNWWEFWS

SEQ ID NO: 22086 - DNA, 921 bp, Arabidopsis thaliana
  misc_feature (1)..(921): Ceres Seq. ID no. 12334098
  misc_feature (1)..(921): Ortholog of  Ceres SEQ ID NO 14308099 as cited in SEQ ID NO 58651
  misc_feature (1)..(921): Ortholog of  Ceres SEQ ID NO 13596893 as cited in SEQ ID NO 62932
aacaataataatataaccattactgaaacaaagaaaagacggataagactctttttgtgaccagccaatgttaaagaaaaacaatatcttgatttcactttcttggagatgaatcctttcacattggttgatggaaagccttatcctctggatatgaggggtgagcttgatgacaccgctgctttcaaaaactttaagaagtggggcgacattgaatttcccatgccatttggaagagtgatgagttcaacagagagcttcatccacggtctagatgagaagacaagtgcctctttgaagttcactgttctgaatcccaagggaagaatttggactatggtagctggaggaggtgcaagtgtcatctatgctgataccgttggagatctcgggtatgcatctgagcttggcaattatgctgaatacagtggagcacccaaagaagacgaggttttgcagtatgccagagttgtcattgattgtgctacagcgaatccggatggaaaaagcagggctctggtaattggaggtggaattgctaacttcaccgatgttgctgctaccttcaatggcataatccgagctctcaaggaaaaagaagcaaagctgaaagcagcaaggatgcatatatttgtgaggagaggaggaccaaactaccaaaagggacttgctaaaatgagatcacttggagatgaaatcggtgtccccatcgaggtgtatggtcctgaagcaacaatgacaggtatctgcaaggaggcaatccagtacatcaccgcggctgcataagcctttacaatcttatcatttactttcataatactctttagcgtttcttgagtttgagacttgtgtttagattatgtttcacttctaatgtattttactattcataaataaagaacaagtatcttcttttttctc

SEQ ID NO: 22087 - protein, 225 aa, Arabidopsis thaliana
  peptide (1)..(225): Ceres Seq. ID no. 12334099
MNPFTLVDGKPYPLDMRGELDDTAAFKNFKKWGDIEFPMPFGRVMSSTESFIHGLDEKTSASLKFTVLNPKGRIWTMVAGGGASVIYADTVGDLGYASELGNYAEYSGAPKEDEVLQYARVVIDCATANPDGKSRALVIGGGIANFTDVAATFNGIIRALKEKEAKLKAARMHIFVRRGGPNYQKGLAKMRSLGDEIGVPIEVYGPEATMTGICKEAIQYITAAA

SEQ ID NO: 22088 - protein, 210 aa, Arabidopsis thaliana
  peptide (1)..(210): Ceres Seq. ID no. 12334100
MRGELDDTAAFKNFKKWGDIEFPMPFGRVMSSTESFIHGLDEKTSASLKFTVLNPKGRIWTMVAGGGASVIYADTVGDLGYASELGNYAEYSGAPKEDEVLQYARVVIDCATANPDGKSRALVIGGGIANFTDVAATFNGIIRALKEKEAKLKAARMHIFVRRGGPNYQKGLAKMRSLGDEIGVPIEVYGPEATMTGICKEAIQYITAAA

SEQ ID NO: 22089 - protein, 187 aa, Arabidopsis thaliana
  peptide (1)..(187): Ceres Seq. ID no. 12334101
MPFGRVMSSTESFIHGLDEKTSASLKFTVLNPKGRIWTMVAGGGASVIYADTVGDLGYASELGNYAEYSGAPKEDEVLQYARVVIDCATANPDGKSRALVIGGGIANFTDVAATFNGIIRALKEKEAKLKAARMHIFVRRGGPNYQKGLAKMRSLGDEIGVPIEVYGPEATMTGICKEAIQYITAAA

SEQ ID NO: 22090 - DNA, 1604 bp, Arabidopsis thaliana
  misc_feature (1)..(1604): Ceres Seq. ID no. 12738772
  misc_feature (1)..(1604): Ortholog of  Ceres SEQ ID NO 13597533 as cited in SEQ ID NO 64942
aaatcaatggcaaaaaattagcttttagaattccccaagaacaaaaacaaaaaatgtccgagagaaattagggaaaaacaaaacaaataaaatctgggtgtaggggagagagagctcgtgctcgtgattttgatatctatctcttcgttatcgattttgaacatccacattgttcttagatctgaagaaaaaaaacacgggttctgttattacgatttgctcggcgattttgacaccaggctttcaattcttttcgttggaggtgattcgatttcagatccatcggatctaatctcggcgagtcgattcgtggtcgacatttttcaaaaactgctcgcgtggatctgaagaagagacattgttgtcttttgtatatcggcactgaatttttctgggaatctgtgtaaagatggatccaatatcagcggttagcgaagagctggctgagatcgaaggacaaatcaatgacatcttccgtgctttatcaaatggattccagaagctggagaagatcaaagatgctaataggcagagtaggcagctggaagaactcactgacaaaatgcgtgactgtaagagccttattaaagatttcgatagggaaatcaaaagcttggaaagcggtaatgatgccagcactaaccggatgttgaacgatagacgacaatctatggttaaggaactcaactcatatgttgctcttaagaagaaatactcatcaaacctagcaagcaataacaagcgagtagatcttttcgatggacctggagaagaacacatggaagaaaatgtcttattagcttcaaacatgtccaatcaagagttaatggataaaggaaactcaatgatggatgacacagatcaagctattgagagagggaaaaagattgtacaagaaactataaatgtgggaacagatacttcagcagctctcaaggctcagaccgagcaaatgagtagagttgtcaatgagctcgattctattcatttctcactcaagaaagcctccaagctggtcaaggaaattggtaggcaggttgccactgacaaatgtattatggcatttcttttccttatcgtcattggtgtcatagcaatcatcatcgtcaagattgtgaacccaaacaacaaagacattcgcgacataccgggtgtgggcctagctccaccagccatgaacagacgtctgctctggaaccattactgaaaaaaaatatctcattttcacaccattcaaaatactggtacgttgcacacttttttgtcccatacacatcttgatcctccccttagtcatgttgttgtagatgaaaccgcctcacttgagaaagtaaccagtttcgattcacatggctcttggctgctgcacgtttgagcagtcacaggaatcaaattccctttcgttaaaaacccaggatcaaaaccatcttttttagctcatgtgtttgtataaggatgactcttttgtgttctatcatatgtacgtttatttttaaaacgtcttctctgtttcatgttctggtaataaaaacttgtttcactggttcaaagttgtaactgagttgtatcatattcgatatatattagtatatgacttcactctc

SEQ ID NO: 22091 - protein, 265 aa, Arabidopsis thaliana
  peptide (1)..(265): Ceres Seq. ID no. 12738773
MDPISAVSEELAEIEGQINDIFRALSNGFQKLEKIKDANRQSRQLEELTDKMRDCKSLIKDFDREIKSLESGNDASTNRMLNDRRQSMVKELNSYVALKKKYSSNLASNNKRVDLFDGPGEEHMEENVLLASNMSNQELMDKGNSMMDDTDQAIERGKKIVQETINVGTDTSAALKAQTEQMSRVVNELDSIHFSLKKASKLVKEIGRQVATDKCIMAFLFLIVIGVIAIIIVKIVNPNNKDIRDIPGVGLAPPAMNRRLLWNHY

SEQ ID NO: 22092 - protein, 214 aa, Arabidopsis thaliana
  peptide (1)..(214): Ceres Seq. ID no. 12738774
MRDCKSLIKDFDREIKSLESGNDASTNRMLNDRRQSMVKELNSYVALKKKYSSNLASNNKRVDLFDGPGEEHMEENVLLASNMSNQELMDKGNSMMDDTDQAIERGKKIVQETINVGTDTSAALKAQTEQMSRVVNELDSIHFSLKKASKLVKEIGRQVATDKCIMAFLFLIVIGVIAIIIVKIVNPNNKDIRDIPGVGLAPPAMNRRLLWNHY

SEQ ID NO: 22093 - protein, 186 aa, Arabidopsis thaliana
  peptide (1)..(186): Ceres Seq. ID no. 12738775
MLNDRRQSMVKELNSYVALKKKYSSNLASNNKRVDLFDGPGEEHMEENVLLASNMSNQELMDKGNSMMDDTDQAIERGKKIVQETINVGTDTSAALKAQTEQMSRVVNELDSIHFSLKKASKLVKEIGRQVATDKCIMAFLFLIVIGVIAIIIVKIVNPNNKDIRDIPGVGLAPPAMNRRLLWNHY

SEQ ID NO: 22094 - DNA, 1308 bp, Arabidopsis thaliana
  misc_feature (1)..(1308): Ceres Seq. ID no. 12421649
  misc_feature (1)..(1308): Ortholog of  Ceres SEQ ID NO 14304034 as cited in SEQ ID NO 53878
  misc_feature (1)..(1308): Ortholog of  Ceres SEQ ID NO 15171520 as cited in SEQ ID NO 60477
atgataaccattagacagaagcacccttggatgtttttccctgatattgtaccaattggtcatcctattttcgatatcattaactcgactgatcctgagattgattgggatatcagattagcgtgtcttctgttattctcttttgatcgagatgatcacttctggcggctctatggcgatttcctgccggctgctgatgagtgcagcagcttgcttttagctacagaggaagaccttgcggagcttcaagatccttatcttgtttcaactattagacaacaacagaaacgaatcctagatttttgggaaaagaattggcattcaggtgttcctctcaaaatcaaaaggcttgccgaggatccagaaagattcatatgggcggttagtatggcacagacacgatgcatcagtatgcaaactagggtcggtgctttggttcaggaattaaatatgatgattccttatgctgacatgctaaaccactcatttgaaccaaactgtttcctacattggcgtcctaaagatcgcatgctggaggttatgtcaaatgctggtcaagacattaagaaaggcgaagagatgacgattaattacatgccaggccagaaaaacaacatgcttatggaaagatacggcttctcaactcctgtgaatccgtgggatgctataaagttctctggagattctcgcatccatttaaattcctttttatcggtcttcaatatttatggtcttcctgaagaatattaccatgacagcgagttatcgaggggcgatacttttgttgatggagcagttatcgctgcagcaagaacattacctacttggtcagacatagatcttcctccaataccgagtgcggaaagaaaagcagttaaagaattgcaagatgaatgtcgaaagatgcttgcggaatatcccacaacagcagagcaagaccagaagttgctagattcaatgtcagaagcaaggacaacatttgcaacagcggttaagtatagaatgcacagaaagatgttcatcggaaaaattatcaaggcacttgacatctatcaagaacggttactctattgattcaagcaaaaaataattatgagctgagtgagattcatacttggtgctcactcccttgagctacttagaaactgcaccatgtaattgaaaggttcctgtttttttttttgtttagtgtaaggttatgtatttgtatggaacagttagactaagtgtgttagtttgttttaatcgcaatcacaaacaaatcataacctcttcttttcttggctgctttaatgagtttgattagtc

SEQ ID NO: 22095 - protein, 357 aa, Arabidopsis thaliana
  peptide (1)..(357): Ceres Seq. ID no. 12421650
MITIRQKHPWMFFPDIVPIGHPIFDIINSTDPEIDWDIRLACLLLFSFDRDDHFWRLYGDFLPAADECSSLLLATEEDLAELQDPYLVSTIRQQQKRILDFWEKNWHSGVPLKIKRLAEDPERFIWAVSMAQTRCISMQTRVGALVQELNMMIPYADMLNHSFEPNCFLHWRPKDRMLEVMSNAGQDIKKGEEMTINYMPGQKNNMLMERYGFSTPVNPWDAIKFSGDSRIHLNSFLSVFNIYGLPEEYYHDSELSRGDTFVDGAVIAAARTLPTWSDIDLPPIPSAERKAVKELQDECRKMLAEYPTTAEQDQKLLDSMSEARTTFATAVKYRMHRKMFIGKIIKALDIYQERLLY

SEQ ID NO: 22096 - protein, 347 aa, Arabidopsis thaliana
  peptide (1)..(347): Ceres Seq. ID no. 12421651
MFFPDIVPIGHPIFDIINSTDPEIDWDIRLACLLLFSFDRDDHFWRLYGDFLPAADECSSLLLATEEDLAELQDPYLVSTIRQQQKRILDFWEKNWHSGVPLKIKRLAEDPERFIWAVSMAQTRCISMQTRVGALVQELNMMIPYADMLNHSFEPNCFLHWRPKDRMLEVMSNAGQDIKKGEEMTINYMPGQKNNMLMERYGFSTPVNPWDAIKFSGDSRIHLNSFLSVFNIYGLPEEYYHDSELSRGDTFVDGAVIAAARTLPTWSDIDLPPIPSAERKAVKELQDECRKMLAEYPTTAEQDQKLLDSMSEARTTFATAVKYRMHRKMFIGKIIKALDIYQERLLY

SEQ ID NO: 22097 - protein, 228 aa, Arabidopsis thaliana
  peptide (1)..(228): Ceres Seq. ID no. 12421652
MAQTRCISMQTRVGALVQELNMMIPYADMLNHSFEPNCFLHWRPKDRMLEVMSNAGQDIKKGEEMTINYMPGQKNNMLMERYGFSTPVNPWDAIKFSGDSRIHLNSFLSVFNIYGLPEEYYHDSELSRGDTFVDGAVIAAARTLPTWSDIDLPPIPSAERKAVKELQDECRKMLAEYPTTAEQDQKLLDSMSEARTTFATAVKYRMHRKMFIGKIIKALDIYQERLLY

SEQ ID NO: 22098 - DNA, 503 bp, Arabidopsis thaliana
  misc_feature (1)..(503): Ceres Seq. ID no. 12334102
  misc_feature (1)..(503): Ortholog of  Ceres SEQ ID NO 12329459 as cited in SEQ ID NO 20533
  misc_feature (1)..(503): Ortholog of  Ceres SEQ ID NO 14302474 as cited in SEQ ID NO 60589
atcagaaaactcaaatcttaaaactttctggaaaaacaaaaatgtcaggaagaggaaaaggaggaaaagggttaggcaaaggaggagcaaagagacacagaaaggttctaagagacaacattcaaggaatcacaaagccagcgattcgtcgtcttgctcgtagaggaggtgtgaagagaatcagtggattgatctatgaagaaacgagaggtgtgttgaagatttttctggagaatgtgattagagatgctgttacttacactgagcatgcgaggaggaagacggtgactgctatggatgttgtttatgccttgaagagacaaggaagaactctatatggatttggtggttgatcaatttgagatctgggttttctggtgaatgatgatgatttaagtcttgcgatcaagaaattccagaaattgggttgaattttagggtttcgttttgtgttgtaattagggcagcattgtaatggattaatgataagtaccatttgctct

SEQ ID NO: 22099 - protein, 116 aa, Arabidopsis thaliana
  peptide (1)..(116): Ceres Seq. ID no. 12334103
QKTQILKLSGKTKMSGRGKGGKGLGKGGAKRHRKVLRDNIQGITKPAIRRLARRGGVKRISGLIYEETRGVLKIFLENVIRDAVTYTEHARRKTVTAMDVVYALKRQGRTLYGFGG

SEQ ID NO: 22100 - protein, 103 aa, Arabidopsis thaliana; identical to SEQ ID NO: 7737
  peptide (1)..(103): Ceres Seq. ID no. 12334104

SEQ ID NO: 22101 - DNA, 1764 bp, Arabidopsis thaliana
  misc_feature (1)..(1764): Ceres Seq. ID no. 12422350
  misc_feature (1)..(1764): Ortholog of  Ceres SEQ ID NO 13594209 as cited in SEQ ID NO 59089
  misc_feature (1)..(1764): Ortholog of  Ceres SEQ ID NO 13502874 as cited in SEQ ID NO 66298
  misc_feature (1)..(1764): Ortholog of  Ceres SEQ ID NO 12614124 as cited in SEQ ID NO 68392
atttttcacttctatcgataaccaaacgaaaaaaaacatggccatctctttcctctgtttttgcctcattaccctcgcttcgttaatctttttcgccaagaagattaaacacttgaaatggaatcttcctccaagccctccaaagtttccggtcatcggaaatttacaccagattggagaattgcctcacaggtcacttcaacatctcgccgaaagatacggacctgtgatgcttcttcactttgggtttgtccctgtaactgtggtctcatcaagagaagcagctgaagaagtgctcagaactcatgacctagactgttgcagcaggcctaagcttgtcgggacaaggttactctcgcgggattttaaagatgtctgttttacgccatacggtaacgagtggaaggcgcggcgtaagtttgccctgcgtgagcttttctgtttgaaaaaggttcagtcctttaggcatatccgagaggatgaatgtaactttctggtcaagcaactgtcggaatccgcggttaatcgctctccggtcgatttgagcaaatcacttttctggctaaccgctagtatctttttcagagttgccttaggacagaattttcatgagagcaattttatcgataaagaaaagatcgaagagctcgtgttcgaagctgagactgccctagcaagtttcacttgttctgatttcttccctgttgccggacttggatggcttgttgattggttttccggacaacacaagagactcaacgatgttttttacaagctcgatgctctgtttcaacatgtcatagatgatcatttaaatccaggaagatcaaaagagcacgaagacatcatcgattcaatgttggatgcgattcataaagaaggaaaagatagttccttagagctcacaatagatcatattaaggggtttctcgcggtaatcaagagttatttaaacacattaaaattgtaattggatcgaaatctttaacttacttttcttgtgggttgttagaatatatttcttgcagggatagacacaggggccctcaccatgatatgggcaatgacggagctcgttaaaaacccgaaacttataaagaaagttcaaggcgagatccgagaacaacttggcagcaataaggcgagaatcaccgaggaagatatcgataaagttccttacttgaagatggtagtcaaagaaacattcaggttacacccggcagctcctcttatacttccaagagaaacaatggctcacatcaaagttcaagggtatgatattcctcccaagaggcggatcttggtcaatgtttcggctatcggaagagatcccaaactctggacaaacccggaagagtttgaccctgagaggtttatggatagctctgttgattataggggacaacattacgagctcttaccatttgggtccggtcgaaggatatgtcccgggatgccaatggggattgctgccgtcgaattgggactcttgaacttactttacttcttcgattggaagttgcctgatgggatgacacataaagatattgatactgaagaagctggtactcttacaatcgtcaagaaagtacctctccagctcgttccagttcgagttcagtgatcagaccaaactccaaacggtttggaccaaaccttttgaataaatatatcatgcaaatcatgtaagcttctctgatgatgtatgaagtatatttttcagtaaaatactaaattgaacgttcatttgcgtttgaggaatgc

SEQ ID NO: 22102 - protein, 322 aa, Arabidopsis thaliana
  peptide (1)..(322): Ceres Seq. ID no. 12422351
FFTSIDNQTKKNMAISFLCFCLITLASLIFFAKKIKHLKWNLPPSPPKFPVIGNLHQIGELPHRSLQHLAERYGPVMLLHFGFVPVTVVSSREAAEEVLRTHDLDCCSRPKLVGTRLLSRDFKDVCFTPYGNEWKARRKFALRELFCLKKVQSFRHIREDECNFLVKQLSESAVNRSPVDLSKSLFWLTASIFFRVALGQNFHESNFIDKEKIEELVFEAETALASFTCSDFFPVAGLGWLVDWFSGQHKRLNDVFYKLDALFQHVIDDHLNPGRSKEHEDIIDSMLDAIHKEGKDSSLELTIDHIKGFLAVIKSYLNTLKL

SEQ ID NO: 22103 - protein, 310 aa, Arabidopsis thaliana
  peptide (1)..(310): Ceres Seq. ID no. 12422352
MAISFLCFCLITLASLIFFAKKIKHLKWNLPPSPPKFPVIGNLHQIGELPHRSLQHLAERYGPVMLLHFGFVPVTVVSSREAAEEVLRTHDLDCCSRPKLVGTRLLSRDFKDVCFTPYGNEWKARRKFALRELFCLKKVQSFRHIREDECNFLVKQLSESAVNRSPVDLSKSLFWLTASIFFRVALGQNFHESNFIDKEKIEELVFEAETALASFTCSDFFPVAGLGWLVDWFSGQHKRLNDVFYKLDALFQHVIDDHLNPGRSKEHEDIIDSMLDAIHKEGKDSSLELTIDHIKGFLAVIKSYLNTLKL

SEQ ID NO: 22104 - protein, 246 aa, Arabidopsis thaliana
  peptide (1)..(246): Ceres Seq. ID no. 12422353
MLLHFGFVPVTVVSSREAAEEVLRTHDLDCCSRPKLVGTRLLSRDFKDVCFTPYGNEWKARRKFALRELFCLKKVQSFRHIREDECNFLVKQLSESAVNRSPVDLSKSLFWLTASIFFRVALGQNFHESNFIDKEKIEELVFEAETALASFTCSDFFPVAGLGWLVDWFSGQHKRLNDVFYKLDALFQHVIDDHLNPGRSKEHEDIIDSMLDAIHKEGKDSSLELTIDHIKGFLAVIKSYLNTLKL

SEQ ID NO: 22105 - DNA, 1588 bp, Arabidopsis thaliana
  misc_feature (1)..(1588): Ceres Seq. ID no. 13497487
  misc_feature (1)..(1588): Ortholog of  Ceres SEQ ID NO 15225703 as cited in SEQ ID NO 59527
  misc_feature (1)..(1588): Ortholog of  Ceres SEQ ID NO 12615972 as cited in SEQ ID NO 62455
  misc_feature (1)..(1588): Ortholog of  Ceres SEQ ID NO 13596229 as cited in SEQ ID NO 68800
  misc_feature (1)..(1588): Ortholog of  Ceres SEQ ID NO 15179393 as cited in SEQ ID NO 0
gttttttgcactcagaaaagaaacttgtactaaaacctaggagaggaggagctggcaccaccgcctaactcgccattgacacaacaccaaaaactcttctttactttttgttattctacacacatcgataaagattaagaacataattaatagaattccataaataattagatgcactaacttttcaacatcaattcaacggtttaaattcgtgaaaaagcgtttttattttattttaaaggttacaactttgtagtttttaccctaaatctctctctgattactgatactctgtctcaatctcttctttcttctaatcctttatttcttgtaagctacttctcctgaatttcgtatttgatccgtttaatccaagtttcgattttatataacaaacacatagatcctgaggttttgtgataagaaacagagagagagagaaacagagtaatggcgaacagagatgtggagagagtagggaagaaaaacagaggagctaataacaattatttctacgaggagtcttctggtgaaactcattggacttcatggctgattccggcgattgtagtggcaaatctcgctgtctttatcgctgttatgttcgttaatgattgtcctaagaaaatcaccggacctaacaaagagtgtgttgctagattcctcggaagattctcgtttcaaccacttaaagagaatcctctctttggtccttcttcttcaacattggagaaaatgggagcattggaatggaggaaagtagtacatgaacatcaaggatggagacttctctcttgtatgtggcttcacgctggtatcattcatcttcttacaaacatgttgagtttgatcttcattggtatccgccttgagcagcaatttggcttcataagagtcgggttgatatacttaatatcgggtctcggtggaagcatactttcgtcgcttttccttcaagaaagtatctctgttggtgcttcgggtgctctctttggacttcttggagcaatgttatctgaacttcttaccaattggactatctatgccaacaaggcggctgctctgatcacacttctgttcatcatcgcaatcaacttagcattaggcatgcttcctcgggttgacaactttgcacacattggagggtttttaaccggattctgcctcgggtttgtcctccttgtccgacctcagtacggttgggaagcttcgcgcaccaacacttcgcgaaccaaacgaaagtatagcatgtaccagtacgtgctgtttgtagtttcagtggtgctacttgtggttgggctaacggttgcattagtgatgcttttcaaaggagagaatgggaacaaacattgcaaatggtgtcattaccttagctgtttcccaacttctaaatggacctgctaatcatcatcatcatcatcataatcatatagtaaaagcttttatatgtgttcatgttaacatttaatctctttgatctctctagcctttgattacttatatatgtgtacattacaaaattcgtcttgtgtaaaaggggatagaaataaaagagtgtataatttggtttatagtacacactttatat

SEQ ID NO: 22106 - protein, 317 aa, Arabidopsis thaliana
  peptide (1)..(317): Ceres Seq. ID no. 13497488
MANRDVERVGKKNRGANNNYFYEESSGETHWTSWLIPAIVVANLAVFIAVMFVNDCPKKITGPNKECVARFLGRFSFQPLKENPLFGPSSSTLEKMGALEWRKVVHEHQGWRLLSCMWLHAGIIHLLTNMLSLIFIGIRLEQQFGFIRVGLIYLISGLGGSILSSLFLQESISVGASGALFGLLGAMLSELLTNWTIYANKAAALITLLFIIAINLALGMLPRVDNFAHIGGFLTGFCLGFVLLVRPQYGWEASRTNTSRTKRKYSMYQYVLFVVSVVLLVVGLTVALVMLFKGENGNKHCKWCHYLSCFPTSKWTC

SEQ ID NO: 22107 - protein, 267 aa, Arabidopsis thaliana
  peptide (1)..(267): Ceres Seq. ID no. 13497489
MFVNDCPKKITGPNKECVARFLGRFSFQPLKENPLFGPSSSTLEKMGALEWRKVVHEHQGWRLLSCMWLHAGIIHLLTNMLSLIFIGIRLEQQFGFIRVGLIYLISGLGGSILSSLFLQESISVGASGALFGLLGAMLSELLTNWTIYANKAAALITLLFIIAINLALGMLPRVDNFAHIGGFLTGFCLGFVLLVRPQYGWEASRTNTSRTKRKYSMYQYVLFVVSVVLLVVGLTVALVMLFKGENGNKHCKWCHYLSCFPTSKWTC

SEQ ID NO: 22108 - protein, 222 aa, Arabidopsis thaliana
  peptide (1)..(222): Ceres Seq. ID no. 13497490
MGALEWRKVVHEHQGWRLLSCMWLHAGIIHLLTNMLSLIFIGIRLEQQFGFIRVGLIYLISGLGGSILSSLFLQESISVGASGALFGLLGAMLSELLTNWTIYANKAAALITLLFIIAINLALGMLPRVDNFAHIGGFLTGFCLGFVLLVRPQYGWEASRTNTSRTKRKYSMYQYVLFVVSVVLLVVGLTVALVMLFKGENGNKHCKWCHYLSCFPTSKWTC

SEQ ID NO: 22109 - DNA, 1115 bp, Arabidopsis thaliana
  misc_feature (1)..(1115): Ceres Seq. ID no. 12738698
  misc_feature (1)..(1115): Ortholog of  Ceres SEQ ID NO 12612333 as cited in SEQ ID NO 56421
atccactctactcaacatggactcctccaaactctcatctctctctctttgcctcttcctcatttgcattatctatctcccccaacattctctcgcatgcggctcttgcaacccacggaagggcggaaagcactcccctaaagcccctaagctaccagttcctccggtgaccgtccctaagctaccagttcctccggtgaccgtccctaccagtccctccggtgaccgtccctaagctacccgttcctcctgtgaccatccctaagctacccgttccaccagtgactgtacctaagctacccgttcctcctgtgaccgtccccaagctacccgttcctccagtgaccgtccccaagctacccgttcctccagtgacagtccctaagctacccgttcccccggtaactgtacctaagctacccgttcctccagtgaccgtccctaagctaccccttcctccgatttcagggctacccatacctccagtggtaggtccaaatctgccattgccacctttgccaattgtaggtcctattcttccaccgggaacaaccccaccagccacaggagggaaggactgtcctccaccgccagggagcgtaaagccaccatcagggggcgggaaggcgacatgtccaatagacacgctgaagttaggtgcttgcgtcgacttgttgggaggtttagtaaagatagggcttggggatccagcagttaacaaatgttgtccgttacttaaaggcctcgttgaaatcgaagccgcggcttgtctctgcactaccctcaagctcaaagctcttgacctcaatctttatgtccctgttgctcttcagcttctccttacctgtggcaaaaatccacctccgggctacacttgttccatatgataaactcactccacttataaaggatgctttggagaaaaaagtgagaagagaatggcagagctccaatctttcctgtcttggtttaccaaatacatcatatcaaatcctatccctttgattctttcctctatcgttcccttatgcttgtatcattaattaatgtgtgctttttagattaatgattcttctcttgtattaaagtatgatttgaaatcctttttttttctc

SEQ ID NO: 22110 - protein, 77 aa, Arabidopsis thaliana
  peptide (1)..(77): Ceres Seq. ID no. 12738699
STLLNMDSSKLSSLSLCLFLICIIYLPQHSLACGSCNPRKGGKHSPKAPKLPVPPVTVPKLPVPPVTVPTSPSGDRP

SEQ ID NO: 22111 - protein, 72 aa, Arabidopsis thaliana
  peptide (1)..(72): Ceres Seq. ID no. 12738700
MDSSKLSSLSLCLFLICIIYLPQHSLACGSCNPRKGGKHSPKAPKLPVPPVTVPKLPVPPVTVPTSPSGDRP

SEQ ID NO: 22112 - protein, 63 aa, Arabidopsis thaliana
  peptide (1)..(63): Ceres Seq. ID no. 12738701
MSLLLFSFSLPVAKIHLRATLVPYDKLTPLIKDALEKKVRREWQSSNLSCLGLPNTSYQILSL

SEQ ID NO: 22113 - DNA, 1250 bp, Arabidopsis thaliana
  misc_feature (1)..(1250): Ceres Seq. ID no. 12370541
  misc_feature (1)..(1250): Ortholog of  Ceres SEQ ID NO 13596108 as cited in SEQ ID NO 68591
aatcaatcctcttgcggagaaactttgggaagagccgaagagaagtcgaggtctctctatctctctctttcgtacacttcgcgcttctcttcctgtcagaggcgtttctcatggctcctcttactctctccgttgatgtgaagagctcttcagcgacctctcatgatgtttcgaagagggtaatgcagagttcacagctcaaaataaacaaaggcttttttgcatctgttaatacacaagaagataaaccctttgatttcttccgcactctctttgaggggtttatagcaggaggtacagctggagttgtagttgaaacagctttatacccaattgatactattaagactagacttcaggcagctcgtggaggtggaaaaattgttttgaagggtctttattcaggattagctggaaatatcgctggtgtcttaccggcttcggctttatttgttggagtttacgaacccacaaagcagaaactgctgaagacctttcctgatcatttaagcgcagttgctcacctgactgcaggggccatcggtggacttgctgcatctctgattcgagtgcctacagaggttgtgaagcaaagaatgcagaccggacagtttacatcagctcccagtgctgttcgaatgattgcatcaaaagagggatttaggggtctctatgcaggataccggtccttccttttgcgagatttgccatttgatgctatacagttctgcatatatgagcagctttgcttggggtataaaaaagccgcgcgtagagagcttagtgatcctgagaacgctctaatcggtgcatttgctggtgctctgaccggagcagtcaccactccgcttgatgttattaagacaagattaatggttcagggatcagccaaacaatatcaaggaatcgttgactgtgttcaaacaattgtaagagaggaaggagctcctgctctcttaaagggtattgggccaagagtgttgtggataggtattggaggatcaatcttctttggtgtcctcgagagcactaagagaacacttgcacagagacgtcccaatacggttaaagaaaccaaagaagaataagtttctggccgcacaagaaaatgagtgtaaggtgacaatgtaacccctttgtgagttctatgtggtgtgagtttgtttaagtaccaattcaactttcattaaaaaaaaataaaaaaaatagtgttcatttagattatataatttcttgattatttatatctg

SEQ ID NO: 22114 - protein, 361 aa, Arabidopsis thaliana
  peptide (1)..(361): Ceres Seq. ID no. 12370542
SILLRRNFGKSRREVEVSLSLSFVHFALLFLSEAFLMAPLTLSVDVKSSSATSHDVSKRVMQSSQLKINKGFFASVNTQEDKPFDFFRTLFEGFIAGGTAGVVVETALYPIDTIKTRLQAARGGGKIVLKGLYSGLAGNIAGVLPASALFVGVYEPTKQKLLKTFPDHLSAVAHLTAGAIGGLAASLIRVPTEVVKQRMQTGQFTSAPSAVRMIASKEGFRGLYAGYRSFLLRDLPFDAIQFCIYEQLCLGYKKAARRELSDPENALIGAFAGALTGAVTTPLDVIKTRLMVQGSAKQYQGIVDCVQTIVREEGAPALLKGIGPRVLWIGIGGSIFFGVLESTKRTLAQRRPNTVKETKEE

SEQ ID NO: 22115 - protein, 325 aa, Arabidopsis thaliana
  peptide (1)..(325): Ceres Seq. ID no. 12370543
MAPLTLSVDVKSSSATSHDVSKRVMQSSQLKINKGFFASVNTQEDKPFDFFRTLFEGFIAGGTAGVVVETALYPIDTIKTRLQAARGGGKIVLKGLYSGLAGNIAGVLPASALFVGVYEPTKQKLLKTFPDHLSAVAHLTAGAIGGLAASLIRVPTEVVKQRMQTGQFTSAPSAVRMIASKEGFRGLYAGYRSFLLRDLPFDAIQFCIYEQLCLGYKKAARRELSDPENALIGAFAGALTGAVTTPLDVIKTRLMVQGSAKQYQGIVDCVQTIVREEGAPALLKGIGPRVLWIGIGGSIFFGVLESTKRTLAQRRPNTVKETKEE

SEQ ID NO: 22116 - protein, 301 aa, Arabidopsis thaliana
  peptide (1)..(301): Ceres Seq. ID no. 12370544
MQSSQLKINKGFFASVNTQEDKPFDFFRTLFEGFIAGGTAGVVVETALYPIDTIKTRLQAARGGGKIVLKGLYSGLAGNIAGVLPASALFVGVYEPTKQKLLKTFPDHLSAVAHLTAGAIGGLAASLIRVPTEVVKQRMQTGQFTSAPSAVRMIASKEGFRGLYAGYRSFLLRDLPFDAIQFCIYEQLCLGYKKAARRELSDPENALIGAFAGALTGAVTTPLDVIKTRLMVQGSAKQYQGIVDCVQTIVREEGAPALLKGIGPRVLWIGIGGSIFFGVLESTKRTLAQRRPNTVKETKEE

SEQ ID NO: 22117 - DNA, 1194 bp, Arabidopsis thaliana
  misc_feature (1)..(1194): Ceres Seq. ID no. 13486672
  misc_feature (1)..(1194): Ortholog of  Ceres SEQ ID NO 14314782 as cited in SEQ ID NO 56830
attcgtaaccccgtgcaaaaaaaactgaaaaccccaaatccaacctctctcactcaaaaaccatgtcttggctcttcaaatctcgcggcgatgacgatcacgatcccgatcccgatccttccacaactcatggcggtgtcaaagaagatttatcttccttactccgtggcgtcgcagctttcctggcaccgcctccttctccacctgtaaacgaacgccgactctcctctgataattcaccaactcagctaggtcttctcgggatccgcaacgatctagccgagattcgtggaaatttctccaatttcgcatctaatttactccaatttcctagtaatctaagagatagagaaagtagtagaagatctccgttgaacgatcaagttcctggaatctctgaagaagtagtcgatttcgctgttaaaatctcgacgaaacctggttgttggacagattttccattgtcactcgatactgaatttgaactgtctgaggctcaaagggcacatgcatcagccattgaagatttggttcctggccttgtagctgtgaagaatcaagttagtagttacatggatgatgaacacttctggctgatttattttattttgctgatgccgagactgaatgggcatgattttgaactcttagcaacatgcaaggtatttgaaacaagggatcaacttttactaaagctgcaaaagaaagagacagggtcaagcaagagcactactggtcacgaaactcctgaagaaggtagcagtagggaaacagaaaccgttgagggagtcattgacaagatagagactctaaaaattgagcaaagggagataagtgatgagtcatctgaagaacaacggaggagtttcagagatgaagaggtaatctcctttagtgatttagatgtcgatgatctctcggagaagccaagtcccaacaggagtacactgaaaagaccagcatcaaacgcaagcgggtcaagctgggttcagctcagcaagagccaagttggacatagcaaggattcggaaggtgattccagtgactggcttccaattggcgattctgattaacgtttaaaggtatgaaattgaatattactgtaaagtgaagtgttagcaatgacttttaaatgaaaccatgcacatttttattaataaaaatcttactgtgtagtaatggagtcgctacttg

SEQ ID NO: 22118 - protein, 336 aa, Arabidopsis thaliana
  peptide (1)..(336): Ceres Seq. ID no. 13486673
MSWLFKSRGDDDHDPDPDPSTTHGGVKEDLSSLLRGVAAFLAPPPSPPVNERRLSSDNSPTQLGLLGIRNDLAEIRGNFSNFASNLLQFPSNLRDRESSRRSPLNDQVPGISEEVVDFAVKISTKPGCWTDFPLSLDTEFELSEAQRAHASAIEDLVPGLVAVKNQVSSYMDDEHFWLIYFILLMPRLNGHDFELLATCKVFETRDQLLLKLQKKETGSSKSTTGHETPEEGSSRETETVEGVIDKIETLKIEQREISDESSEEQRRSFRDEEVISFSDLDVDDLSEKPSPNRSTLKRPASNASGSSWVQLSKSQVGHSKDSEGDSSDWLPIGDSD

SEQ ID NO: 22119 - DNA, 676 bp, Arabidopsis thaliana
  misc_feature (1)..(676): Ceres Seq. ID no. 12322467
  misc_feature (1)..(676): Ortholog of  Ceres SEQ ID NO 12563124 as cited in SEQ ID NO 57104
  misc_feature (1)..(676): Ortholog of  Ceres SEQ ID NO 12617639 as cited in SEQ ID NO 65219
  misc_feature (1)..(676): Ortholog of  Ceres SEQ ID NO 15179982 as cited in SEQ ID NO 0
acataagtctctctcttacattttgaaaccctaatttctcaaaaaaaatgtctgaagttgagtaccggtgctttgtcggcggccttgcctgggccaccaatgatgaagatcttcaaaggacgttctcacagttcggcgacgttatcgattctaagatcattaacgaccgcgagagtggaagatcaaggggattcggattcgtcaccttcaaggacgagaaagccatgagggatgcgattgaagagatgaacggtaaagagctcgatggacgtgtcatcaccgtgaacgaggctcagtcgagaggtagcggcggtggcggcggatactcaggaggaggcggtggtggttacgagagacgtagcggaggttacggatctggtggaggcggtggtggccgaggatacggtggtggtggacgccgtgagggaggtggctacggaggcggtgatggtggaagttacggcggcggtggtggcggctggtaatcaaagatagagttgtttgcgtgctgctgctctgtttttggtttagatttgggatttgtgtcaccacttctggtttggttatcgttcgtttggtttacttttttgatgaaacagtttcgtttaagtcttctttgtctggatcgaaatgttaattcgcgtgttgtttactaaatttataacgtttccttttc

SEQ ID NO: 22120 - protein, 145 aa, Arabidopsis thaliana
  peptide (1)..(145): Ceres Seq. ID no. 12322468
MSEVEYRCFVGGLAWATNDEDLQRTFSQFGDVIDSKIINDRESGRSRGFGFVTFKDEKAMRDAIEEMNGKELDGRVITVNEAQSRGSGGGGGYSGGGGGGYERRSGGYGSGGGGGGRGYGGGGRREGGGYGGGDGGSYGGGGGGW

SEQ ID NO: 22121 - protein, 86 aa, Arabidopsis thaliana
  peptide (1)..(86): Ceres Seq. ID no. 12322469
MRDAIEEMNGKELDGRVITVNEAQSRGSGGGGGYSGGGGGGYERRSGGYGSGGGGGGRGYGGGGRREGGGYGGGDGGSYGGGGGGW

SEQ ID NO: 22122 - protein, 79 aa, Arabidopsis thaliana
  peptide (1)..(79): Ceres Seq. ID no. 12322470
MNGKELDGRVITVNEAQSRGSGGGGGYSGGGGGGYERRSGGYGSGGGGGGRGYGGGGRREGGGYGGGDGGSYGGGGGGW

SEQ ID NO: 22123 - DNA, 1199 bp, Arabidopsis thaliana
  misc_feature (1)..(1199): Ceres Seq. ID no. 12324485
  misc_feature (1)..(1199): Ortholog of  Ceres SEQ ID NO 14311543 as cited in SEQ ID NO 51619
  misc_feature (1)..(1199): Ortholog of  Ceres SEQ ID NO 14302378 as cited in SEQ ID NO 67409
agttcagtcctacatccatggctgctcacagaagctaaagagaactaaaaagctcataagactattacttagaagagaatcgatcagatatgattttagcgcatcttccaagattccatctctcaatcctcgcgaaaccttctttctctctctcttcttcgcatttcagtttcttaaaccctaagccttcggtaacagtatctcgaacccttttctcattcgcgtctaaatcgaatctcgccactgttgaacccataccattatcggtctcagattcaaccgatttggatgatgcacctgtcgagattgcgctcgacaagctttttattccgccggagaccgatatatccggtgaagactcggcgagtttaacgacgaggatacttaagggttcgaatattgtgctgagcaagtacgcgagggacgcacaggtggttcaggctgattatgtgaagagtagtgtcaagacggaggattgtccggccgatgggttgccggagtttgcgcttgttgggagatccaatgttgggaaatcatcgcttctcaattcgttggtgaggaggaaacgccttgccttgacttctaagaaacctggaaagacgcaatgcattaatcatttccggatcaacgacaagtggtacttggtagatttgcctggttacgggtatgcatcagcaccgcatgaactcaaacaagactggaacaaattcaccaaagactattttctaaatcgatcaacattggtctcggtgtttttactagttgatgccagcattcctgtaaagccaatcgatctcgagtatgcaagctggcttggtcaaaaccaggttccaatgactttgatattcacaaaatgcgacaagagaaagaagaagaaaaatggagggaagaaaccggaggcgaacataaaggagttccaagacttgatccaagggttctttgagacaacaccgccatggattatgaccagcagtgtgacgaatcaaggtcgggacgagatattgttgcatatggctcagctaagaaactactggctcaaacactgagaaccaaaacaacacttctccatattatctttttataaggagacttatataacagttagtgtaaaacgacaaaactaacagttagtgtaccaattatttgggcactgtctttgattaatgcaacgctgagattttgtttaatgtatttgtgtt

SEQ ID NO: 22124 - protein, 318 aa, Arabidopsis thaliana
  peptide (1)..(318): Ceres Seq. ID no. 12324486
MILAHLPRFHLSILAKPSFSLSSSHFSFLNPKPSVTVSRTLFSFASKSNLATVEPIPLSVSDSTDLDDAPVEIALDKLFIPPETDISGEDSASLTTRILKGSNIVLSKYARDAQVVQADYVKSSVKTEDCPADGLPEFALVGRSNVGKSSLLNSLVRRKRLALTSKKPGKTQCINHFRINDKWYLVDLPGYGYASAPHELKQDWNKFTKDYFLNRSTLVSVFLLVDASIPVKPIDLEYASWLGQNQVPMTLIFTKCDKRKKKKNGGKKPEANIKEFQDLIQGFFETTPPWIMTSSVTNQGRDEILLHMAQLRNYWLKH

SEQ ID NO: 22125 - DNA, 1242 bp, Arabidopsis thaliana
  misc_feature (1)..(1242): Ceres Seq. ID no. 12325228
  misc_feature (1)..(1242): Ortholog of  Ceres SEQ ID NO 12484482 as cited in SEQ ID NO 53324
  misc_feature (1)..(1242): Ortholog of  Ceres SEQ ID NO 13594048 as cited in SEQ ID NO 58604
acagaaaccaaaccaagagccggaaatcaaaaacagtaataaaagatcaactgcaagaaaatggctcttcctctcgagctcgaaagcctcactgaagccatctcagctgggatgggaatgggagttgatgagaatgcattgataagcacactggggaaatcgcaaaaggaacatagaaaattgtttaggaaagcaagcaaaagtttctttgttgaagatgaggaaagagcttttgagaaatgtcatgatcacttcgtcagacacctcaagcttgagttctcccgcttcaatactgcggtggtgatgtgggcaatgcatccatgggagagagatgcaaggttggtgaagaaagctttgaagaaaggagaagaagcttacaacctcatcgttgaggtctcatgcacacgctctgctgaggatctcctcggtgcacgtaaagcttaccactctctcttcgaccaatcaatggaagaagacattgcctctcacgtccacggtcctcagcgcaagttgcttgtggggctcgtgagtgcttatagatacgaaggaaataaggtgaaggatgattctgccaaatccgatgctaagattctagccgaagcagtggcttcttcaggcgaagaagccgtggagaaggatgaggttgttaggattttgaccacaagaagcaaacttcatctccaacatctctacaaacactttaacgaaatcaaaggctctgatcttcttgggggtgtatctaagtcttctcttctcaatgaagcattgatttgtttgctcaaaccggctctgtatttcagcaagattttggatgcgtctctgaacaaagacgcagacaagactaccaagaaatggttgacaagagtgttcgttacaagagcagatcatagtgatgagatgaatgagatcaaagaagagtacaataacctttatggtgagactttggctcaaagaatccaagagaagataaaagggaactacagagatttcttgctcacacttctctccaaatccgattgatttcgtgttgagaaacctattaccaatacttttggttattgaagatttatgatttccctttttatggttttatgtttctaattcctaaatttgcgttttctctaccgtttggtaataaagacatgaaaatttgatgaactcggtgaatcgagagtaagagttttgcgattgtgacaatgagtgattaatacaaggattaagctccaataaaaaaatgttgct

SEQ ID NO: 22126 - protein, 319 aa, Arabidopsis thaliana
  peptide (1)..(319): Ceres Seq. ID no. 12325229
MALPLELESLTEAISAGMGMGVDENALISTLGKSQKEHRKLFRKASKSFFVEDEERAFEKCHDHFVRHLKLEFSRFNTAVVMWAMHPWERDARLVKKALKKGEEAYNLIVEVSCTRSAEDLLGARKAYHSLFDQSMEEDIASHVHGPQRKLLVGLVSAYRYEGNKVKDDSAKSDAKILAEAVASSGEEAVEKDEVVRILTTRSKLHLQHLYKHFNEIKGSDLLGGVSKSSLLNEALICLLKPALYFSKILDASLNKDADKTTKKWLTRVFVTRADHSDEMNEIKEEYNNLYGETLAQRIQEKIKGNYRDFLLTLLSKSD

SEQ ID NO: 22127 - protein, 302 aa, Arabidopsis thaliana
  peptide (1)..(302): Ceres Seq. ID no. 12325230
MGMGVDENALISTLGKSQKEHRKLFRKASKSFFVEDEERAFEKCHDHFVRHLKLEFSRFNTAVVMWAMHPWERDARLVKKALKKGEEAYNLIVEVSCTRSAEDLLGARKAYHSLFDQSMEEDIASHVHGPQRKLLVGLVSAYRYEGNKVKDDSAKSDAKILAEAVASSGEEAVEKDEVVRILTTRSKLHLQHLYKHFNEIKGSDLLGGVSKSSLLNEALICLLKPALYFSKILDASLNKDADKTTKKWLTRVFVTRADHSDEMNEIKEEYNNLYGETLAQRIQEKIKGNYRDFLLTLLSKSD

SEQ ID NO: 22128 - protein, 300 aa, Arabidopsis thaliana
  peptide (1)..(300): Ceres Seq. ID no. 12325231
MGVDENALISTLGKSQKEHRKLFRKASKSFFVEDEERAFEKCHDHFVRHLKLEFSRFNTAVVMWAMHPWERDARLVKKALKKGEEAYNLIVEVSCTRSAEDLLGARKAYHSLFDQSMEEDIASHVHGPQRKLLVGLVSAYRYEGNKVKDDSAKSDAKILAEAVASSGEEAVEKDEVVRILTTRSKLHLQHLYKHFNEIKGSDLLGGVSKSSLLNEALICLLKPALYFSKILDASLNKDADKTTKKWLTRVFVTRADHSDEMNEIKEEYNNLYGETLAQRIQEKIKGNYRDFLLTLLSKSD

SEQ ID NO: 22129 - DNA, 1265 bp, Arabidopsis thaliana
  misc_feature (1)..(1265): Ceres Seq. ID no. 12482742
  misc_feature (1)..(1265): Ortholog of  Ceres SEQ ID NO 14304969 as cited in SEQ ID NO 53193
  misc_feature (1)..(1265): Ortholog of  Ceres SEQ ID NO 14314851 as cited in SEQ ID NO 54014
  misc_feature (1)..(1265): Ortholog of  Ceres SEQ ID NO 14307442 as cited in SEQ ID NO 54239
  misc_feature (1)..(1265): Ortholog of  Ceres SEQ ID NO 15227214 as cited in SEQ ID NO 55368
  misc_feature (1)..(1265): Ortholog of  Ceres SEQ ID NO 13638897 as cited in SEQ ID NO 55839
  misc_feature (1)..(1265): Ortholog of  Ceres SEQ ID NO 14302561 as cited in SEQ ID NO 56543
  misc_feature (1)..(1265): Ortholog of  Ceres SEQ ID NO 15177710 as cited in SEQ ID NO 59217
  misc_feature (1)..(1265): Ortholog of  Ceres SEQ ID NO 13596958 as cited in SEQ ID NO 63319
  misc_feature (1)..(1265): Ortholog of  Ceres SEQ ID NO 12614573 as cited in SEQ ID NO 68344
  misc_feature (1)..(1265): Ortholog of  Ceres SEQ ID NO 12614814 as cited in SEQ ID NO 68816
atttagccctttgtttctctacacacatctcacatccccctatctctctctctcttcaaacgttttagttccccaaaaaaatatcaaaagaactaaaagaaaaaccctagaagccgaagaatctcctactcgttgtcgatcggatcacctaactaattactcgttgataatcattatatcgagaaatatgattaattttgaggccacggagctgagattagggctaccgggtgggaatcacggaggagaaatggctggaaaaaataatggtaaaagaggattttctgagactgttgatctcaaactgaatctttcatcgacggctatggattcagtttccaaagtcgatttagagaatatgaaggagaaggtcgtaaaaccaccagccaaggcacaagttgtgggatggccaccggtacgatctttccgcaagaacgtcatgtccggccaaaaaccgaccaccggagatgccaccgaaggaaacgataagacttctggcagcagtggagccacctcatccgcctccgcatgtgccaccgtggcttatgtgaaggttagcatggacggtgcaccgtacctacggaaaattgacttgaaactctacaaaacttaccaagatctctccaacgccttaagcaaaatgtttagctcttttaccataggcaactatggaccacaaggaatgaaagatttcatgaatgagagtaaattgatcgatcttctaaacggatcagattatgttccaacatatgaagataaagatggcgactggatgcttgtaggagacgtaccgtgggagatgtttgttgattcatgcaaacgtatacgaataatgaagggatcagaagcaatcggacttgctccaagggcattagaaaagtgcaagaacagaagttgagttctcgacgacatttcgtgttcttacctaaaaaaggaagaaagcctgtttcgatcggttggatatctcgaaccgagaaagctaaaccggctcgaaactattgttccgagcaaggagtttgcttataatattaattaataataatattaatattgtggtgtattacattttaaaaaattaaatcgtttttgttatatgtattatatacatatattaatatgtatatttaattaggttgcatctatttccgttaaaaccaacttttgtttttacgcattatcgtgttgtctatatggtctgtgtccgtaaggcatcttaatgtgttactttgacgtaccaaattattacttacattatttcatttctc

SEQ ID NO: 22130 - protein, 298 aa, Arabidopsis thaliana
  peptide (1)..(298): Ceres Seq. ID no. 12482743
FSPLFLYTHLTSPYLSLSSNVLVPQKNIKRTKRKTLEAEESPTRCRSDHLTNYSLIIIISRNMINFEATELRLGLPGGNHGGEMAGKNNGKRGFSETVDLKLNLSSTAMDSVSKVDLENMKEKVVKPPAKAQVVGWPPVRSFRKNVMSGQKPTTGDATEGNDKTSGSSGATSSASACATVAYVKVSMDGAPYLRKIDLKLYKTYQDLSNALSKMFSSFTIGNYGPQGMKDFMNESKLIDLLNGSDYVPTYEDKDGDWMLVGDVPWEMFVDSCKRIRIMKGSEAIGLAPRALEKCKNRS

SEQ ID NO: 22131 - protein, 236 aa, Arabidopsis thaliana
  peptide (1)..(236): Ceres Seq. ID no. 12482744
MINFEATELRLGLPGGNHGGEMAGKNNGKRGFSETVDLKLNLSSTAMDSVSKVDLENMKEKVVKPPAKAQVVGWPPVRSFRKNVMSGQKPTTGDATEGNDKTSGSSGATSSASACATVAYVKVSMDGAPYLRKIDLKLYKTYQDLSNALSKMFSSFTIGNYGPQGMKDFMNESKLIDLLNGSDYVPTYEDKDGDWMLVGDVPWEMFVDSCKRIRIMKGSEAIGLAPRALEKCKNRS

SEQ ID NO: 22132 - protein, 215 aa, Arabidopsis thaliana
  peptide (1)..(215): Ceres Seq. ID no. 12482745
MAGKNNGKRGFSETVDLKLNLSSTAMDSVSKVDLENMKEKVVKPPAKAQVVGWPPVRSFRKNVMSGQKPTTGDATEGNDKTSGSSGATSSASACATVAYVKVSMDGAPYLRKIDLKLYKTYQDLSNALSKMFSSFTIGNYGPQGMKDFMNESKLIDLLNGSDYVPTYEDKDGDWMLVGDVPWEMFVDSCKRIRIMKGSEAIGLAPRALEKCKNRS

SEQ ID NO: 22133 - DNA, 1220 bp, Arabidopsis thaliana
  misc_feature (1)..(1220): Ceres Seq. ID no. 12394706
  misc_feature (1)..(1220): Ortholog of  Ceres SEQ ID NO 13648488 as cited in SEQ ID NO 20419
  misc_feature (1)..(1220): Ortholog of  Ceres SEQ ID NO 15171378 as cited in SEQ ID NO 51582
aatttcgtctttcattatttctatttttgttttgtcggaaaaaaaataaaatgaagagcaacacaaacactaatctgattctcttccaccaccactctccactaacttcaaaatcaccctccgccgtcgccgccgcgaatcaccaccgtttcttattcatcttcttcctctctttcttcactctcctcttctctttctctctcttctcctcctcaatccactccaccacatcctctcactctctctcctcatctccctcctcctcctctcttccaccaccagtcctcgccgcacttctccactacacttcctcatcaccaccaaacacatctatgtcctttcttgaactctccaccatctccaacatcattcactctcatggcccagcttgtaacctcttaatctttggactaactcacgaatctcttctctggagatctatcaacttccaaggccgtactgttttcgttgatgagagtccttactctgtttctaaattcgaacagagtaaccctggagttgaagcttacgaggttgtttactcaactaaagtctctcaagctaagaagcttcttggttattacaagacccgacccgagtgtagacccgttcagaatcttttgttctctgattgtaaattgggtattaacgatttgcctaattttgtttatgagattgattgggatgtgattttgattgatgggcctcgtgggtatgcttctgattctccgggaaggatggctccgatctttacttctgcggttttagcaaaaagtaaagattttgggacgaagacgaagaagactgatgttcttgtacatgagtttgggagaaagattgagagagtgtacagtgaggagtttctatgtgaagagaatttgattgaagtggtcggagatttagggcattttgttgtggcggcggcggaggaaagagagagttatggtgatgggttttgtcggaattcgacgagattgtcggagagttttacggcggtgagtggtggcgatgaagaaaaagttggtgttgatgatgagtgaaaagtgggtttggttttttacttttggtggctcttttgtaattaaatttagcttttgaggtcttcttttttttttttttttgtttagtcttttacttcatttggtttttgaatttaggagaacggttacacttgaaagttaatatgtaactaaattccaaaaaaaaacaaatgttactct

SEQ ID NO: 22134 - protein, 345 aa, Arabidopsis thaliana
  peptide (1)..(345): Ceres Seq. ID no. 12394707
FRLSLFLFLFCRKKNKMKSNTNTNLILFHHHSPLTSKSPSAVAAANHHRFLFIFFLSFFTLLFSFSLFSSSIHSTTSSHSLSSSPSSSSLPPPVLAALLHYTSSSPPNTSMSFLELSTISNIIHSHGPACNLLIFGLTHESLLWRSINFQGRTVFVDESPYSVSKFEQSNPGVEAYEVVYSTKVSQAKKLLGYYKTRPECRPVQNLLFSDCKLGINDLPNFVYEIDWDVILIDGPRGYASDSPGRMAPIFTSAVLAKSKDFGTKTKKTDVLVHEFGRKIERVYSEEFLCEENLIEVVGDLGHFVVAAAEERESYGDGFCRNSTRLSESFTAVSGGDEEKVGVDDE

SEQ ID NO: 22135 - protein, 329 aa, Arabidopsis thaliana
  peptide (1)..(329): Ceres Seq. ID no. 12394708
MKSNTNTNLILFHHHSPLTSKSPSAVAAANHHRFLFIFFLSFFTLLFSFSLFSSSIHSTTSSHSLSSSPSSSSLPPPVLAALLHYTSSSPPNTSMSFLELSTISNIIHSHGPACNLLIFGLTHESLLWRSINFQGRTVFVDESPYSVSKFEQSNPGVEAYEVVYSTKVSQAKKLLGYYKTRPECRPVQNLLFSDCKLGINDLPNFVYEIDWDVILIDGPRGYASDSPGRMAPIFTSAVLAKSKDFGTKTKKTDVLVHEFGRKIERVYSEEFLCEENLIEVVGDLGHFVVAAAEERESYGDGFCRNSTRLSESFTAVSGGDEEKVGVDDE

SEQ ID NO: 22136 - protein, 235 aa, Arabidopsis thaliana
  peptide (1)..(235): Ceres Seq. ID no. 12394709
MSFLELSTISNIIHSHGPACNLLIFGLTHESLLWRSINFQGRTVFVDESPYSVSKFEQSNPGVEAYEVVYSTKVSQAKKLLGYYKTRPECRPVQNLLFSDCKLGINDLPNFVYEIDWDVILIDGPRGYASDSPGRMAPIFTSAVLAKSKDFGTKTKKTDVLVHEFGRKIERVYSEEFLCEENLIEVVGDLGHFVVAAAEERESYGDGFCRNSTRLSESFTAVSGGDEEKVGVDDE

SEQ ID NO: 22137 - DNA, 1380 bp, Arabidopsis thaliana
  misc_feature (1)..(1380): Ceres Seq. ID no. 12324638
  misc_feature (1)..(1380): Ortholog of  Ceres SEQ ID NO 15169199 as cited in SEQ ID NO 55297
  misc_feature (1)..(1380): Ortholog of  Ceres SEQ ID NO 15175690 as cited in SEQ ID NO 55466
  misc_feature (1)..(1380): Ortholog of  Ceres SEQ ID NO 15171197 as cited in SEQ ID NO 56892
  misc_feature (1)..(1380): Ortholog of  Ceres SEQ ID NO 14306381 as cited in SEQ ID NO 58812
atcctttctctctcttcccctcttctctctctctatttccagatcgaaacatctctcttcacaaaatgcctttgtcacggtccctcctttcgcggaggatctcgaactcttttaggtttcatcagggagagacaacgacggcaccggaatccgaatcgattcctccgccgtcgaatatggccggttcttcgtcatggtcggcgatgctccctgaattattaggcgagatcattcgtcgcgtggaggagactgaggaccgttggcctcaacgtcgtgatgtagttacttgcgcttgcgtttctaagaaatggagagaaatcactcacgatttcgctagatcctctcttaactctggcaaaattactttcccttcttgcctcaaattgccaggtcctagagacttttctaatcagtgcttgataaagaggaacaagaagacatcaacgttttacttgtatcttgctctaacaccatcattcactgataagggaaagtttcttctggcggcgcggaggtttaggaccggtgcttacactgagtacatcatatcacttgatgctgatgatttctctcaaggaagtaatgcctacgtcggaaaattaagatcagattttcttgggaccaactttacagtatacgatagccaaccaccacacaacggagcaaaaccttcaaatggcaaagccagtcgcagatttgcatcaaagcagataagccctcaagttccagcaggcaactttgaagtcggtcatgtttcttataaattcaaccttttgaaatcaagaggtccaagaagaatggtaagcacactccgatgcccatcaccatcaccttcatcatcatccgctggactctcgtctgaccaaaagccatgtgatgtaaccaagataatgaaaaaacccaacaaggatggttccagcttgacaatactaaagaacaaagctcctagatggcacgagcacttgcagtgctggtgtctgaacttccatggacgagttactgttgcttcggtcaagaactttcagctggttgcgaccgttgaccaaagtcaaccgagcggtaaaggcgatgaagaaacagttcttctacagtttggtaaagtgggagatgacactttcactatggattatagacagcctctctctgcatttcaggcttttgctatctgtctcacaagtttcggcactaaacttgcctgcgagtgaaacccaacaaaaggcaacagaaaaaaagaaaaaaagtgaactggctctgcaaacatgtaatgttttgatgtaatcatgtgtaagtgtaaacacaaaggtatgtggaaaggagaagcacataagtattattatgtaagaaacattatttaaaacccataatcataatgtatctctt

SEQ ID NO: 22138 - protein, 400 aa, Arabidopsis thaliana
  peptide (1)..(400): Ceres Seq. ID no. 12324639
PFSLFPSSLSLFPDRNISLHKMPLSRSLLSRRISNSFRFHQGETTTAPESESIPPPSNMAGSSSWSAMLPELLGEIIRRVEETEDRWPQRRDVVTCACVSKKWREITHDFARSSLNSGKITFPSCLKLPGPRDFSNQCLIKRNKKTSTFYLYLALTPSFTDKGKFLLAARRFRTGAYTEYIISLDADDFSQGSNAYVGKLRSDFLGTNFTVYDSQPPHNGAKPSNGKASRRFASKQISPQVPAGNFEVGHVSYKFNLLKSRGPRRMVSTLRCPSPSPSSSSAGLSSDQKPCDVTKIMKKPNKDGSSLTILKNKAPRWHEHLQCWCLNFHGRVTVASVKNFQLVATVDQSQPSGKGDEETVLLQFGKVGDDTFTMDYRQPLSAFQAFAICLTSFGTKLACE

SEQ ID NO: 22139 - protein, 379 aa, Arabidopsis thaliana
  peptide (1)..(379): Ceres Seq. ID no. 12324640
MPLSRSLLSRRISNSFRFHQGETTTAPESESIPPPSNMAGSSSWSAMLPELLGEIIRRVEETEDRWPQRRDVVTCACVSKKWREITHDFARSSLNSGKITFPSCLKLPGPRDFSNQCLIKRNKKTSTFYLYLALTPSFTDKGKFLLAARRFRTGAYTEYIISLDADDFSQGSNAYVGKLRSDFLGTNFTVYDSQPPHNGAKPSNGKASRRFASKQISPQVPAGNFEVGHVSYKFNLLKSRGPRRMVSTLRCPSPSPSSSSAGLSSDQKPCDVTKIMKKPNKDGSSLTILKNKAPRWHEHLQCWCLNFHGRVTVASVKNFQLVATVDQSQPSGKGDEETVLLQFGKVGDDTFTMDYRQPLSAFQAFAICLTSFGTKLACE

SEQ ID NO: 22140 - protein, 342 aa, Arabidopsis thaliana
  peptide (1)..(342): Ceres Seq. ID no. 12324641
MAGSSSWSAMLPELLGEIIRRVEETEDRWPQRRDVVTCACVSKKWREITHDFARSSLNSGKITFPSCLKLPGPRDFSNQCLIKRNKKTSTFYLYLALTPSFTDKGKFLLAARRFRTGAYTEYIISLDADDFSQGSNAYVGKLRSDFLGTNFTVYDSQPPHNGAKPSNGKASRRFASKQISPQVPAGNFEVGHVSYKFNLLKSRGPRRMVSTLRCPSPSPSSSSAGLSSDQKPCDVTKIMKKPNKDGSSLTILKNKAPRWHEHLQCWCLNFHGRVTVASVKNFQLVATVDQSQPSGKGDEETVLLQFGKVGDDTFTMDYRQPLSAFQAFAICLTSFGTKLACE

SEQ ID NO: 22141 - DNA, 1287 bp, Arabidopsis thaliana
  misc_feature (1)..(1287): Ceres Seq. ID no. 13588473
  misc_feature (1)..(1287): Ortholog of  Ceres SEQ ID NO 15176835 as cited in SEQ ID NO 1046
  misc_feature (1)..(1287): Ortholog of  Ceres SEQ ID NO 14315403 as cited in SEQ ID NO 59259
atggctgcttgcgctactcactcctctctcatgctagcatacgccgccgcatccactcgttcccaggaccttacccctactccatctcttttctcttttgccagctccagacccaaccacttgagcttcccgcttcttctccttgggggttccagggaccggagatgtgctgctattgacagagcttccaaccacaagtttattgtctccgccgtggccgctgaggctgacctcgacacggaggaggacctggagcagaccgccaccgccgtccttgatccgcccaagcctaagaaaggaaaagccgctttggttctcaagagagatagaacaaggtctaagaggtttttggaaatccaaaagctaagggaaaccaaaaaggagtatgatgtcaacactgctatctctttgcttaaacaaactgccaacacaaggtttgttgagtctgttgaagcccatttccgtctcaacatcgatcctaagtacaatgaccagcagctgcgtgcaacggtgagcctgcctaagggaactggccagactgttatagtcgctgttcttgcacaaggtgagaaggttgatgaagccaaaagtgcaggggcagatattgtgggcagtgatgatttaatcgaacagattaaaggaggcttcatggagtttgacaagctgattgcatccccggatatgatggtcaaggttgctggcctgggaaagattcttggaccacgggggctcatgccaaatcccaaggctggtacagtcacagcgaacattccccaggctattgaagagttcaagaaggggaaagttgaattcagagcagacaaaactgggattgttcacattccatttgggaaagttaattttacagaggaagaccttctcataaacttccttgcagcagtgaaatcggtggagacaaacaagccaaagggagctaaaggagtgtactggaaaagcgctcacatatgctcgtcaatggggccttccatcaagttgaacataagagagatgatagacttcaagcctcccactgcgaactaatcgacaacgccatttgtaaatggggtccttttgggagacgggcaatgccagtgtagacagagaagagaaacaccaagtctagtctgttagtaatcttttcacgcctcactgctttgtatcactttgatggccatttgcttcttgtcgttatttatttactattgcctattaaaatttggcaaggggctgtacatgtcaggacgcagaactctttagtactctctaaaagaaaagaccttacattga

SEQ ID NO: 22142 - protein, 346 aa, Arabidopsis thaliana
  peptide (1)..(346): Ceres Seq. ID no. 13588474
MAACATHSSLMLAYAAASTRSQDLTPTPSLFSFASSRPNHLSFPLLLLGGSRDRRCAAIDRASNHKFIVSAVAAEADLDTEEDLEQTATAVLDPPKPKKGKAALVLKRDRTRSKRFLEIQKLRETKKEYDVNTAISLLKQTANTRFVESVEAHFRLNIDPKYNDQQLRATVSLPKGTGQTVIVAVLAQGEKVDEAKSAGADIVGSDDLIEQIKGGFMEFDKLIASPDMMVKVAGLGKILGPRGLMPNPKAGTVTANIPQAIEEFKKGKVEFRADKTGIVHIPFGKVNFTEEDLLINFLAAVKSVETNKPKGAKGVYWKSAHICSSMGPSIKLNIREMIDFKPPTAN

SEQ ID NO: 22143 - protein, 336 aa, Arabidopsis thaliana
  peptide (1)..(336): Ceres Seq. ID no. 13588475
MLAYAAASTRSQDLTPTPSLFSFASSRPNHLSFPLLLLGGSRDRRCAAIDRASNHKFIVSAVAAEADLDTEEDLEQTATAVLDPPKPKKGKAALVLKRDRTRSKRFLEIQKLRETKKEYDVNTAISLLKQTANTRFVESVEAHFRLNIDPKYNDQQLRATVSLPKGTGQTVIVAVLAQGEKVDEAKSAGADIVGSDDLIEQIKGGFMEFDKLIASPDMMVKVAGLGKILGPRGLMPNPKAGTVTANIPQAIEEFKKGKVEFRADKTGIVHIPFGKVNFTEEDLLINFLAAVKSVETNKPKGAKGVYWKSAHICSSMGPSIKLNIREMIDFKPPTAN

SEQ ID NO: 22144 - DNA, 2009 bp, Arabidopsis thaliana
  misc_feature (1)..(2009): Ceres Seq. ID no. 12334740
  misc_feature (1)..(2009): Ortholog of  Ceres SEQ ID NO 14315045 as cited in SEQ ID NO 52345
  misc_feature (1)..(2009): Ortholog of  Ceres SEQ ID NO 15170171 as cited in SEQ ID NO 67284
aaaagcataatgacggaagagctcatcgaccaatcaccaccacctgacccagacccgattcaaaattcgaatttaataatccacccaagacgtgttcctttcgagcacggccttcttccgatccagaagctcgtttttaccgacccgattcaaactctagctccgatcaagcaaaagttagcttctttggcgacgaatcatcgcgtcggatctgctgccatttccgatgcactctcgatctccgatgaccatgcgcgcctcgttctcgaaactctctcttcggtgctccattgcgagactgacccattggttttggccaaacctgaggaagttgattccgtgggagctgatttgagggatctgatattgtttctctacattcaatcgtataagaagttattgcctaggacgcataaagactctgcttctgtggctgatgtttggccttcgacttctgcttttgatggatacttgtcggcattatctccaattcagcttgttcgtagcaacagccgtcggtttatgccatcaccgacagatgaagaagctcatcaattatcgtatctgcaaaagcacattgcaaatattatttctctccttgcagagcctgtggagggacaaggagatgattctttggtcctgtctatggagagtttggagcacattgggtttcttgttcattatggtgataagggatttgatgtaccttctttaagccaagctactcctttttttgcgaattctgatcctgatatgcccgctgtccccgttcctgcttcccaagtgaatgattggcttctcaaagacatagcttccgccttagaaagcatttctaacagaatctctgggaaagaaaatggggcatctaatgcctctgatcagaatgctgcaatggctgattctagtgtagctcttaataaagtttcatctaacgacagaggtccatgtattattgagggagtctctaagacctcacttttcaagcaggcttctgatcttaagggtagatcagtgaaggttgccaattgccatgattctgttatttatctgttagcgccattgagatatgcaactgtgtatgggtgttctgattctactatcgttctgggagctgctggcaaggcagtaaaagttgagcattgtgagagagttcatgtgattgtagctaccaaacgaatttgcatcgccaattgccgtgaatgtgtgttctttttgggagtcaatcagcaacctcttatagttggtgataaccacaaactacaggttgctccatataatacattttactcacacttggaggagcacataaccgaggtaggaattcagccaactatcaacaaatggaacgaatccttggcgctcggagcaattgatccgcatgactcactatcacatccgactggtgcctctgataaacaagctgaaccggcttcttgtgtggaccctgaccagttcactacctttttgatcccaaactggtttgcgggtgaggcgattggttccacgaaagacaatccatttccattgccagatgcatataaggcagtgcagcagacaaaccttaagaacttagaggaaacaagacaatccttgagagaaacacctctcgaagaaaaccgaaaacgagaactcactacagcgttccacatgtatttcaaagactggctatacgcgacgggaaatattcggcaactttactgcctacaaggcgattaagaccaatggcgattgaaaatgtcagagtcactgtagagttctcttgatccgttccttctcagagatttgctagcacgtttgacatcagaatttaactgcacagcacgctctctaactcctaaagctctgtttttttgtgtgtaggtttctctctgcttttatcgtatttattagtcttaaatatccacgtttttgtccttgaaaaacattaagccatcttgtcttgttgttgatttctttcaattgttataacaacttttctcaataccatatatataaatcttttagtaacc

SEQ ID NO: 22145 - protein, 571 aa, Arabidopsis thaliana
  peptide (1)..(571): Ceres Seq. ID no. 12334741
KSIMTEELIDQSPPPDPDPIQNSNLIIHPRRVPFEHGLLPIQKLVFTDPIQTLAPIKQKLASLATNHRVGSAAISDALSISDDHARLVLETLSSVLHCETDPLVLAKPEEVDSVGADLRDLILFLYIQSYKKLLPRTHKDSASVADVWPSTSAFDGYLSALSPIQLVRSNSRRFMPSPTDEEAHQLSYLQKHIANIISLLAEPVEGQGDDSLVLSMESLEHIGFLVHYGDKGFDVPSLSQATPFFANSDPDMPAVPVPASQVNDWLLKDIASALESISNRISGKENGASNASDQNAAMADSSVALNKVSSNDRGPCIIEGVSKTSLFKQASDLKGRSVKVANCHDSVIYLLAPLRYATVYGCSDSTIVLGAAGKAVKVEHCERVHVIVATKRICIANCRECVFFLGVNQQPLIVGDNHKLQVAPYNTFYSHLEEHITEVGIQPTINKWNESLALGAIDPHDSLSHPTGASDKQAEPASCVDPDQFTTFLIPNWFAGEAIGSTKDNPFPLPDAYKAVQQTNLKNLEETRQSLRETPLEENRKRELTTAFHMYFKDWLYATGNIRQLYCLQGD

SEQ ID NO: 22146 - protein, 568 aa, Arabidopsis thaliana
  peptide (1)..(568): Ceres Seq. ID no. 12334742
MTEELIDQSPPPDPDPIQNSNLIIHPRRVPFEHGLLPIQKLVFTDPIQTLAPIKQKLASLATNHRVGSAAISDALSISDDHARLVLETLSSVLHCETDPLVLAKPEEVDSVGADLRDLILFLYIQSYKKLLPRTHKDSASVADVWPSTSAFDGYLSALSPIQLVRSNSRRFMPSPTDEEAHQLSYLQKHIANIISLLAEPVEGQGDDSLVLSMESLEHIGFLVHYGDKGFDVPSLSQATPFFANSDPDMPAVPVPASQVNDWLLKDIASALESISNRISGKENGASNASDQNAAMADSSVALNKVSSNDRGPCIIEGVSKTSLFKQASDLKGRSVKVANCHDSVIYLLAPLRYATVYGCSDSTIVLGAAGKAVKVEHCERVHVIVATKRICIANCRECVFFLGVNQQPLIVGDNHKLQVAPYNTFYSHLEEHITEVGIQPTINKWNESLALGAIDPHDSLSHPTGASDKQAEPASCVDPDQFTTFLIPNWFAGEAIGSTKDNPFPLPDAYKAVQQTNLKNLEETRQSLRETPLEENRKRELTTAFHMYFKDWLYATGNIRQLYCLQGD

SEQ ID NO: 22147 - protein, 397 aa, Arabidopsis thaliana
  peptide (1)..(397): Ceres Seq. ID no. 12334743
MPSPTDEEAHQLSYLQKHIANIISLLAEPVEGQGDDSLVLSMESLEHIGFLVHYGDKGFDVPSLSQATPFFANSDPDMPAVPVPASQVNDWLLKDIASALESISNRISGKENGASNASDQNAAMADSSVALNKVSSNDRGPCIIEGVSKTSLFKQASDLKGRSVKVANCHDSVIYLLAPLRYATVYGCSDSTIVLGAAGKAVKVEHCERVHVIVATKRICIANCRECVFFLGVNQQPLIVGDNHKLQVAPYNTFYSHLEEHITEVGIQPTINKWNESLALGAIDPHDSLSHPTGASDKQAEPASCVDPDQFTTFLIPNWFAGEAIGSTKDNPFPLPDAYKAVQQTNLKNLEETRQSLRETPLEENRKRELTTAFHMYFKDWLYATGNIRQLYCLQGD

SEQ ID NO: 22148 - DNA, 844 bp, Arabidopsis thaliana
  misc_feature (1)..(844): Ceres Seq. ID no. 12334877
  misc_feature (1)..(844): Ortholog of  Ceres SEQ ID NO 14306406 as cited in SEQ ID NO 1412
  misc_feature (1)..(844): Ortholog of  Ceres SEQ ID NO 14309488 as cited in SEQ ID NO 52755
  misc_feature (1)..(844): Ortholog of  Ceres SEQ ID NO 13661778 as cited in SEQ ID NO 61468
  misc_feature (1)..(844): Ortholog of  Ceres SEQ ID NO 15178824 as cited in SEQ ID NO 0
atgtatcctttatgtgtctctattataacgtggatcaagattctttcttatcttcatcactccacacattttcttgtcttcaaactcacacaaagaaaagaaaagtctccaaagctcaaaaaacaatgactcgaccgtcaagattacttgagacggcggcgccaccaccacaaccgtcggaggagatgatcgcagcggaatccgacatggtggtgatcttgtcggctcttctttgcgctcttatctgcgttgctggtctcgccgccgtcgtacgatgcgcttggctccggcggtttacagccggaggagattcgccgtcaccgaacaaaggcttgaaaaagaaagctcttcagtctcttccaagatccactttcaccgccgcggaatcaacctccggcgccgccgctgaagagggagactcgacggaatgtgctatttgcctcactgacttcgccgacggtgaagaaataagagtgcttcctctttgtggtcattctttccacgtggagtgtattgacaaatggctagtttctaggtcttcttgtccttcttgtcgcaggattcttacgccggtgagatgtgaccggtgtggtcatgcttctacggcggagatgaaagatcaagctcatcgtcatcaacatcaccaacactcttctactaccattcctacgtttcttccttaattaacactaatttttgttttattatggcaataattaattgcataaaagttatgtaaagtgagtttaattaggattagagagatcttttaaagtttttctctcttttctccttgttgtaatccagtgtatttaatcaaatctcagatggagttcaaatttcc

SEQ ID NO: 22149 - protein, 226 aa, Arabidopsis thaliana
  peptide (1)..(226): Ceres Seq. ID no. 12334878
VSFMCLYYNVDQDSFLSSSLHTFSCLQTHTKKRKVSKAQKTMTRPSRLLETAAPPPQPSEEMIAAESDMVVILSALLCALICVAGLAAVVRCAWLRRFTAGGDSPSPNKGLKKKALQSLPRSTFTAAESTSGAAAEEGDSTECAICLTDFADGEEIRVLPLCGHSFHVECIDKWLVSRSSCPSCRRILTPVRCDRCGHASTAEMKDQAHRHQHHQHSSTTIPTFLP

SEQ ID NO: 22150 - protein, 223 aa, Arabidopsis thaliana
  peptide (1)..(223): Ceres Seq. ID no. 12334879
MCLYYNVDQDSFLSSSLHTFSCLQTHTKKRKVSKAQKTMTRPSRLLETAAPPPQPSEEMIAAESDMVVILSALLCALICVAGLAAVVRCAWLRRFTAGGDSPSPNKGLKKKALQSLPRSTFTAAESTSGAAAEEGDSTECAICLTDFADGEEIRVLPLCGHSFHVECIDKWLVSRSSCPSCRRILTPVRCDRCGHASTAEMKDQAHRHQHHQHSSTTIPTFLP

SEQ ID NO: 22151 - protein, 185 aa, Arabidopsis thaliana
  peptide (1)..(185): Ceres Seq. ID no. 12334880
MTRPSRLLETAAPPPQPSEEMIAAESDMVVILSALLCALICVAGLAAVVRCAWLRRFTAGGDSPSPNKGLKKKALQSLPRSTFTAAESTSGAAAEEGDSTECAICLTDFADGEEIRVLPLCGHSFHVECIDKWLVSRSSCPSCRRILTPVRCDRCGHASTAEMKDQAHRHQHHQHSSTTIPTFLP

SEQ ID NO: 22152 - DNA, 1103 bp, Arabidopsis thaliana
  misc_feature (1)..(1103): Ceres Seq. ID no. 13488541
  misc_feature (1)..(1103): Ortholog of  Ceres SEQ ID NO 14315892 as cited in SEQ ID NO 57776
  misc_feature (1)..(1103): Ortholog of  Ceres SEQ ID NO 13662173 as cited in SEQ ID NO 62002
gactcttgtaatagtataaaattttattgaataattcatctgtagacaagggggaaaagaaagactgattttacgctttattgctctcactaaaaccctaattctctccgtctcgatcgcgacctctgtttcttcggcaatggcggattctcctcaaagaagaagggattcacgatctccttcaccccgaaaagaacgagctagatccagatccaggtctaggtccaggtctagatccaggcccaggcttaggtccaggtcaagatctttgccaaggcctgtttctccatcacgaagccgtggaaggtcaaggtcaagaagccgtggaagaagtgaagttgaaaaccctggtaccactctctatgtgactggcctatctacaagagtcactgacaaggatcttgaagcacatttcgccaaggaaggaaaggttgcgtcttgttttcttgtgatggagccgcgcacccgtgtgtctcgtggttttgcctttgttacaatgagcagccttaaagatgctgagcggtgcattaaatatctcaaccagtctgtactagaaggccgatacataactgtggaaaggtccaggagaaagcgcccgagaactcccaccccaggccactatcttggcttgaaaagctccagagacagcgatcgagaaggccgtagcagtcgagggaggcactatgatcgtgatgattacagagaccgtaggtcaccaagacgcgactattcacctcgtgatgaaagaaggtctagaagagatcggtcttactctcctcatggaagaagcccagagagaagatcagagagaaggtctgagaggtcagagagaaggtatgaaccccgtggctcgagatgacctgttttcatccttttgacaaaggattcaaaaacttctctgttgatttaggttgtgtaattgatcatccttaaaatagcacaaagattctgtcaggcaacgctttgggtttcatttattttctgttgttaacgtgttattctgtcggaactctctgaagtgaaaactaaaaactgtaatagcttctctgttatgtctctactctacttgtttttgaatgaatcagaatatcttatgtgattag

SEQ ID NO: 22153 - protein, 239 aa, Arabidopsis thaliana
  peptide (1)..(239): Ceres Seq. ID no. 13488542
MADSPQRRRDSRSPSPRKERARSRSRSRSRSRSRPRLRSRSRSLPRPVSPSRSRGRSRSRSRGRSEVENPGTTLYVTGLSTRVTDKDLEAHFAKEGKVASCFLVMEPRTRVSRGFAFVTMSSLKDAERCIKYLNQSVLEGRYITVERSRRKRPRTPTPGHYLGLKSSRDSDREGRSSRGRHYDRDDYRDRRSPRRDYSPRDERRSRRDRSYSPHGRSPERRSERRSERSERRYEPRGSR

SEQ ID NO: 22154 - protein, 135 aa, Arabidopsis thaliana
  peptide (1)..(135): Ceres Seq. ID no. 13488543
MEPRTRVSRGFAFVTMSSLKDAERCIKYLNQSVLEGRYITVERSRRKRPRTPTPGHYLGLKSSRDSDREGRSSRGRHYDRDDYRDRRSPRRDYSPRDERRSRRDRSYSPHGRSPERRSERRSERSERRYEPRGSR

SEQ ID NO: 22155 - protein, 120 aa, Arabidopsis thaliana
  peptide (1)..(120): Ceres Seq. ID no. 13488544
MSSLKDAERCIKYLNQSVLEGRYITVERSRRKRPRTPTPGHYLGLKSSRDSDREGRSSRGRHYDRDDYRDRRSPRRDYSPRDERRSRRDRSYSPHGRSPERRSERRSERSERRYEPRGSR

SEQ ID NO: 22156 - DNA, 1156 bp, Arabidopsis thaliana
  misc_feature (1)..(1156): Ceres Seq. ID no. 12421514
  misc_feature (1)..(1156): Ortholog of  Ceres SEQ ID NO 12562983 as cited in SEQ ID NO 53309
atactctctttttttctcggacaagaaggctacagaaagatatgtcgctgtcgtcttacctcagcccgacgcgccttctataaggctacctccgccgttgtctcagggcggcaggactgacgtcgcagacgctttccatagactctgaaacaaccatccacttctggggcccaccacctctagaccaccggagcgacgatgacagaccggttatgcttctcctccacggcttcggtccgtcgtccatgtggcagtggcggcgacagatgcaagccttctctccctccgctttcagggtttattctcccgatcttgtcttcttcggcgactctacctcttcctccaccaatcgcaccgaagtcttccaggcggaatgtatggcaaagctaatggcgaaaataggaatagggaagtataatgtggctggaacaagctacggggggtttgttgcgtaccacatggccaaaatgtggccggaaaaagtggagaaagtggtgattgcaagctccggcatcaacatgcgaaagtgtgacggtgaaagtttattgcaaagatccaattgtgagtgcatcgagaaggttatgttaccatccactgcaactgagtttcgcacacttatggctttggcatcttcatggcggttagttcgtatgtttcctgatgctctctggaacgacgtaatcaataatttgtataaaaaaaatagaaaagagaagatagaattgttgaagggagtgactttcggccggagcgaaaatttaaacatcgattctctttctcaggaggtcctaattgtatggggagacaaagatcagatatttcctgtgaagatggcttacgaattaaaagagattcttggagacaaaacgaaactagaaatcattgacaacacttcacatgttcctcagattgaatgtgctcaagagttcaacaatattgttttgagatttttgaagggttcttaagagccgtaattttattccatgctacatgattcttcagttttttttaagtgttaaactattggttacgtaattttgcgactttacttgccatgctttctcatttttcatgtaagaactttatccattactgtcattgtagagaactctatttatagcaaaaagtaatactaatatgcaacttaattttcgtc

SEQ ID NO: 22157 - protein, 250 aa, Arabidopsis thaliana
  peptide (1)..(250): Ceres Seq. ID no. 12421515
MLLLHGFGPSSMWQWRRQMQAFSPSAFRVYSPDLVFFGDSTSSSTNRTEVFQAECMAKLMAKIGIGKYNVAGTSYGGFVAYHMAKMWPEKVEKVVIASSGINMRKCDGESLLQRSNCECIEKVMLPSTATEFRTLMALASSWRLVRMFPDALWNDVINNLYKKNRKEKIELLKGVTFGRSENLNIDSLSQEVLIVWGDKDQIFPVKMAYELKEILGDKTKLEIIDNTSHVPQIECAQEFNNIVLRFLKGS

SEQ ID NO: 22158 - protein, 239 aa, Arabidopsis thaliana
  peptide (1)..(239): Ceres Seq. ID no. 12421516
MWQWRRQMQAFSPSAFRVYSPDLVFFGDSTSSSTNRTEVFQAECMAKLMAKIGIGKYNVAGTSYGGFVAYHMAKMWPEKVEKVVIASSGINMRKCDGESLLQRSNCECIEKVMLPSTATEFRTLMALASSWRLVRMFPDALWNDVINNLYKKNRKEKIELLKGVTFGRSENLNIDSLSQEVLIVWGDKDQIFPVKMAYELKEILGDKTKLEIIDNTSHVPQIECAQEFNNIVLRFLKGS

SEQ ID NO: 22159 - protein, 232 aa, Arabidopsis thaliana
  peptide (1)..(232): Ceres Seq. ID no. 12421517
MQAFSPSAFRVYSPDLVFFGDSTSSSTNRTEVFQAECMAKLMAKIGIGKYNVAGTSYGGFVAYHMAKMWPEKVEKVVIASSGINMRKCDGESLLQRSNCECIEKVMLPSTATEFRTLMALASSWRLVRMFPDALWNDVINNLYKKNRKEKIELLKGVTFGRSENLNIDSLSQEVLIVWGDKDQIFPVKMAYELKEILGDKTKLEIIDNTSHVPQIECAQEFNNIVLRFLKGS

SEQ ID NO: 22160 - DNA, 1208 bp, Arabidopsis thaliana
  misc_feature (1)..(1208): Ceres Seq. ID no. 13487569
  misc_feature (1)..(1208): Ortholog of  Ceres SEQ ID NO 15169979 as cited in SEQ ID NO 51586
aaaagactgtgaagcgagaggaccgttaagacgacggacgcttatctggaaggagagtcatgaatctgagtgtgaaccgatgcatcaccggtggtttcgtcggtggattctctagctgcagactcaatcatgagaaaaggtgggttcgtgctggcaagcactgtgagcttgagagggagagaagtttagtgtctgatgctgtttctttagagaggttagagagcaaaagcattaaacttgcgatgcttgctagtggtttaggagtggcgaacttggtaactcttagctcagcaaaagccgcagacttgaagatgattgtcttggatcaagccacttccatttacatcttggctgaaggaagccttggagattcggtcgggaacttcttgtattcagctaaccaacaggctaacgaagctgttcaagatcaactatcagcactcagtgtaacaagtttggcagtaatatttggggcaggccttgtgacaagtctgtctccatgtacacttagtgttttgccgttgacacttggttatattggtgcatttgggtctggcaaaagcagaggtcaggttattggagatacagttgctttcgcactgggattagcaactaccttagcccttcttgggatagtagcttcttttgccggaaaagcctatggacaaataggacaaggattaccagtagctgcatccggtctggctattgtaatgggtctcaatctccttgagataatcgaacttcagcttccttctttctttaacaactttgatcctcgtgctgcagcagcaaacttcccatctagtgtacaagcatatctagccggtctcacattcgcacttgctgcctcaccttgtagtactccagttctagccactcttcttggttacgtggctacttccagggatccagtaattggtggaagcttactcttaacctatacaacaggttacgtcgctccacttatcgtcgctgcttcttttgccggagctttacagagcttactttcgttgcgaaaggtctctgcatggatcaatcccataagtggtgctcttctacttggaggaggtttatatactttcttggataggctttttcctgctgctactatggtcatgtaaaaacttaacttacaaactcatttcggccaaaaacaaagtgtttgtaatagtaaataaataatattgtttataatgtaaaattac

SEQ ID NO: 22161 - protein, 354 aa, Arabidopsis thaliana
  peptide (1)..(354): Ceres Seq. ID no. 13487570
MNLSVNRCITGGFVGGFSSCRLNHEKRWVRAGKHCELERERSLVSDAVSLERLESKSIKLAMLASGLGVANLVTLSSAKAADLKMIVLDQATSIYILAEGSLGDSVGNFLYSANQQANEAVQDQLSALSVTSLAVIFGAGLVTSLSPCTLSVLPLTLGYIGAFGSGKSRGQVIGDTVAFALGLATTLALLGIVASFAGKAYGQIGQGLPVAASGLAIVMGLNLLEIIELQLPSFFNNFDPRAAAANFPSSVQAYLAGLTFALAASPCSTPVLATLLGYVATSRDPVIGGSLLLTYTTGYVAPLIVAASFAGALQSLLSLRKVSAWINPISGALLLGGGLYTFLDRLFPAATMVM

SEQ ID NO: 22162 - protein, 293 aa, Arabidopsis thaliana
  peptide (1)..(293): Ceres Seq. ID no. 13487571
MLASGLGVANLVTLSSAKAADLKMIVLDQATSIYILAEGSLGDSVGNFLYSANQQANEAVQDQLSALSVTSLAVIFGAGLVTSLSPCTLSVLPLTLGYIGAFGSGKSRGQVIGDTVAFALGLATTLALLGIVASFAGKAYGQIGQGLPVAASGLAIVMGLNLLEIIELQLPSFFNNFDPRAAAANFPSSVQAYLAGLTFALAASPCSTPVLATLLGYVATSRDPVIGGSLLLTYTTGYVAPLIVAASFAGALQSLLSLRKVSAWINPISGALLLGGGLYTFLDRLFPAATMVM

SEQ ID NO: 22163 - protein, 270 aa, Arabidopsis thaliana
  peptide (1)..(270): Ceres Seq. ID no. 13487572
MIVLDQATSIYILAEGSLGDSVGNFLYSANQQANEAVQDQLSALSVTSLAVIFGAGLVTSLSPCTLSVLPLTLGYIGAFGSGKSRGQVIGDTVAFALGLATTLALLGIVASFAGKAYGQIGQGLPVAASGLAIVMGLNLLEIIELQLPSFFNNFDPRAAAANFPSSVQAYLAGLTFALAASPCSTPVLATLLGYVATSRDPVIGGSLLLTYTTGYVAPLIVAASFAGALQSLLSLRKVSAWINPISGALLLGGGLYTFLDRLFPAATMVM

SEQ ID NO: 22164 - DNA, 774 bp, Arabidopsis thaliana
  misc_feature (1)..(774): Ceres Seq. ID no. 13490678
  misc_feature (1)..(774): Ortholog of  Ceres SEQ ID NO 15179206 as cited in SEQ ID NO 0
atgtctacatattcttcttctagctcagatctctcttttgttccgcttcagttccaatggcgtcgtgtattgctactgctcctctttctctatctggcgtgtctcaatctcattatgtgaaagctaatggattgtctacaacaacaaaactcagttctatttgtaaaacctctgatttgactattcacaagaaatcaaaccggactcgcaagttttctgtttctgcagggtatcgagatggaagtagaagcggaagcagtggtgatttcattgctggttttcttctaggaggtgctgtctttggcgctgttgcttatatctttgctccacagatccgaagatcggttctaaatgaagaagacgagtacggttttgagaagccgaaacagccaacgtactacgatgaaggtttagagaaaacaagagagacactgaatgagaaaataggacaacttaattcagcgatagacaatgtctcttcgcgtttacgaggtcgagaaaagaacacttcttccctaaatgtaccggtcgaaactgacccagaggttgaagctacgacttgaaggaagaaacaaacagctttcttcttctgtgtttcatttgtaaactagagttaaaaaaccattacttatatgtttgatttggttcttttctttctggtttgcctttgtgctcagtccttagtagaaagaactcttgcaaagtgaaatgtatacgtcttttggttttagtgtgaatttggttcaatttaattcgaaaaaatctttgttctct

SEQ ID NO: 22165 - protein, 168 aa, Arabidopsis thaliana
  peptide (1)..(168): Ceres Seq. ID no. 13490679
MASCIATAPLSLSGVSQSHYVKANGLSTTTKLSSICKTSDLTIHKKSNRTRKFSVSAGYRDGSRSGSSGDFIAGFLLGGAVFGAVAYIFAPQIRRSVLNEEDEYGFEKPKQPTYYDEGLEKTRETLNEKIGQLNSAIDNVSSRLRGREKNTSSLNVPVETDPEVEATT

SEQ ID NO: 22166 - DNA, 768 bp, Arabidopsis thaliana
  misc_feature (1)..(768): Ceres Seq. ID no. 12334971
  misc_feature (1)..(768): Ortholog of  Ceres SEQ ID NO 13581866 as cited in SEQ ID NO 52179
  misc_feature (1)..(768): Ortholog of  Ceres SEQ ID NO 14315451 as cited in SEQ ID NO 59289
aaaaaagtaaaaaaatcaatcatttataatttattatggagaagtgagagcaagtgttagcttttgatctttcttatattcttctctgaaatagtaacacactgtgaagagtttttcctacatctgaattttgtctgatccaggaaaaagaagaaaatggcgtttgtgacaactgcggaagtttgtgacgcgaatcaagagctgattcggagtggtcagctacgagctttgcaacccattttccagatttatggccgtcgacaaatattctcaggaccagttgtcactgtcaaagtttttgaagacaatggcttaatccgtcaattcatcgaggagaaaggaaacggtagagttcttgtggtggatggtggagggagtcaacgatgtgcaatactcggaggtaaccccgttgttcaagctcagaacaacggatgggcaggaatcgttgtgaacggatgcatcaaagacgtcgatgagatcaacggttgtgatatcggagtgagagctttggcctctcatccgataaaagcgagtaagaaaggacttggagaacaacgagttccggtaaatatcgcagggactcggatttgtgatggtgaatggctttatgcagatactgatgggattcttgtctcccaaattgagttatccgtttaataaaaaaggctttgatcagttaccaaaaaaaaaaacagaacgtggtttgtgttcatcttcttgttacttaagagattgttgaattataatggaaaataaatttttgttttg

SEQ ID NO: 22167 - protein, 166 aa, Arabidopsis thaliana
  peptide (1)..(166): Ceres Seq. ID no. 12334972
MAFVTTAEVCDANQELIRSGQLRALQPIFQIYGRRQIFSGPVVTVKVFEDNGLIRQFIEEKGNGRVLVVDGGGSQRCAILGGNPVVQAQNNGWAGIVVNGCIKDVDEINGCDIGVRALASHPIKASKKGLGEQRVPVNIAGTRICDGEWLYADTDGILVSQIELSV

SEQ ID NO: 22168 - DNA, 1577 bp, Arabidopsis thaliana
  misc_feature (1)..(1577): Ceres Seq. ID no. 12334977
  misc_feature (1)..(1577): Ortholog of  Ceres SEQ ID NO 13596392 as cited in SEQ ID NO 62136
  misc_feature (1)..(1577): Ortholog of  Ceres SEQ ID NO 13654360 as cited in SEQ ID NO 67980
  misc_feature (1)..(1577): Ortholog of  Ceres SEQ ID NO 13596394 as cited in SEQ ID NO 68561
attttatctaaaacgaaaaaaaaagaaaagaagagaagcttttttagttctctctgcccaatggagaaaagaagaaccagagattgccaaatcatcttctgcaaaagcacccatcaaagaaattacttgtaaatagaaaacaaatcatcaaatctggaagacaaatcattaaaaaaggcgacaactttttttggttcagattttgaaaatttgattttttatttttcttatcttggcgatcgaatcctatccgaaagattgaaacttgggaggtgggtaagtgagtgaatggcgcaacaagggcagggaagcatggaccctgctgttctcgacgacatcattcgtcgtttacttgattaccgaaaccctaaagctgggaccaaacaagctatgctcaacgattctgagatccgacagctttgctttgtctctagagagatatttcttcaacagccttgtcttcttgagctcgctgcccctgttaagatctgcggtgatattcatggtcaatactcagatttattgaggcttttcgagtatggaggtttccctcctgcagcaaactacttattcttaggagattacgttgaccgcggaaagcagagtttggagactatttgtcttctgcttgcttacaagatcaaataccctgaaaacttttttctcttaagaggaaaccatgagtgtgcatctattaacagaatttacggattctatgacgaatgtaaacgaagattcaacgtgaagctctggaaagtgtttaccgatacttttaactgtctccctgtggctgctgtcatagatgaaaagatactttgtatgcatggtggactatctcctgagttgatcaatgtggaacaaattaagaacatagagcgtccaactgatgttccagacgctggtttgctctgtgaccttctttggtctgatcctagtaaagatgtcaaaggctgggggatgaatgatcgtggtgtctcctacacttttggtgctgacaaagttgctgagtttttaataaagaatgatatggatttagtctgtcgtgcccaccaggttgtagaggatgggtatgagttctttgctgatagacagcttgtgactatgttttctgctccaaactactgtggtgaatttgacaatgcgggtgcattgatgagtgtcgacgaaagtttaatgtgctctttccaaattcttaagcctgtggatcggaggtcgcggttcttttgaagagaaagagtccttcttaagttataaccctgattcaaatcttatgggaagaatgggaggagaaaaagcgacaacggatgttggtggcggataattctgaacctccacgagtagtctccgaagttgcaaaagcaacaatatatatatttacatggttatatcatctctgccacttcttttgaatatgatcttgtttcttcaactcaattttttgctctgtttccttctctgttctttcacatgtcagagatacaaatcctctaagtgtatataatactttatatgtatgtatcagaacctcactgcaggatgcttcagttcatgattcttattaaaacagagggttctct

SEQ ID NO: 22169 - protein, 312 aa, Arabidopsis thaliana
  peptide (1)..(312): Ceres Seq. ID no. 12334978
MAQQGQGSMDPAVLDDIIRRLLDYRNPKAGTKQAMLNDSEIRQLCFVSREIFLQQPCLLELAAPVKICGDIHGQYSDLLRLFEYGGFPPAANYLFLGDYVDRGKQSLETICLLLAYKIKYPENFFLLRGNHECASINRIYGFYDECKRRFNVKLWKVFTDTFNCLPVAAVIDEKILCMHGGLSPELINVEQIKNIERPTDVPDAGLLCDLLWSDPSKDVKGWGMNDRGVSYTFGADKVAEFLIKNDMDLVCRAHQVVEDGYEFFADRQLVTMFSAPNYCGEFDNAGALMSVDESLMCSFQILKPVDRRSRFF

SEQ ID NO: 22170 - protein, 304 aa, Arabidopsis thaliana
  peptide (1)..(304): Ceres Seq. ID no. 12334979
MDPAVLDDIIRRLLDYRNPKAGTKQAMLNDSEIRQLCFVSREIFLQQPCLLELAAPVKICGDIHGQYSDLLRLFEYGGFPPAANYLFLGDYVDRGKQSLETICLLLAYKIKYPENFFLLRGNHECASINRIYGFYDECKRRFNVKLWKVFTDTFNCLPVAAVIDEKILCMHGGLSPELINVEQIKNIERPTDVPDAGLLCDLLWSDPSKDVKGWGMNDRGVSYTFGADKVAEFLIKNDMDLVCRAHQVVEDGYEFFADRQLVTMFSAPNYCGEFDNAGALMSVDESLMCSFQILKPVDRRSRFF

SEQ ID NO: 22171 - protein, 278 aa, Arabidopsis thaliana
  peptide (1)..(278): Ceres Seq. ID no. 12334980
MLNDSEIRQLCFVSREIFLQQPCLLELAAPVKICGDIHGQYSDLLRLFEYGGFPPAANYLFLGDYVDRGKQSLETICLLLAYKIKYPENFFLLRGNHECASINRIYGFYDECKRRFNVKLWKVFTDTFNCLPVAAVIDEKILCMHGGLSPELINVEQIKNIERPTDVPDAGLLCDLLWSDPSKDVKGWGMNDRGVSYTFGADKVAEFLIKNDMDLVCRAHQVVEDGYEFFADRQLVTMFSAPNYCGEFDNAGALMSVDESLMCSFQILKPVDRRSRFF

SEQ ID NO: 22172 - DNA, 2061 bp, Arabidopsis thaliana
  misc_feature (1)..(2061): Ceres Seq. ID no. 13490638
  misc_feature (1)..(2061): Ortholog of  Ceres SEQ ID NO 15170764 as cited in SEQ ID NO 52602
agagagacatttcgccattagatcctcttttttttcttcgtaggtcgaacgaaattttgtgtttcgttgaggagaaaattgagccgtgtttgtgttgagatgtctatgatcgatgagccgttgtacccaatcgccgtacttatagacgagttaaaaaacgatgatattcagctaagattgaattccatcagaaggctttctacgatcgctcgtgctcttggggaagagaggactagaaaggaattgatccctttccttagcgaaaacaatgacgatgatgatgaggttttattagcaatggctgaagaattgggtgtgtttattccttatgttggtggtgttgagtatgcacatgttcttcttccacctttggaaactctttcgactgtcgaagaaacttgtgttagggagaaagctgttgagtcgctttgtagagttggctctcagatgagggagagtgacttggttgatcatttcatttcgttagttaagcgacttgccgctggtgagtggttcacagctagagtatcggcttgcggtgttttccatattgcatacccgagcgcgccggatatgttgaagactgagttaagatcgttgtatactcagctttgtcaggatgatatgccgatggtaaggagagctgcagcaactaatcttgggaaatttgctgctacggttgaatcagcgcatttgaagaccgacgttatgtccatgtttgaggatcttactcaagatgatcaagattctgttagattattggccgttgagggttgtgctgctcttgggaaattgttggagcctcaggattgtgtccaacacattcttcccgtgattgttaatttctcgcaggataagtcttggcgtgtgcgctatatggttgcaaatcaactctacgagctttgtgaagccgtgggacctgagcctactaggacggagctggtgcctgcatatgtgcgcctacttcgtgataatgaagctgaagtacgcatagcagctgccggaaaagttacaaagttttgtcggattctaaaccctgaaattgctatccagcacattctcccctgtgtgaaggagctatcatcagactcttctcagcatgtcagatctgcattggcctcagttataatgggaatggctccagtcttgggtaaggatgcaacaattgagcatctccttccaatctttctttctctattgaaagatgagttcccggatgtacgcttgaacattatcagcaaacttgaccaagtgaatcaggttattgggattgatctactatcacaatccttgttgccagctattgtagaacttgctgaagatagacactggagagtaagacttgctataatcgagtatatccctttgttggcaagtcagttaggtgttggcttctttgacgataagcttggtgctctttgcatgcaatggttacaagacaaggttcactcaatccgcgatgctgctgctaacaatctcaagcggcttgctgaggaatttggtcctgaatgggcaatgcaacatatagttcctcaggttcttgagatggttaacaaccctcactatctctaccgaatgaccattttgcgtgcggtgtctcttcttgcacctgtaatgggctcagagattacatgctctaagctcttacctgtagtaatgactgcatctaaagacagagttccaaacatcaaattcaacgtcgctaaagtacttcaatccctcattccaatagttgatcaatcggttgtggagaagacgattcgtcctgggcttgtggagctaagcgaggatccagatgttgatgtcaggtttttcgcaaaccaagctctacaatctattgacaatgtgatgatgtctagctaaaaacattagatcttgtctctctgcttataatcgttttctatttgattgaaaaaaaaaacaaatctcaagacttttgtaacgtagtagtggattctcgtcttgtgttttttattacacgcaaactactagagtgcctcggtacgggttttgtccattgtcttgctactaatgtgtttaaaactctatgttgataactaa

SEQ ID NO: 22173 - protein, 587 aa, Arabidopsis thaliana
  peptide (1)..(587): Ceres Seq. ID no. 13490639
MSMIDEPLYPIAVLIDELKNDDIQLRLNSIRRLSTIARALGEERTRKELIPFLSENNDDDDEVLLAMAEELGVFIPYVGGVEYAHVLLPPLETLSTVEETCVREKAVESLCRVGSQMRESDLVDHFISLVKRLAAGEWFTARVSACGVFHIAYPSAPDMLKTELRSLYTQLCQDDMPMVRRAAATNLGKFAATVESAHLKTDVMSMFEDLTQDDQDSVRLLAVEGCAALGKLLEPQDCVQHILPVIVNFSQDKSWRVRYMVANQLYELCEAVGPEPTRTELVPAYVRLLRDNEAEVRIAAAGKVTKFCRILNPEIAIQHILPCVKELSSDSSQHVRSALASVIMGMAPVLGKDATIEHLLPIFLSLLKDEFPDVRLNIISKLDQVNQVIGIDLLSQSLLPAIVELAEDRHWRVRLAIIEYIPLLASQLGVGFFDDKLGALCMQWLQDKVHSIRDAAANNLKRLAEEFGPEWAMQHIVPQVLEMVNNPHYLYRMTILRAVSLLAPVMGSEITCSKLLPVVMTASKDRVPNIKFNVAKVLQSLIPIVDQSVVEKTIRPGLVELSEDPDVDVRFFANQALQSIDNVMMSS

SEQ ID NO: 22174 - protein, 585 aa, Arabidopsis thaliana
  peptide (1)..(585): Ceres Seq. ID no. 13490640
MIDEPLYPIAVLIDELKNDDIQLRLNSIRRLSTIARALGEERTRKELIPFLSENNDDDDEVLLAMAEELGVFIPYVGGVEYAHVLLPPLETLSTVEETCVREKAVESLCRVGSQMRESDLVDHFISLVKRLAAGEWFTARVSACGVFHIAYPSAPDMLKTELRSLYTQLCQDDMPMVRRAAATNLGKFAATVESAHLKTDVMSMFEDLTQDDQDSVRLLAVEGCAALGKLLEPQDCVQHILPVIVNFSQDKSWRVRYMVANQLYELCEAVGPEPTRTELVPAYVRLLRDNEAEVRIAAAGKVTKFCRILNPEIAIQHILPCVKELSSDSSQHVRSALASVIMGMAPVLGKDATIEHLLPIFLSLLKDEFPDVRLNIISKLDQVNQVIGIDLLSQSLLPAIVELAEDRHWRVRLAIIEYIPLLASQLGVGFFDDKLGALCMQWLQDKVHSIRDAAANNLKRLAEEFGPEWAMQHIVPQVLEMVNNPHYLYRMTILRAVSLLAPVMGSEITCSKLLPVVMTASKDRVPNIKFNVAKVLQSLIPIVDQSVVEKTIRPGLVELSEDPDVDVRFFANQALQSIDNVMMSS

SEQ ID NO: 22175 - protein, 521 aa, Arabidopsis thaliana
  peptide (1)..(521): Ceres Seq. ID no. 13490641
MAEELGVFIPYVGGVEYAHVLLPPLETLSTVEETCVREKAVESLCRVGSQMRESDLVDHFISLVKRLAAGEWFTARVSACGVFHIAYPSAPDMLKTELRSLYTQLCQDDMPMVRRAAATNLGKFAATVESAHLKTDVMSMFEDLTQDDQDSVRLLAVEGCAALGKLLEPQDCVQHILPVIVNFSQDKSWRVRYMVANQLYELCEAVGPEPTRTELVPAYVRLLRDNEAEVRIAAAGKVTKFCRILNPEIAIQHILPCVKELSSDSSQHVRSALASVIMGMAPVLGKDATIEHLLPIFLSLLKDEFPDVRLNIISKLDQVNQVIGIDLLSQSLLPAIVELAEDRHWRVRLAIIEYIPLLASQLGVGFFDDKLGALCMQWLQDKVHSIRDAAANNLKRLAEEFGPEWAMQHIVPQVLEMVNNPHYLYRMTILRAVSLLAPVMGSEITCSKLLPVVMTASKDRVPNIKFNVAKVLQSLIPIVDQSVVEKTIRPGLVELSEDPDVDVRFFANQALQSIDNVMMSS

SEQ ID NO: 22176 - DNA, 1184 bp, Arabidopsis thaliana
  misc_feature (1)..(1184): Ceres Seq. ID no. 12339509
  misc_feature (1)..(1184): Ortholog of  Ceres SEQ ID NO 14316075 as cited in SEQ ID NO 60059
aaaaaattcgctattcaattcctttagtaagcttcacttttcacacttctctcactttctggtcagaaactttgtggatctagaagaacacacaaatcacaagagtgaaaaaagatgaacgacttgatgacgaaatcgtttatgagttacgttgacttgaaaaaagcagcgatgaaggatatggaagcaggacctgactttgatcttgagatggcttcgacgaaagcagacaagatggatgagaatctgtcatctttcttacaagaagcagagtatgtgaaagcagagatgggttttattagtagacactggctcggattgaacagtaccatgaagagagtaaaggtgttcacaaggcagagtctgtgaagtctcttcgtaacaagatctctaatgagattgtgtctggtttgaggaaggcgaaatcgattaagtcgaagctggaagagatggataaagcaaacaaggagattaaaaggctctctgggactccggtttacaggagcagaaccgctgtgactaacgggctgaggaagaaacttaaggaagtgatgatggagtttcaggggctgaggcaaaagatgatgagtgagtacaaggagactgttgagagaaggtacttcactgtcactggagaacatgctaatgatgagatgattgagaagatcattactgataacgctggaggtgaagagtttctcacgcgagcaattcaggaacatggtaaaggaaaggtcttggaaactgtggttgagattcaagataggtacgatgcagcaaaggagattgagaagagtctgttggagcttcaccaagtgtttcttgatatggctgtgatggttgaatcgcaaggtgaacagatggacgagatcgagcatcatgtgattaatgcgagccattacgtggctgatggagctaatgagctgaagactgcaaagagtcatcagagaaacagcagaaaatggatgtgcattggtatcattgtgctgcttttgatcattctcattgttgttatccccatcattaccagtttcagctcttcttgagatactggctatgttcactccttttgttttgtttcgctcttctttgtaccaatggatgtcttaatccttttgtgttcttaaaggatgtcttaatcctttcgtgtcttgtatccaatttcaatgaaatggtgaatgttt

SEQ ID NO: 22177 - protein, 198 aa, Arabidopsis thaliana
  peptide (1)..(198): Ceres Seq. ID no. 12339510
MDKANKEIKRLSGTPVYRSRTAVTNGLRKKLKEVMMEFQGLRQKMMSEYKETVERRYFTVTGEHANDEMIEKIITDNAGGEEFLTRAIQEHGKGKVLETVVEIQDRYDAAKEIEKSLLELHQVFLDMAVMVESQGEQMDEIEHHVINASHYVADGANELKTAKSHQRNSRKWMCIGIIVLLLIILIVVIPIITSFSSS

SEQ ID NO: 22178 - protein, 164 aa, Arabidopsis thaliana
  peptide (1)..(164): Ceres Seq. ID no. 12339512
MMEFQGLRQKMMSEYKETVERRYFTVTGEHANDEMIEKIITDNAGGEEFLTRAIQEHGKGKVLETVVEIQDRYDAAKEIEKSLLELHQVFLDMAVMVESQGEQMDEIEHHVINASHYVADGANELKTAKSHQRNSRKWMCIGIIVLLLIILIVVIPIITSFSSS

SEQ ID NO: 22179 - protein, 163 aa, Arabidopsis thaliana
  peptide (1)..(163): Ceres Seq. ID no. 12339513
MEFQGLRQKMMSEYKETVERRYFTVTGEHANDEMIEKIITDNAGGEEFLTRAIQEHGKGKVLETVVEIQDRYDAAKEIEKSLLELHQVFLDMAVMVESQGEQMDEIEHHVINASHYVADGANELKTAKSHQRNSRKWMCIGIIVLLLIILIVVIPIITSFSSS

SEQ ID NO: 22180 - DNA, 1141 bp, Arabidopsis thaliana
  misc_feature (1)..(1141): Ceres Seq. ID no. 12327114
  misc_feature (1)..(1141): Ortholog of  Ceres SEQ ID NO 14308120 as cited in SEQ ID NO 58423
  misc_feature (1)..(1141): Ortholog of  Ceres SEQ ID NO 15177787 as cited in SEQ ID NO 59431
  misc_feature (1)..(1141): Ortholog of  Ceres SEQ ID NO 12617197 as cited in SEQ ID NO 63406
  misc_feature (1)..(1141): Ortholog of  Ceres SEQ ID NO 13597804 as cited in SEQ ID NO 64182
  misc_feature (1)..(1141): Ortholog of  Ceres SEQ ID NO 14301622 as cited in SEQ ID NO 65156
  misc_feature (1)..(1141): Ortholog of  Ceres SEQ ID NO 13598565 as cited in SEQ ID NO 65250
  misc_feature (1)..(1141): Ortholog of  Ceres SEQ ID NO 13598597 as cited in SEQ ID NO 65496
  misc_feature (1)..(1141): Ortholog of  Ceres SEQ ID NO 13596284 as cited in SEQ ID NO 68273
gaaaatggatcaagcaaagggaaaagtctgtgttactggtgcttcaggcttcttggcttcttggcttgtaaagaggcttctacttgaaggatatgaagttatcggaacagtcagagatccaggaaatgagaagaaacttgcgcacctatggaagttggaaggggcaaaggagagactacggttggtgaaggctgatttaatggaagaaggaagttttgataacgccataatgggatgccaaggagtgttccatactgcttctccggtgcttaaacctacctctaatccagaggaggagattctgagaccagctatagaaggaaccctgaatgtactgcgatcatgcaggaagaatccttccctgaagcgcgtggttctcacctcatcctcttcaacagtcaggatcagagatgattttgatcccaaaatccctcttgacgaatcaatttggacgtctgtggaactctgcaagcgcttccaggtctggtatgccttatcaaagacattagcggaacaagctgcatggaaattctctgaagaaaatggtattgacctcgtcactgttctaccatccttcctcgttggacccagtctgcctcctgatttatgttctacagcttccgatgtcctcggattactgaaaggagaaacagagaagttccaatggcatggacaaatggggtatgttcatatcgatgacgttgcacgaacccacatagtcgttttcgaacacgaagcagctcaaggcagatacatttgtagctctaacgttatcagtctagaggaactcgtttcattcctatctgctcgttacccatcactccctatccccaagaggtttgagaaactaaataggttgcattacgactttgacacctcgaagatacagagtctcgggctcaagttcaagtcccttgaagagatgttcgatgactgcattgcctcattagtcgagcaaggctatttatctactgttcttccataactcttggactagagaatatgtgcaaataagattggtctgaaatagtagtcatgtggattcacaatgaaagaatgggattggaaaacatgaaatcaaagattacaaacgatataatctttacttgtttatgaaccaaatcataacatatttcttctc

SEQ ID NO: 22181 - protein, 327 aa, Arabidopsis thaliana
  peptide (1)..(327): Ceres Seq. ID no. 12327115
KMDQAKGKVCVTGASGFLASWLVKRLLLEGYEVIGTVRDPGNEKKLAHLWKLEGAKERLRLVKADLMEEGSFDNAIMGCQGVFHTASPVLKPTSNPEEEILRPAIEGTLNVLRSCRKNPSLKRVVLTSSSSTVRIRDDFDPKIPLDESIWTSVELCKRFQVWYALSKTLAEQAAWKFSEENGIDLVTVLPSFLVGPSLPPDLCSTASDVLGLLKGETEKFQWHGQMGYVHIDDVARTHIVVFEHEAAQGRYICSSNVISLEELVSFLSARYPSLPIPKRFEKLNRLHYDFDTSKIQSLGLKFKSLEEMFDDCIASLVEQGYLSTVLP

SEQ ID NO: 22182 - protein, 326 aa, Arabidopsis thaliana
  peptide (1)..(326): Ceres Seq. ID no. 12327116
MDQAKGKVCVTGASGFLASWLVKRLLLEGYEVIGTVRDPGNEKKLAHLWKLEGAKERLRLVKADLMEEGSFDNAIMGCQGVFHTASPVLKPTSNPEEEILRPAIEGTLNVLRSCRKNPSLKRVVLTSSSSTVRIRDDFDPKIPLDESIWTSVELCKRFQVWYALSKTLAEQAAWKFSEENGIDLVTVLPSFLVGPSLPPDLCSTASDVLGLLKGETEKFQWHGQMGYVHIDDVARTHIVVFEHEAAQGRYICSSNVISLEELVSFLSARYPSLPIPKRFEKLNRLHYDFDTSKIQSLGLKFKSLEEMFDDCIASLVEQGYLSTVLP

SEQ ID NO: 22183 - protein, 261 aa, Arabidopsis thaliana
  peptide (1)..(261): Ceres Seq. ID no. 12327117
MEEGSFDNAIMGCQGVFHTASPVLKPTSNPEEEILRPAIEGTLNVLRSCRKNPSLKRVVLTSSSSTVRIRDDFDPKIPLDESIWTSVELCKRFQVWYALSKTLAEQAAWKFSEENGIDLVTVLPSFLVGPSLPPDLCSTASDVLGLLKGETEKFQWHGQMGYVHIDDVARTHIVVFEHEAAQGRYICSSNVISLEELVSFLSARYPSLPIPKRFEKLNRLHYDFDTSKIQSLGLKFKSLEEMFDDCIASLVEQGYLSTVLP

SEQ ID NO: 22184 - DNA, 721 bp, Arabidopsis thaliana
  misc_feature (1)..(721): Ceres Seq. ID no. 12335287
  misc_feature (1)..(721): Ortholog of  Ceres SEQ ID NO 12612272 as cited in SEQ ID NO 55946
aatcataaaatcgaaattcaattcgtcggaaaattgttcagatttcgaaatcaaccgagaaaatgtcgctgattccaagcttcttcggcaacaacaggcgaatcaacaacaacatattcgatccattctcactcgacgtatgggatccattcaaggaacttcaattcccgtcaccgtcttcgtcggcgatagcaaacggacgtgtggattggaaagagacggcggaggcgcacgtgttcaaggcggatttaccggggatgaagaaagaagaggttaaagtagagattgaggatgatagtgtgcttaagatcagcggagagagacacgttgagaaagaggagaagcaggacacgtggcatcgtgtagagagatcgagtgggggattctcgaggaagtttaggttaccggagaatgtgaagatggatcaagttaaagcttcaatggagaatggtgttttgactgtgactgtgcctaaagtggagactaataagaagaaggctcaagttaagtctattgatatctctggctaagccaatttagcttgatttgagttctctctgggtcttgactttgtgtgtgtgtgtctctgatgattatggttcttcgtttgattgtagttttaaactaataatcaatggaagctagtaacttgtgtgacaagtaaatgtatggtggagaaatgtgtgtatttggattataatagaaatacctattttcatcc

SEQ ID NO: 22185 - protein, 155 aa, Arabidopsis thaliana
  peptide (1)..(155): Ceres Seq. ID no. 12335288
MSLIPSFFGNNRRINNNIFDPFSLDVWDPFKELQFPSPSSSAIANGRVDWKETAEAHVFKADLPGMKKEEVKVEIEDDSVLKISGERHVEKEEKQDTWHRVERSSGGFSRKFRLPENVKMDQVKASMENGVLTVTVPKVETNKKKAQVKSIDISG

SEQ ID NO: 22186 - protein, 91 aa, Arabidopsis thaliana
  peptide (1)..(91): Ceres Seq. ID no. 12335289
IIKSKFNSSENCSDFEINRENVADSKLLRQQQANQQQHIRSILTRRMGSIQGTSIPVTVFVGDSKRTCGLERDGGGARVQGGFTGDEERRG

SEQ ID NO: 22187 - protein, 90 aa, Arabidopsis thaliana
  peptide (1)..(90): Ceres Seq. ID no. 12335290
MKKEEVKVEIEDDSVLKISGERHVEKEEKQDTWHRVERSSGGFSRKFRLPENVKMDQVKASMENGVLTVTVPKVETNKKKAQVKSIDISG

SEQ ID NO: 22188 - DNA, 1155 bp, Arabidopsis thaliana
  misc_feature (1)..(1155): Ceres Seq. ID no. 12377359
  misc_feature (1)..(1155): Ortholog of  Ceres SEQ ID NO 13655519 as cited in SEQ ID NO 63335
atggtgatgagaaagctacagttaccgttgagccagacgcagaaggttaggtttgagagagcaatcgagcggcttcaatcactgtcgtcgtcggctaactctgacgcttctgttatcgtcaccgactctattcccgtcaaccatgacgatgccttcctcaagggacatggaacttccgaggtcgatggtgagttgctcgcgacggtctgtggagtagtggagcgtgtggataagcttgtctatgtacgcaccttgcgagccaggtacaagcctgaagttggggatattgtggtaggccgtgtcattgaggttgctcaaaaacgttggagagtggagctcaacttcaatcaggatggagtactgatgctttcttccatgaacatgcctgatggtattcagaggcgaagaacctctgtggatgaactcaatatgcggaatatctttgtagagcatgatgtcgtatgtgctgaagtacgcaactttcagcatgatggtagcttgcagttacaagccagaagtcagaagtatggcaagctcgagaagggacaacttctgaaggtcgatccttacttggttaagagaagcaaacatcactttcattacgtagaaagtcttgggattgatttgattattggctgcaatggtttcatatgggttggagaacatgtcgaagtgagagatcctatggcaatagatgatcagaaagatgaggaaatgatctcatcctcctccacaggaaaagagcaaagccatattccactcgagactcgacaaaccatatgcagaatcgggaatgcgatacgtgtcttgtctaatctaggcttcaccgtgacactagaagtaatcatggagactgttaacctcagtaactcaaagaatattgacatacatgatatgcttggatcagagtttcacgttgtggtagcagagaatgaagctgaaagaagacgtacaaagaggaaaaagtgaaaactacccctttttgtcactgatgtatcagagacttgtaacgtgtattagatcattcggtcttgtttgttactcagcttctattgaaagttcgaattttaatctgattgagatatgtagtatgatggatgtgtttgatactattaactgtacatcagattagattagtcgagttatgtcttttgg

SEQ ID NO: 22189 - protein, 322 aa, Arabidopsis thaliana
  peptide (1)..(322): Ceres Seq. ID no. 12377360
MVMRKLQLPLSQTQKVRFERAIERLQSLSSSANSDASVIVTDSIPVNHDDAFLKGHGTSEVDGELLATVCGVVERVDKLVYVRTLRARYKPEVGDIVVGRVIEVAQKRWRVELNFNQDGVLMLSSMNMPDGIQRRRTSVDELNMRNIFVEHDVVCAEVRNFQHDGSLQLQARSQKYGKLEKGQLLKVDPYLVKRSKHHFHYVESLGIDLIIGCNGFIWVGEHVEVRDPMAIDDQKDEEMISSSSTGKEQSHIPLETRQTICRIGNAIRVLSNLGFTVTLEVIMETVNLSNSKNIDIHDMLGSEFHVVVAENEAERRRTKRKK

SEQ ID NO: 22190 - protein, 320 aa, Arabidopsis thaliana
  peptide (1)..(320): Ceres Seq. ID no. 12377361
MRKLQLPLSQTQKVRFERAIERLQSLSSSANSDASVIVTDSIPVNHDDAFLKGHGTSEVDGELLATVCGVVERVDKLVYVRTLRARYKPEVGDIVVGRVIEVAQKRWRVELNFNQDGVLMLSSMNMPDGIQRRRTSVDELNMRNIFVEHDVVCAEVRNFQHDGSLQLQARSQKYGKLEKGQLLKVDPYLVKRSKHHFHYVESLGIDLIIGCNGFIWVGEHVEVRDPMAIDDQKDEEMISSSSTGKEQSHIPLETRQTICRIGNAIRVLSNLGFTVTLEVIMETVNLSNSKNIDIHDMLGSEFHVVVAENEAERRRTKRKK

SEQ ID NO: 22191 - protein, 201 aa, Arabidopsis thaliana
  peptide (1)..(201): Ceres Seq. ID no. 12377362
MLSSMNMPDGIQRRRTSVDELNMRNIFVEHDVVCAEVRNFQHDGSLQLQARSQKYGKLEKGQLLKVDPYLVKRSKHHFHYVESLGIDLIIGCNGFIWVGEHVEVRDPMAIDDQKDEEMISSSSTGKEQSHIPLETRQTICRIGNAIRVLSNLGFTVTLEVIMETVNLSNSKNIDIHDMLGSEFHVVVAENEAERRRTKRKK

SEQ ID NO: 22192 - DNA, 1115 bp, Arabidopsis thaliana
  misc_feature (1)..(1115): Ceres Seq. ID no. 12334730
  misc_feature (1)..(1115): Ortholog of  Ceres SEQ ID NO 12617197 as cited in SEQ ID NO 63406
  misc_feature (1)..(1115): Ortholog of  Ceres SEQ ID NO 13597804 as cited in SEQ ID NO 64182
  misc_feature (1)..(1115): Ortholog of  Ceres SEQ ID NO 13598565 as cited in SEQ ID NO 65250
  misc_feature (1)..(1115): Ortholog of  Ceres SEQ ID NO 13598597 as cited in SEQ ID NO 65496
  misc_feature (1)..(1115): Ortholog of  Ceres SEQ ID NO 13596284 as cited in SEQ ID NO 68273
aatcataacttaagccaacctagcaattataataaaagaaaattatgaacggcgaaggaaaggtggtttgcgtcaccggagcttccggatacatagcttcttggattgttaagcttttgctcctccgtggctacaccgtcagggccaccgtccgaaatccaatggatacaaagaaaacaaagcatcttcttacacttgaaggtgcaagtgaaagactaaaactgttcaaatcagatcttttggaagaaggttctttcgatcaagctatagagggatgcgacggtgtcttccatactgcctctccagtttcattcaccgttacagatcctcagactgagatgatcgatccggcggttaatggtactttgaacgttttgagaacgtgcgccaaagtttcttctgtgaagagggtcattgtaacatcgtccactgctgctactctttctattaacccaaacgacgtggtggacgaaaccgtcttcaccgatctaagtgtttacttagcgatgaaggcatggtatggatattcaaaaactttggctgaggaaacagcgtggcggtttgctaaagaaaacgggatcgatttggttgtaatgaatccaggaaacgtgatcgaaccagttttgcagccaactcttaattactctgtagaagtgattgtggatctgataaatggtaaaaacccttccaatagtttttactataggttcatggacgtgagagatgtttctcttgctcacatcaaagcgttcgaggtcccttctgctagtggcagatacatacttgctgatccagatgtaacaatgaaagacattcaaaagcttttacatgaactttttcctgatttgtgccgtgttgataaggataatgagaatgaggtgggtgaaatggcatacaaagtgtgtgtcgataaattgaaaagtttgggaattgagttcactcctatcaaagaatctctcaaggatactgttgttagccttaaggagaggtgtcttcttatatgatctttgacatggactccttgtcatatctttatttttcttgtgatttttaataataaatatgatgtctattgtctaagctttcacttaatgaaatatttgattataatcttc

SEQ ID NO: 22193 - protein, 319 aa, Arabidopsis thaliana
  peptide (1)..(319): Ceres Seq. ID no. 12334731
MNGEGKVVCVTGASGYIASWIVKLLLLRGYTVRATVRNPMDTKKTKHLLTLEGASERLKLFKSDLLEEGSFDQAIEGCDGVFHTASPVSFTVTDPQTEMIDPAVNGTLNVLRTCAKVSSVKRVIVTSSTAATLSINPNDVVDETVFTDLSVYLAMKAWYGYSKTLAEETAWRFAKENGIDLVVMNPGNVIEPVLQPTLNYSVEVIVDLINGKNPSNSFYYRFMDVRDVSLAHIKAFEVPSASGRYILADPDVTMKDIQKLLHELFPDLCRVDKDNENEVGEMAYKVCVDKLKSLGIEFTPIKESLKDTVVSLKERCLLI

SEQ ID NO: 22194 - protein, 280 aa, Arabidopsis thaliana
  peptide (1)..(280): Ceres Seq. ID no. 12334732
MDTKKTKHLLTLEGASERLKLFKSDLLEEGSFDQAIEGCDGVFHTASPVSFTVTDPQTEMIDPAVNGTLNVLRTCAKVSSVKRVIVTSSTAATLSINPNDVVDETVFTDLSVYLAMKAWYGYSKTLAEETAWRFAKENGIDLVVMNPGNVIEPVLQPTLNYSVEVIVDLINGKNPSNSFYYRFMDVRDVSLAHIKAFEVPSASGRYILADPDVTMKDIQKLLHELFPDLCRVDKDNENEVGEMAYKVCVDKLKSLGIEFTPIKESLKDTVVSLKERCLLI

SEQ ID NO: 22195 - protein, 221 aa, Arabidopsis thaliana
  peptide (1)..(221): Ceres Seq. ID no. 12334733
MIDPAVNGTLNVLRTCAKVSSVKRVIVTSSTAATLSINPNDVVDETVFTDLSVYLAMKAWYGYSKTLAEETAWRFAKENGIDLVVMNPGNVIEPVLQPTLNYSVEVIVDLINGKNPSNSFYYRFMDVRDVSLAHIKAFEVPSASGRYILADPDVTMKDIQKLLHELFPDLCRVDKDNENEVGEMAYKVCVDKLKSLGIEFTPIKESLKDTVVSLKERCLLI

SEQ ID NO: 22196 - DNA, 896 bp, Arabidopsis thaliana
  misc_feature (1)..(896): Ceres Seq. ID no. 12559164
  misc_feature (1)..(896): Ortholog of  Ceres SEQ ID NO 12473977 as cited in SEQ ID NO 133
  misc_feature (1)..(896): Ortholog of  Ceres SEQ ID NO 15225932 as cited in SEQ ID NO 60016
  misc_feature (1)..(896): Ortholog of  Ceres SEQ ID NO 12585294 as cited in SEQ ID NO 63023
gtcttttttcttttaacaaatcccaactttttccttgttgtttgttgttgctgaaactagaagatggatttgctaccatcaagatataagattcacaagacaaagttaagatggatcttaacaatgatgacgatgatgatgatgatggtgatgagaagaggagaatcaatgagattagatatggaatcaggtaacacaaaatgtatctccgatgacatcaaaacaaattacatgaccgttgggacttattccatcgtcaatcccaacgaaggtcaccatcttcctccttctcacaaactcttcgtcactgtgtcatctcctaaagggaaaagccatcatcatgcagagaatgtagagtccgggaaattcgtgtacacggcagaagaaaccggcgattacatgacgtgttttgtggctccaggttatagacctaccgcaaaattcgcggttgatttcgagtggaaaagcggtgttgaggctaaagattggaccactatcgccaagagaggccaaataaccatgctggaggtggaggtgaggaagctactcgacgtgacagaaactatacatgaagaaatgtttcagctccgagagagggaacgggaaatgcaagagttaaaccgatcaacgaattcaagaatggcagctctcagtttactgtcgttcgtggtaacaatgtcggtcgcgggtttacaactatggcacctcaagtcattcttggagaggaagaagctcctctgatcaaacttgttgcttcgattacttttaaacagattttgatgcttatacttacttaaccaatcaatagtcttcatcttgaattttgagaaactaaaatagcaaattttgcttagaccaaagtcaagatcatatatttgcactagtttgttctctgc

SEQ ID NO: 22197 - protein, 225 aa, Arabidopsis thaliana
  peptide (1)..(225): Ceres Seq. ID no. 12559165
MDLLPSRYKIHKTKLRWILTMMTMMMMMVMRRGESMRLDMESGNTKCISDDIKTNYMTVGTYSIVNPNEGHHLPPSHKLFVTVSSPKGKSHHHAENVESGKFVYTAEETGDYMTCFVAPGYRPTAKFAVDFEWKSGVEAKDWTTIAKRGQITMLEVEVRKLLDVTETIHEEMFQLREREREMQELNRSTNSRMAALSLLSFVVTMSVAGLQLWHLKSFLERKKLL

SEQ ID NO: 22198 - protein, 205 aa, Arabidopsis thaliana
  peptide (1)..(205): Ceres Seq. ID no. 12559166
MMTMMMMMVMRRGESMRLDMESGNTKCISDDIKTNYMTVGTYSIVNPNEGHHLPPSHKLFVTVSSPKGKSHHHAENVESGKFVYTAEETGDYMTCFVAPGYRPTAKFAVDFEWKSGVEAKDWTTIAKRGQITMLEVEVRKLLDVTETIHEEMFQLREREREMQELNRSTNSRMAALSLLSFVVTMSVAGLQLWHLKSFLERKKLL

SEQ ID NO: 22199 - protein, 204 aa, Arabidopsis thaliana
  peptide (1)..(204): Ceres Seq. ID no. 12559167
MTMMMMMVMRRGESMRLDMESGNTKCISDDIKTNYMTVGTYSIVNPNEGHHLPPSHKLFVTVSSPKGKSHHHAENVESGKFVYTAEETGDYMTCFVAPGYRPTAKFAVDFEWKSGVEAKDWTTIAKRGQITMLEVEVRKLLDVTETIHEEMFQLREREREMQELNRSTNSRMAALSLLSFVVTMSVAGLQLWHLKSFLERKKLL

SEQ ID NO: 22200 - DNA, 1164 bp, Arabidopsis thaliana
  misc_feature (1)..(1164): Ceres Seq. ID no. 13497612
  misc_feature (1)..(1164): Ortholog of  Ceres SEQ ID NO 12784064 as cited in SEQ ID NO 66982
  misc_feature (1)..(1164): Ortholog of  Ceres SEQ ID NO 15177907 as cited in SEQ ID NO 0
catcgctgtctggaagagctcggttcgagtcatcgctgtctggaacagcgatgactcgagaaccgatctcctccctctctctcttaaccactaagcaaaaatcccatctttctatataaacctctctcccaactctgctacttcccaccgtaaatcgtttctgggttcttaagaataacatggcctcgtcatcatcatcatcttatagattccaatctgggtcttaccctctttcgtcaagtccttctcttgggaatttcgtcgaacgcattaaagacgcttgtcatttccttgtctctgctgttttgggtaccattatctccgcgatcttgaccttcttcttcgcactagtgggcacattgctaggggcacttacaggagctttgataggtcaagaaactgagagtggtttcattagaggagcagcaattggagccatttcgggagctgttttctctatcgaggtctttgaatcatctctggatctctggaaatccgatgagtcgggtttcggatgttttctctacttgattgatgtcattgttagtcttctaagcgggagacttgtacgagagcgcattggtcctgcaatgctaagtgcagtgcaaagtcaaatgggagctgtggatacagcttttgatgatcacacaagcctttttgatacaggaggctcaaaaggattgacaggagaccttgttgagaaaatcccaaagatgacaatcactggcaacaataacactgatgcttctgagaacacagactcatgttctgtttgtcttcaggatttccagctcggtgaaacagttagaagcttgcctcattgtcatcacatgtttcacttaccttgcatagacaattggctccttagacacggttcttgcccgatgtgtagacgtgatatttaatctcttcatctctccatcgtccgtctctcataatgcagtttaacctcgcagttcagatatttctacagctcgtacatcaagagtctgctctgctcttcttccctcctccttgagtttcatgtaaattccagttcttttggctgtttacaattacgatacctctcttactctttcagagtcattgtaggactcctagttctctaatgtacaaagaaacacaaaaatagagtttttgttttatctaattctttactctggc

SEQ ID NO: 22201 - protein, 241 aa, Arabidopsis thaliana
  peptide (1)..(241): Ceres Seq. ID no. 13497613
MASSSSSSYRFQSGSYPLSSSPSLGNFVERIKDACHFLVSAVLGTIISAILTFFFALVGTLLGALTGALIGQETESGFIRGAAIGAISGAVFSIEVFESSLDLWKSDESGFGCFLYLIDVIVSLLSGRLVRERIGPAMLSAVQSQMGAVDTAFDDHTSLFDTGGSKGLTGDLVEKIPKMTITGNNNTDASENTDSCSVCLQDFQLGETVRSLPHCHHMFHLPCIDNWLLRHGSCPMCRRDI

SEQ ID NO: 22202 - DNA, 1305 bp, Arabidopsis thaliana
  misc_feature (1)..(1305): Ceres Seq. ID no. 12334870
  misc_feature (1)..(1305): Ortholog of  Ceres SEQ ID NO 15224874 as cited in SEQ ID NO 55015
atagtttcgtgtggacctaactaaaactagtcgtaactcattcatggaggctttgttctgctctgagatacccaacaacaacatcagatcttccattaacgatctatcttcttcttcttcatatacatggccaatgatcatgacctcctcttcttcttcttcttcatctcccacaatcatgaacatagagaacattcctagatgcgactgggatctctctctttccgccgttgtttcctccgcatccaccggatcagacgctatcggagcaatcgagttcgaccctaccggagagatcatagctacgggaggaatcgcaagaaagatcagatcgtatcgtttaagctctttgttagagtcacgtgacgatcacgtaacagcttcagagagctgtatttgcacgccggcgaagcttagtagtctcaaatggagacccgatttttccggtcgggttatcgggtcaggagattacgacggagttgtcaccgagtacgacgtggagaaacaagtgcctgtttccgagagagacgagcatggaggtagaaggatttggagcgtggactacacgctttacaatggctctcttctaggcgcgtcaggctccgacgacggaacggttcaaatgtgggatccacgtaacggagggacgttagaagaaacggttaggcccggtggtggagcggcgatttgttcggtagagttcgatccgttcggtggatcttccatagccgttggatgtgctgaccagaatgcctacgtgtatgacatcagaagactagtggaccctttgatcgtattagacggccataccaaaacggtgacgtatgctcgattcatggattctcacacgatcgttaccggttcgaccgacgggagcttgaagcaatgggatatagataatggacggcgcgtggttcgcacgtaccgagggcatgtgaatagccggaactttgttgggttgtcggtttggagacatggtggtttggtcgtgtccgggtcagagaataaccaagtgtttgtgtacgataagaggtgggaggaaccggtttgggtttgtggattgggtcatacgaaccggtttggatctgaccgacggtttgttagtagtgtgtgtttgagacaagtggatgaagattggtgcacacttgtggccggaggatccgatggggctttagaaattttctcgggcaaacagagctaatcagtatttatattatttttttctgctcatgattaatacaaactgtttttcagttgattttatactgtctatagttattaattttaatatgattgaatgttact

SEQ ID NO: 22203 - protein, 385 aa, Arabidopsis thaliana
  peptide (1)..(385): Ceres Seq. ID no. 12334871
MEALFCSEIPNNNIRSSINDLSSSSSYTWPMIMTSSSSSSSSPTIMNIENIPRCDWDLSLSAVVSSASTGSDAIGAIEFDPTGEIIATGGIARKIRSYRLSSLLESRDDHVTASESCICTPAKLSSLKWRPDFSGRVIGSGDYDGVVTEYDVEKQVPVSERDEHGGRRIWSVDYTLYNGSLLGASGSDDGTVQMWDPRNGGTLEETVRPGGGAAICSVEFDPFGGSSIAVGCADQNAYVYDIRRLVDPLIVLDGHTKTVTYARFMDSHTIVTGSTDGSLKQWDIDNGRRVVRTYRGHVNSRNFVGLSVWRHGGLVVSGSENNQVFVYDKRWEEPVWVCGLGHTNRFGSDRRFVSSVCLRQVDEDWCTLVAGGSDGALEIFSGKQS

SEQ ID NO: 22204 - protein, 355 aa, Arabidopsis thaliana
  peptide (1)..(355): Ceres Seq. ID no. 12334872
MIMTSSSSSSSSPTIMNIENIPRCDWDLSLSAVVSSASTGSDAIGAIEFDPTGEIIATGGIARKIRSYRLSSLLESRDDHVTASESCICTPAKLSSLKWRPDFSGRVIGSGDYDGVVTEYDVEKQVPVSERDEHGGRRIWSVDYTLYNGSLLGASGSDDGTVQMWDPRNGGTLEETVRPGGGAAICSVEFDPFGGSSIAVGCADQNAYVYDIRRLVDPLIVLDGHTKTVTYARFMDSHTIVTGSTDGSLKQWDIDNGRRVVRTYRGHVNSRNFVGLSVWRHGGLVVSGSENNQVFVYDKRWEEPVWVCGLGHTNRFGSDRRFVSSVCLRQVDEDWCTLVAGGSDGALEIFSGKQS

SEQ ID NO: 22205 - protein, 353 aa, Arabidopsis thaliana
  peptide (1)..(353): Ceres Seq. ID no. 12334873
MTSSSSSSSSPTIMNIENIPRCDWDLSLSAVVSSASTGSDAIGAIEFDPTGEIIATGGIARKIRSYRLSSLLESRDDHVTASESCICTPAKLSSLKWRPDFSGRVIGSGDYDGVVTEYDVEKQVPVSERDEHGGRRIWSVDYTLYNGSLLGASGSDDGTVQMWDPRNGGTLEETVRPGGGAAICSVEFDPFGGSSIAVGCADQNAYVYDIRRLVDPLIVLDGHTKTVTYARFMDSHTIVTGSTDGSLKQWDIDNGRRVVRTYRGHVNSRNFVGLSVWRHGGLVVSGSENNQVFVYDKRWEEPVWVCGLGHTNRFGSDRRFVSSVCLRQVDEDWCTLVAGGSDGALEIFSGKQS

SEQ ID NO: 22206 - DNA, 1087 bp, Arabidopsis thaliana
  misc_feature (1)..(1087): Ceres Seq. ID no. 12327341
  misc_feature (1)..(1087): Ortholog of  Ceres SEQ ID NO 15224625 as cited in SEQ ID NO 1390
  misc_feature (1)..(1087): Ortholog of  Ceres SEQ ID NO 13581868 as cited in SEQ ID NO 52227
  misc_feature (1)..(1087): Ortholog of  Ceres SEQ ID NO 14306339 as cited in SEQ ID NO 0
actctctttcttcttcattcatcattctcacttaagtttcccagaaaataaaagagctatgaagtttggtaagagtctcagcaatcagatcgagcaaactcttcctgaatggcaagacaagttcttgtcttacaaagaactcaaaaaacgactcaaactcatcggttccaaaaccgccgatcgtcccgttaaacgactccgtttagatgagttttccgtcggaatatcgaaagaagagatcaatttcatccaattgttagaagacgagttggagaaattcaacaatttcttcgttgagaaggaagaagaatatatcatcagactaaaggaatttagagatagaattgcgaaagctaaggattcaatggagaagatgataaaaatcaggaaggagattgttgatttccatggagaaatggttcttcttgagaattacagtgctcttaattacactggattggttaagatactgaagaagtatgacaaaagaactggtgatctcatgcgtttacctttcatccagaaagttcttcagcaacctttttacactactgacttattgttcaagcttgtcaaggaatctgaggcaatgcttgatcagatcttccctgctaacgaaactgagtctgagattatccaagcagagttatcagagcataagttcatggagagtcttcatatgaagagcacaatcgctgccttgcgggttttgaaggagatcaggagtggaagttctactgttagtgtgttttcattgccgcctctacagttaaatggcttagatgagacatggaagaagattccattgttggagcaagaagccaaatagagagtgagacagaggcacactcgctctattccacttttttatacaatagaagaagctaacagattaaacaagacattatcatcaatgtacacaaaaaggcagaagaaactataggatcatgtttctggatatcatctttggtcggtcataagtccttaggttacacaaaactgcaatgtaactttgtttctgtgttgggtgtgttgtagttgatgtaatatataccacttcagattaattattgatttcttcttttcc

SEQ ID NO: 22207 - protein, 275 aa, Arabidopsis thaliana
  peptide (1)..(275): Ceres Seq. ID no. 12327342
LSFFFIHHSHLSFPENKRAMKFGKSLSNQIEQTLPEWQDKFLSYKELKKRLKLIGSKTADRPVKRLRLDEFSVGISKEEINFIQLLEDELEKFNNFFVEKEEEYIIRLKEFRDRIAKAKDSMEKMIKIRKEIVDFHGEMVLLENYSALNYTGLVKILKKYDKRTGDLMRLPFIQKVLQQPFYTTDLLFKLVKESEAMLDQIFPANETESEIIQAELSEHKFMESLHMKSTIAALRVLKEIRSGSSTVSVFSLPPLQLNGLDETWKKIPLLEQEAK

SEQ ID NO: 22208 - protein, 256 aa, Arabidopsis thaliana
  peptide (1)..(256): Ceres Seq. ID no. 12327343
MKFGKSLSNQIEQTLPEWQDKFLSYKELKKRLKLIGSKTADRPVKRLRLDEFSVGISKEEINFIQLLEDELEKFNNFFVEKEEEYIIRLKEFRDRIAKAKDSMEKMIKIRKEIVDFHGEMVLLENYSALNYTGLVKILKKYDKRTGDLMRLPFIQKVLQQPFYTTDLLFKLVKESEAMLDQIFPANETESEIIQAELSEHKFMESLHMKSTIAALRVLKEIRSGSSTVSVFSLPPLQLNGLDETWKKIPLLEQEAK

SEQ ID NO: 22209 - protein, 154 aa, Arabidopsis thaliana
  peptide (1)..(154): Ceres Seq. ID no. 12327344
MEKMIKIRKEIVDFHGEMVLLENYSALNYTGLVKILKKYDKRTGDLMRLPFIQKVLQQPFYTTDLLFKLVKESEAMLDQIFPANETESEIIQAELSEHKFMESLHMKSTIAALRVLKEIRSGSSTVSVFSLPPLQLNGLDETWKKIPLLEQEAK

SEQ ID NO: 22210 - DNA, 1468 bp, Arabidopsis thaliana
  misc_feature (1)..(1468): Ceres Seq. ID no. 13499872
  misc_feature (1)..(1468): Ortholog of  Ceres SEQ ID NO 14316165 as cited in SEQ ID NO 52560
  misc_feature (1)..(1468): Ortholog of  Ceres SEQ ID NO 13597076 as cited in SEQ ID NO 63571
atacgcaaacaaagtctcttcctttacccgtctacacgttcgaattttttctccgggtcgggtcaatgtcaagaacgacgagaattgtatataatcgtcgattcacgtggccgggtttatcatttactgctggatctcgttttcaattttgagtcagattccccccaattgagagattctagggttttaagatgattgaacatgggaactctacctttgattaccggagtattagagaagtcgctgcaaacgccggcgccggagccaccgcaggggctatcgcggcgacttttgtttgtccattagatgtgatcaaaacaaggttacaggttcttggtctccctgaagctccagcctctggtcaaagaggtggtgtaatcattacaagtctgaagaatataattaaggaagaaggttataggggaatgtatcgagggctttcaccaaccatcatagctctccttccaaattgggctgtctacttctcagtttatgggaagctaaaggatgtgctgcagtcaagtgatggcaagcttagtattgggtcaaacatgatagctgcagctggtgctggagctgccacatctattgcaactaatccgctttgggttgtcaagacaagattaatgacgcaaggaattaggcctggtgtggtaccttacaaaagtgtaatgtctgcatttagtaggatttgtcatgaagaaggagtgcgagggttgtacagtggcatattgccttctttggcgggagtaagccatgtcgcgatccagtttccagcttatgaaaaaattaagcaatacatggcaaagatggataatacatccgtggagaatctgagtcctgggaatgttgctattgcctcctccatcgcgaaagtgatcgcctctattttgacttacccacacgaggtaattagggcgaagcttcaagaacaagggcagattagaaatgctgagactaagtattcaggagtcattgattgcatcacaaaggtgttcagaagcgaagggattcctgggttgtaccgtggatgtgccactaatctactgaggacaactccatcagcagttattacatttacaacctatgagatgatgcttaggtttttccgacaagttgtgccaccagagactaataggtcggatgatcgcagaagagaagaagaaagaaagaatttagttagccgacgaggagaagaagaagataaagatttgggtttgagagaatcacaaactcaatctaataagatcagcactccccatatccctcttggaagcaaataaaactttttcagactcaagccatgcttcataggttttctttttttcgatgccatgttccaactacgtaatttttccccatgcggtgattgagttgtaaccttttctcgtggttctaacaaatgtgtaaactatcaataaactactttttggcccttttgatgatcagtgagtatttgaagatcgtg

SEQ ID NO: 22211 - protein, 363 aa, Arabidopsis thaliana
  peptide (1)..(363): Ceres Seq. ID no. 13499873
MIEHGNSTFDYRSIREVAANAGAGATAGAIAATFVCPLDVIKTRLQVLGLPEAPASGQRGGVIITSLKNIIKEEGYRGMYRGLSPTIIALLPNWAVYFSVYGKLKDVLQSSDGKLSIGSNMIAAAGAGAATSIATNPLWVVKTRLMTQGIRPGVVPYKSVMSAFSRICHEEGVRGLYSGILPSLAGVSHVAIQFPAYEKIKQYMAKMDNTSVENLSPGNVAIASSIAKVIASILTYPHEVIRAKLQEQGQIRNAETKYSGVIDCITKVFRSEGIPGLYRGCATNLLRTTPSAVITFTTYEMMLRFFRQVVPPETNRSDDRRREEERKNLVSRRGEEEDKDLGLRESQTQSNKISTPHIPLGSK

SEQ ID NO: 22212 - protein, 285 aa, Arabidopsis thaliana
  peptide (1)..(285): Ceres Seq. ID no. 13499874
MYRGLSPTIIALLPNWAVYFSVYGKLKDVLQSSDGKLSIGSNMIAAAGAGAATSIATNPLWVVKTRLMTQGIRPGVVPYKSVMSAFSRICHEEGVRGLYSGILPSLAGVSHVAIQFPAYEKIKQYMAKMDNTSVENLSPGNVAIASSIAKVIASILTYPHEVIRAKLQEQGQIRNAETKYSGVIDCITKVFRSEGIPGLYRGCATNLLRTTPSAVITFTTYEMMLRFFRQVVPPETNRSDDRRREEERKNLVSRRGEEEDKDLGLRESQTQSNKISTPHIPLGSK

SEQ ID NO: 22213 - protein, 243 aa, Arabidopsis thaliana
  peptide (1)..(243): Ceres Seq. ID no. 13499875
MIAAAGAGAATSIATNPLWVVKTRLMTQGIRPGVVPYKSVMSAFSRICHEEGVRGLYSGILPSLAGVSHVAIQFPAYEKIKQYMAKMDNTSVENLSPGNVAIASSIAKVIASILTYPHEVIRAKLQEQGQIRNAETKYSGVIDCITKVFRSEGIPGLYRGCATNLLRTTPSAVITFTTYEMMLRFFRQVVPPETNRSDDRRREEERKNLVSRRGEEEDKDLGLRESQTQSNKISTPHIPLGSK

SEQ ID NO: 22214 - DNA, 1430 bp, Arabidopsis thaliana
  misc_feature (1)..(1430): Ceres Seq. ID no. 13487695
  misc_feature (1)..(1430): Ortholog of  Ceres SEQ ID NO 15177291 as cited in SEQ ID NO 52286
  misc_feature (1)..(1430): Ortholog of  Ceres SEQ ID NO 13595164 as cited in SEQ ID NO 56222
  misc_feature (1)..(1430): Ortholog of  Ceres SEQ ID NO 13591068 as cited in SEQ ID NO 69043
  misc_feature (1)..(1430): Ortholog of  Ceres SEQ ID NO 13623041 as cited in SEQ ID NO 0
tggatgcaatgtatttgtctcgttttctcatccatttatatgattgctttcttctccacctcaccaatcactcctcctctaaacttttcttcactctcttgtctcttcaaacttcggttactccgttttagtcgacaacaatggcctctgtttcaaggaggttactgaggagagagacgatcccctgtttcagccacaccgtgaggaaactcttctccaccgttggatctccttcttttgctcagagactcagagatctccccaaagacttcccctctaccaacgccaaacgtgacgcctctctgcttattgggaaaacgcctcttgtgttcctcaacaaagtcactgaaggttgtgaagcgtatgttgcagccaaacaagaacatttccagccaacttgtagcattaaagacagaccagctatagccatgattgcagatgcagagaagaaaaaactaatcatccctggaaaaacaacactgatagagcctacttcaggaaacatgggaatcagtttggctttcatggctgctatgaaagggtacaggattataatgacgatgccttcgtacactagcttggagaggagagtgacgatgagatcctttggtgctgagcttgttctcactgatccagccaaaggaatgggtggaactgttaagaaagcttatgacctccttgatagtactcctgatgctttcatgtgtcaacagtttgctaatcctgcaaacactcagattcattttgatacaactggtcctgagatttgggaagatacacttggaaatgttgatatatttgtgatgggaattggcagtggaggcacagtctctggtgttggccgataccttaaatctaaaaaccccaatgtcaagatatatggagtggagcctgctgaaagcaacatactcaacggtggcaaaccaggtccacatgctatcacaggcaatggtgttggattcaaaccagaaatcttggatatggatgttatggagagtgttcttgaggttagtagtgaggatgctataaagatggctagagaattggcattgaaagaaggtctcatggttgggatatcgtcgggagctaacaccgtggcagcaattagactggcgaaaatgccagagaataaaggcaaactcattgtgacaattcatgcgagcttcggagaaagatatctgtcgtctgttctgtttgatgagctgaggaaagaagcagaggagatgaagccagtttcagtggattgatgaaggaagactgacactttaccaaaaatctcgggagcaaaagattataaaaagaaagatgtaagagtaataagtttgtgtttatattgttctattgttgatgtataatataatcacagtattgttgatgttgatcttggatattgaagatccaactaaataaagttcatcattttctgtttc

SEQ ID NO: 22215 - protein, 368 aa, Arabidopsis thaliana
  peptide (1)..(368): Ceres Seq. ID no. 13487696
MASVSRRLLRRETIPCFSHTVRKLFSTVGSPSFAQRLRDLPKDFPSTNAKRDASLLIGKTPLVFLNKVTEGCEAYVAAKQEHFQPTCSIKDRPAIAMIADAEKKKLIIPGKTTLIEPTSGNMGISLAFMAAMKGYRIIMTMPSYTSLERRVTMRSFGAELVLTDPAKGMGGTVKKAYDLLDSTPDAFMCQQFANPANTQIHFDTTGPEIWEDTLGNVDIFVMGIGSGGTVSGVGRYLKSKNPNVKIYGVEPAESNILNGGKPGPHAITGNGVGFKPEILDMDVMESVLEVSSEDAIKMARELALKEGLMVGISSGANTVAAIRLAKMPENKGKLIVTIHASFGERYLSSVLFDELRKEAEEMKPVSVD

SEQ ID NO: 22216 - protein, 272 aa, Arabidopsis thaliana
  peptide (1)..(272): Ceres Seq. ID no. 13487697
MIADAEKKKLIIPGKTTLIEPTSGNMGISLAFMAAMKGYRIIMTMPSYTSLERRVTMRSFGAELVLTDPAKGMGGTVKKAYDLLDSTPDAFMCQQFANPANTQIHFDTTGPEIWEDTLGNVDIFVMGIGSGGTVSGVGRYLKSKNPNVKIYGVEPAESNILNGGKPGPHAITGNGVGFKPEILDMDVMESVLEVSSEDAIKMARELALKEGLMVGISSGANTVAAIRLAKMPENKGKLIVTIHASFGERYLSSVLFDELRKEAEEMKPVSVD

SEQ ID NO: 22217 - protein, 247 aa, Arabidopsis thaliana
  peptide (1)..(247): Ceres Seq. ID no. 13487698
MGISLAFMAAMKGYRIIMTMPSYTSLERRVTMRSFGAELVLTDPAKGMGGTVKKAYDLLDSTPDAFMCQQFANPANTQIHFDTTGPEIWEDTLGNVDIFVMGIGSGGTVSGVGRYLKSKNPNVKIYGVEPAESNILNGGKPGPHAITGNGVGFKPEILDMDVMESVLEVSSEDAIKMARELALKEGLMVGISSGANTVAAIRLAKMPENKGKLIVTIHASFGERYLSSVLFDELRKEAEEMKPVSVD

SEQ ID NO: 22218 - DNA, 1443 bp, Arabidopsis thaliana
  misc_feature (1)..(1443): Ceres Seq. ID no. 12371389
  misc_feature (1)..(1443): Ortholog of  Ceres SEQ ID NO 13639645 as cited in SEQ ID NO 57488
gtcctaggaagagcacaagcctccacaagtggtgttgcctctctgttcctaactcctttctcttatataaaattgtgtatcctccatacatacaacaaagagagaaacttttgatatggggttaaagatgtcagaatcagccaagccttactttgcaatggtttgtcttcaattcggatacgccggcatgaacctcgtgacgaaggttgtgctagaccgcggcatgagccattacgtccttgtggcttaccgtaatgcctttgccacggctgctatcgcaccttttgctctactctccgagaggaaagtgaggccgaagatgacatttccaatattcatgcagatttttgttctagctcttctcgggcctttgatcgatcaaaacttatattacgcctgtctcaaacttacttcaccaacttttgccgggcgcagtcacaaatatcgttccagctttgacctttatcatttccataatttgcaggatggagaaggtggagatgagaaaagtaagattccaagcaaaagtggtggggacattagtgatagtggttggagccatgttgatgattttattcaaaattcctctaatcacctttctccgatctcacctcaccggccatgctttgtcgccggcaggtgaggactacctcaaagccaccgtcttcctcctcatcgcctcattttcttgggcttcctttttcgttcttcaggcggctacgttgaagagatactcatctcacctttcattatcgacgatggtgtgtttcatgggcacgttacagtccacagccttaacgtttgtgatggagccaaacctttctgcatggaacattggctttgacatgaaccttcttgcctctgcttatgcgggcataatgtcgtcgagcatagcgtactacgttcaaggaatgatgacgaagcaaaagagtgttatctttgttactgcttttaatcctcttgttgtcataatcggatccatcattggcttcctcatcctcaaccaaactttaaaccttggcggggttcttggaatggcaattttagtggtgggagtttgcacggttctttggggaaaggaaggagatatcgatgaagaagagaacattgaggagaagtttgtagaaattgtcaagtgttgcaaccgctgcgatatcaaggttctctcgatgatgccaagaatcgatgaggaagtagacgttgaaatgcaatccgcaggaacagctaaagtggcggtgggtttctcgtaacctctcgtgtgtggaaaaagatgttcacgaccttaattagatcttttcaagtcttttttttttaacaaaattttagatagaggagcaactttttctttgttctatatcattgctccaactttttattttctttgtaggttttgttttataatcttcattagaagggtaattattattattaaataaatgttcc

SEQ ID NO: 22219 - protein, 254 aa, Arabidopsis thaliana
  peptide (1)..(254): Ceres Seq. ID no. 12371390
MEKVEMRKVRFQAKVVGTLVIVVGAMLMILFKIPLITFLRSHLTGHALSPAGEDYLKATVFLLIASFSWASFFVLQAATLKRYSSHLSLSTMVCFMGTLQSTALTFVMEPNLSAWNIGFDMNLLASAYAGIMSSSIAYYVQGMMTKQKSVIFVTAFNPLVVIIGSIIGFLILNQTLNLGGVLGMAILVVGVCTVLWGKEGDIDEEENIEEKFVEIVKCCNRCDIKVLSMMPRIDEEVDVEMQSAGTAKVAVGFS

SEQ ID NO: 22220 - protein, 249 aa, Arabidopsis thaliana
  peptide (1)..(249): Ceres Seq. ID no. 12371391
MRKVRFQAKVVGTLVIVVGAMLMILFKIPLITFLRSHLTGHALSPAGEDYLKATVFLLIASFSWASFFVLQAATLKRYSSHLSLSTMVCFMGTLQSTALTFVMEPNLSAWNIGFDMNLLASAYAGIMSSSIAYYVQGMMTKQKSVIFVTAFNPLVVIIGSIIGFLILNQTLNLGGVLGMAILVVGVCTVLWGKEGDIDEEENIEEKFVEIVKCCNRCDIKVLSMMPRIDEEVDVEMQSAGTAKVAVGFS

SEQ ID NO: 22221 - protein, 229 aa, Arabidopsis thaliana
  peptide (1)..(229): Ceres Seq. ID no. 12371392
MLMILFKIPLITFLRSHLTGHALSPAGEDYLKATVFLLIASFSWASFFVLQAATLKRYSSHLSLSTMVCFMGTLQSTALTFVMEPNLSAWNIGFDMNLLASAYAGIMSSSIAYYVQGMMTKQKSVIFVTAFNPLVVIIGSIIGFLILNQTLNLGGVLGMAILVVGVCTVLWGKEGDIDEEENIEEKFVEIVKCCNRCDIKVLSMMPRIDEEVDVEMQSAGTAKVAVGFS

SEQ ID NO: 22222 - DNA, 1134 bp, Arabidopsis thaliana
  misc_feature (1)..(1134): Ceres Seq. ID no. 13488094
  misc_feature (1)..(1134): Ortholog of  Ceres SEQ ID NO 12562983 as cited in SEQ ID NO 53309
  misc_feature (1)..(1134): Ortholog of  Ceres SEQ ID NO 14309224 as cited in SEQ ID NO 0
acaccttctctgcaaaaacaaaagatttccacttttcttaaaaatggcgtccatgaaacacgttcatcttttccgtcgttatctctcaatcgttttcactctctttcaacgcttaatttcatgtttcttcgattttccgatactgatcaaaatcgcagattcgttcttatctctgtatttcttagttttctgcgatctccgacccgtaaccgtcgatctagacgacggagaaaccacagtccatttctggatctccggccaccgtagaatctctcggcagaatctcgtcatgctccatggatacggaggaaactccaaatggcaattcgttcatcaagtctcggatctctcgaaatcgtttaatctcttcatccccgatttggtcttcttcggaaaatcgtattcgaagaatagagatcggagcgttgagattcaggcgaggagcgtcgtcggaggattgaagaaactgggatgcgttgaaggaggaggaggaatatcgatttattcgattagttacggtggatttgtggcgtataaaatggcggagatttggccggcgatggttgagaaattggtgattgtgagtagtggagtgggatttacacagcagcagaagacggcagaattgaaaaaacacggcggagattgttcgaagattttagttccgaaaactccgatggatctacggttgctgattaagatatctatgaatactggtttaacgttcgtcgattgggttccagactttttcctttcccaattcatcgctgtaatgtatgagaaaaatcggcaggagcttcttgagctagctaagaatttgttggaacgagaggaggaaccagaattgcctgtaatatcccagaaaacgttaatcgtttggggagacaaggacaaggtgtttcccttggagcatgcttatcggctgcaaaggcatttacagagttcaagattagagataataaaggaaacaggacacgctgttaacattgaagcaccaactactcttaataattttattacttcgtttgtcttaagtgcttgatttctatttttgtatatacttcttcttcatataaatatctatatgcatttgatttaagtgtatatatagttgacatcatttaacatatcatc

SEQ ID NO: 22223 - protein, 346 aa, Arabidopsis thaliana
  peptide (1)..(346): Ceres Seq. ID no. 13488095
HLLCKNKRFPLFLKMASMKHVHLFRRYLSIVFTLFQRLISCFFDFPILIKIADSFLSLYFLVFCDLRPVTVDLDDGETTVHFWISGHRRISRQNLVMLHGYGGNSKWQFVHQVSDLSKSFNLFIPDLVFFGKSYSKNRDRSVEIQARSVVGGLKKLGCVEGGGGISIYSISYGGFVAYKMAEIWPAMVEKLVIVSSGVGFTQQQKTAELKKHGGDCSKILVPKTPMDLRLLIKISMNTGLTFVDWVPDFFLSQFIAVMYEKNRQELLELAKNLLEREEEPELPVISQKTLIVWGDKDKVFPLEHAYRLQRHLQSSRLEIIKETGHAVNIEAPTTLNNFITSFVLSA

SEQ ID NO: 22224 - protein, 332 aa, Arabidopsis thaliana
  peptide (1)..(332): Ceres Seq. ID no. 13488096
MASMKHVHLFRRYLSIVFTLFQRLISCFFDFPILIKIADSFLSLYFLVFCDLRPVTVDLDDGETTVHFWISGHRRISRQNLVMLHGYGGNSKWQFVHQVSDLSKSFNLFIPDLVFFGKSYSKNRDRSVEIQARSVVGGLKKLGCVEGGGGISIYSISYGGFVAYKMAEIWPAMVEKLVIVSSGVGFTQQQKTAELKKHGGDCSKILVPKTPMDLRLLIKISMNTGLTFVDWVPDFFLSQFIAVMYEKNRQELLELAKNLLEREEEPELPVISQKTLIVWGDKDKVFPLEHAYRLQRHLQSSRLEIIKETGHAVNIEAPTTLNNFITSFVLSA

SEQ ID NO: 22225 - protein, 329 aa, Arabidopsis thaliana
  peptide (1)..(329): Ceres Seq. ID no. 13488097
MKHVHLFRRYLSIVFTLFQRLISCFFDFPILIKIADSFLSLYFLVFCDLRPVTVDLDDGETTVHFWISGHRRISRQNLVMLHGYGGNSKWQFVHQVSDLSKSFNLFIPDLVFFGKSYSKNRDRSVEIQARSVVGGLKKLGCVEGGGGISIYSISYGGFVAYKMAEIWPAMVEKLVIVSSGVGFTQQQKTAELKKHGGDCSKILVPKTPMDLRLLIKISMNTGLTFVDWVPDFFLSQFIAVMYEKNRQELLELAKNLLEREEEPELPVISQKTLIVWGDKDKVFPLEHAYRLQRHLQSSRLEIIKETGHAVNIEAPTTLNNFITSFVLSA

SEQ ID NO: 22226 - DNA, 1558 bp, Arabidopsis thaliana
  misc_feature (1)..(1558): Ceres Seq. ID no. 13487458
  misc_feature (1)..(1558): Ortholog of  Ceres SEQ ID NO 14302734 as cited in SEQ ID NO 66748
ttttagttatttatatatatattctctgtctcgtatttgtccccaaaaatctagggttttaaggtttcttatccttcctcttcctccgccagattcttttcttgcgaagatgagcaacgacaaggacagcatgaacatgtccgatctctccaccgctcttaacgaggaggatcgtgccgggcttgttaatgctcttaagaacaagttgcagaatttggctggacaacactctgatgtccttgaaaacttgactccaccagtcaggaagcgtgtcgagtttctaagagagattcagaaccaatatgatgagatggaagcaaaattctttgaggagagagcagctcttgaagctaagtatcaaaagttatatcagcctttatataccaagcgatatgagattgtgaatggtgtggtcgaagttgaaggtgcagctgaagaagtaaaatccgaacaaggagaagataaatcagctgaagagaaaggagtaccagatttctggcttattgcattgaagaacaatgaaattactgcggaagagataactgagcgagatgaaggggctctcaagtatctcaaagatatcaagtggagtagggttgaagaaccaaaagggttcaagcttgagtttttctttgatcagaatccttacttcaagaacactgtcttgaccaagacatatcacatgattgatgaagatgagcctatccttgagaaggccctcgggacggagattgagtggtatcctggaaagtgtttgacacagaagattctaaaaaagaagccaaagaaaggatccaaaaacacaaagccgatcactaagactgaggactgtgagagtttcttcaactttttcagtccacctcaagttcctgacgatgatgaggatcttgatgatgacatggctgatgaactccaaggacaaatggagcatgattatgatatcggttcaacaatcaaagagaaaatcatctcgcatgctgtgtcatggttcactggtgaagctgttgaggcagatgaccttgatattgaggacgacgatgatgagattgatgaagatgatgatgaagaggacgaggaagatgatgaggatgacgaggaggaggatgatgaggatgatgacgaggaggaagaagcagatcaaggaaagaagagcaaaaagaagtcatcagctgggcacaagaaggctggaagaagtcaacttgcggaaggtcaagcaggtgagaggccaccggaatgtaagcagcagtgaagaagtgaagaatcttggcttagttatgatgaagaagaagagtgaagagtgtctttgagccgaggttgtgtttctttaatttgcagagtcatggtccggtttattatatatcagttttgggtgattggtttgctatttaaaaaaaaaaaaatgggttctttggtttggtttgtgtctcttgatttttccttttgtaatgatcttatgaatttgtttcgagttaatgtcgttctctggtcagatttcgaattcaattctatttatcctccctcgttaatgagagaatttgtgagacaatctagtttactt

SEQ ID NO: 22227 - protein, 415 aa, Arabidopsis thaliana
  peptide (1)..(415): Ceres Seq. ID no. 13487459
FSYLYIYSLSRICPQKSRVLRFLILPLPPPDSFLAKMSNDKDSMNMSDLSTALNEEDRAGLVNALKNKLQNLAGQHSDVLENLTPPVRKRVEFLREIQNQYDEMEAKFFEERAALEAKYQKLYQPLYTKRYEIVNGVVEVEGAAEEVKSEQGEDKSAEEKGVPDFWLIALKNNEITAEEITERDEGALKYLKDIKWSRVEEPKGFKLEFFFDQNPYFKNTVLTKTYHMIDEDEPILEKALGTEIEWYPGKCLTQKILKKKPKKGSKNTKPITKTEDCESFFNFFSPPQVPDDDEDLDDDMADELQGQMEHDYDIGSTIKEKIISHAVSWFTGEAVEADDLDIEDDDDEIDEDDDEEDEEDDEDDEEEDDEDDDEEEEADQGKKSKKKSSAGHKKAGRSQLAEGQAGERPPECKQQ

SEQ ID NO: 22228 - protein, 379 aa, Arabidopsis thaliana
  peptide (1)..(379): Ceres Seq. ID no. 13487460
MSNDKDSMNMSDLSTALNEEDRAGLVNALKNKLQNLAGQHSDVLENLTPPVRKRVEFLREIQNQYDEMEAKFFEERAALEAKYQKLYQPLYTKRYEIVNGVVEVEGAAEEVKSEQGEDKSAEEKGVPDFWLIALKNNEITAEEITERDEGALKYLKDIKWSRVEEPKGFKLEFFFDQNPYFKNTVLTKTYHMIDEDEPILEKALGTEIEWYPGKCLTQKILKKKPKKGSKNTKPITKTEDCESFFNFFSPPQVPDDDEDLDDDMADELQGQMEHDYDIGSTIKEKIISHAVSWFTGEAVEADDLDIEDDDDEIDEDDDEEDEEDDEDDEEEDDEDDDEEEEADQGKKSKKKSSAGHKKAGRSQLAEGQAGERPPECKQQ

SEQ ID NO: 22229 - protein, 372 aa, Arabidopsis thaliana
  peptide (1)..(372): Ceres Seq. ID no. 13487461
MNMSDLSTALNEEDRAGLVNALKNKLQNLAGQHSDVLENLTPPVRKRVEFLREIQNQYDEMEAKFFEERAALEAKYQKLYQPLYTKRYEIVNGVVEVEGAAEEVKSEQGEDKSAEEKGVPDFWLIALKNNEITAEEITERDEGALKYLKDIKWSRVEEPKGFKLEFFFDQNPYFKNTVLTKTYHMIDEDEPILEKALGTEIEWYPGKCLTQKILKKKPKKGSKNTKPITKTEDCESFFNFFSPPQVPDDDEDLDDDMADELQGQMEHDYDIGSTIKEKIISHAVSWFTGEAVEADDLDIEDDDDEIDEDDDEEDEEDDEDDEEEDDEDDDEEEEADQGKKSKKKSSAGHKKAGRSQLAEGQAGERPPECKQQ

SEQ ID NO: 22230 - DNA, 1065 bp, Arabidopsis thaliana
  misc_feature (1)..(1065): Ceres Seq. ID no. 13500131
  misc_feature (1)..(1065): Ortholog of  Ceres SEQ ID NO 14316161 as cited in SEQ ID NO 52384
  misc_feature (1)..(1065): Ortholog of  Ceres SEQ ID NO 14315249 as cited in SEQ ID NO 52512
  misc_feature (1)..(1065): Ortholog of  Ceres SEQ ID NO 15174595 as cited in SEQ ID NO 53460
  misc_feature (1)..(1065): Ortholog of  Ceres SEQ ID NO 13503553 as cited in SEQ ID NO 64822
  misc_feature (1)..(1065): Ortholog of  Ceres SEQ ID NO 13660155 as cited in SEQ ID NO 67635
aaacaaattatatattttcttacttacttgttctcttgtaatggatttctctccgatcaactgcctcattttcgatttggatgacacattataccctctaaaaactggaatagcgccagctgtcaagaagaatattgacgattttctagtggagaaatttggattctcagaaagtaaagcttcaagcttaagagttgaactcttcaagacttatggaagtactctcgctggtcttagggcgttaggtcatgatgttcatcctgatgaatatcacagtttcgtgcacggaaggttaccgtatgggtcgatcgaaccaaacaacaagctacgtaaccttctcaacaaaatcaaacagagaaaaattatatttacgaattcggacaagaatcatgcggtgaaggtcctcaagaaacttggtttagaagattgtttcgaagagatgatttgttttgagacaatgaacccaaatttattcgggtcaacaacccgacccgatgaatacccggttgttctcaagccttcgttgaccgcaatggatatttgcattcgtgtagccaacgttgatcctcgccgaacagtatttttggatgataatatccacaatattaccgcgggtaaatctgtcgggcttcgcacaatcctggtgggaagagcagaaaagacgaaagatgcggattatgcggtggagacggttactgagatagctacggcggtgccagagatttgggctacggcgacggcgacaggcggatttgacgttggtggtgagaggatcagacggagcaagagtgagctggagggtatggcttcaatagcagccgtcggtgcgtgacgtgatcgagtgggcggatcgtggccgttggataattttaacgtctagtggttgggattgtacaggtggcgttaaaatgttgataatgcatatgtgaatataaataatagtggtggtggacaatattcatcccatgtggacaccaaatgtgaatacgcaatcagataatattatgtatgatgattatgatttcaatatgtgtacatttttattcaactgatttttttaaagtt

SEQ ID NO: 22231 - protein, 276 aa, Arabidopsis thaliana
  peptide (1)..(276): Ceres Seq. ID no. 13500132
NKLYIFLLTCSLVMDFSPINCLIFDLDDTLYPLKTGIAPAVKKNIDDFLVEKFGFSESKASSLRVELFKTYGSTLAGLRALGHDVHPDEYHSFVHGRLPYGSIEPNNKLRNLLNKIKQRKIIFTNSDKNHAVKVLKKLGLEDCFEEMICFETMNPNLFGSTTRPDEYPVVLKPSLTAMDICIRVANVDPRRTVFLDDNIHNITAGKSVGLRTILVGRAEKTKDADYAVETVTEIATAVPEIWATATATGGFDVGGERIRRSKSELEGMASIAAVGA

SEQ ID NO: 22232 - protein, 263 aa, Arabidopsis thaliana
  peptide (1)..(263): Ceres Seq. ID no. 13500133
MDFSPINCLIFDLDDTLYPLKTGIAPAVKKNIDDFLVEKFGFSESKASSLRVELFKTYGSTLAGLRALGHDVHPDEYHSFVHGRLPYGSIEPNNKLRNLLNKIKQRKIIFTNSDKNHAVKVLKKLGLEDCFEEMICFETMNPNLFGSTTRPDEYPVVLKPSLTAMDICIRVANVDPRRTVFLDDNIHNITAGKSVGLRTILVGRAEKTKDADYAVETVTEIATAVPEIWATATATGGFDVGGERIRRSKSELEGMASIAAVGA

SEQ ID NO: 22233 - DNA, 1864 bp, Arabidopsis thaliana
  misc_feature (1)..(1864): Ceres Seq. ID no. 12562449
  misc_feature (1)..(1864): Ortholog of  Ceres SEQ ID NO 15174547 as cited in SEQ ID NO 59586
  misc_feature (1)..(1864): Ortholog of  Ceres SEQ ID NO 15169470 as cited in SEQ ID NO 66036
aggtttcgtgtaacatttcacacacacatttgtcgaaatcttaacaccaaacccaaatcagaaaaatcaaaactttttattttattttatcaaaatggcgcttatgaatggaagcatgaatctatcatcggtcaaatcatcgatgatcaaccaccgtcaaccaaacttctcctccgccgtctccagacccacttctttccggatctccgccgtgcaaaccgacccaaaaacaccagctgcttcatcggcgtcggcggcgacgacgactccggcaacgttgacgaagcccgttggagttaatgtgggtaaaggaaaatgggcaccagagagttggaggacgaagaaagctttacagcaaccggactatccagatttagctgcgcttgaagctgtgctagagacgatcgaagcttttcctccgatcgtgttcgccggagaagctagattgcttgaggaacgattaggacaagcagcgatgggtgaagcgtttctgttacaaggaggagattgtgcagagagtttcaaagagtttaatgcgaataacattcgtgatactttcaggattcttcttcagatgggtgctgtgttgatgttcggaggtcaagtccctgttgttaaggttgggagaatggcgggtcaatttgcgaaaccaagatcggattcgtttgaggagaaagatggagtgaaattgcctagttacagaggagataacattaatggagatgcgtttgattcgaaatctaggattcctgatccacagaggatgattagagcttattgtcaatctgcagctactttgaatcttttgagagcttttgctactggtggttatgctgctatgcagagagttactcaatggaatcttgatttcactgaacgtagtgagcaaggagacaggtaccgtgaactagctaaccgtgttgatgaagcgcttggtttcatgcacgctgctggattaacgctcgatcatcccataatgcaaacaaccgacttctggacttctcatgaatgtttgctcttgccttatgaacaatcactaacaaggcttgactcaacctctggtctctactacgattgttctgcccatatgatttgggtcggtgagcgaaccagacagctagatggtgcccatgtcgagttcttaagaggtgttgctaatcctcttggaatcaaggtgagtgataaaatggatccaaaggagctagtgaagttgattgagatcttgaatgctgacaataagcctggaaggattacaataatcacaagaatgggagctgagaatatgagagtgaagcttcctcatttgatcagagaagtgcgacgtgctggacagattgtgacttgggtcagtgatccaatgcacgggaacaccattaaggctccttgtggtctcaagactcgtccctttgacgccatcttggctgaagtgagagctttcttcgacgtgcacgagcaagaaggtagccaccccggaggaattcacctagaaatgactggtcagaacgtgaccgagtgcatcggtggttcacgcacagtcacattcgacgacttgggttcacgttaccacacgcactgtgatcctcgccttaatgcttcacagtctcttgagctctccttcatcatcgccgaacgtcttagaaagagacgcatcaagtctcaaaaggcttttgccctctaatcaaataaacattggcttataataatatctatctatataaatgtgtgtgtgtgtgaacttaatacaatctcatttatctttgattcaaatcttgagtcaaaagaacgcttaaggtttctgttttaatgttgttagtgagtattatttccattttggatttaatataatcatggatggttgggtttc

SEQ ID NO: 22234 - protein, 527 aa, Arabidopsis thaliana
  peptide (1)..(527): Ceres Seq. ID no. 12562450
MALMNGSMNLSSVKSSMINHRQPNFSSAVSRPTSFRISAVQTDPKTPAASSASAATTTPATLTKPVGVNVGKGKWAPESWRTKKALQQPDYPDLAALEAVLETIEAFPPIVFAGEARLLEERLGQAAMGEAFLLQGGDCAESFKEFNANNIRDTFRILLQMGAVLMFGGQVPVVKVGRMAGQFAKPRSDSFEEKDGVKLPSYRGDNINGDAFDSKSRIPDPQRMIRAYCQSAATLNLLRAFATGGYAAMQRVTQWNLDFTERSEQGDRYRELANRVDEALGFMHAAGLTLDHPIMQTTDFWTSHECLLLPYEQSLTRLDSTSGLYYDCSAHMIWVGERTRQLDGAHVEFLRGVANPLGIKVSDKMDPKELVKLIEILNADNKPGRITIITRMGAENMRVKLPHLIREVRRAGQIVTWVSDPMHGNTIKAPCGLKTRPFDAILAEVRAFFDVHEQEGSHPGGIHLEMTGQNVTECIGGSRTVTFDDLGSRYHTHCDPRLNASQSLELSFIIAERLRKRRIKSQKAFAL

SEQ ID NO: 22235 - protein, 524 aa, Arabidopsis thaliana
  peptide (1)..(524): Ceres Seq. ID no. 12562451
MNGSMNLSSVKSSMINHRQPNFSSAVSRPTSFRISAVQTDPKTPAASSASAATTTPATLTKPVGVNVGKGKWAPESWRTKKALQQPDYPDLAALEAVLETIEAFPPIVFAGEARLLEERLGQAAMGEAFLLQGGDCAESFKEFNANNIRDTFRILLQMGAVLMFGGQVPVVKVGRMAGQFAKPRSDSFEEKDGVKLPSYRGDNINGDAFDSKSRIPDPQRMIRAYCQSAATLNLLRAFATGGYAAMQRVTQWNLDFTERSEQGDRYRELANRVDEALGFMHAAGLTLDHPIMQTTDFWTSHECLLLPYEQSLTRLDSTSGLYYDCSAHMIWVGERTRQLDGAHVEFLRGVANPLGIKVSDKMDPKELVKLIEILNADNKPGRITIITRMGAENMRVKLPHLIREVRRAGQIVTWVSDPMHGNTIKAPCGLKTRPFDAILAEVRAFFDVHEQEGSHPGGIHLEMTGQNVTECIGGSRTVTFDDLGSRYHTHCDPRLNASQSLELSFIIAERLRKRRIKSQKAFAL

SEQ ID NO: 22236 - protein, 520 aa, Arabidopsis thaliana
  peptide (1)..(520): Ceres Seq. ID no. 12562452
MNLSSVKSSMINHRQPNFSSAVSRPTSFRISAVQTDPKTPAASSASAATTTPATLTKPVGVNVGKGKWAPESWRTKKALQQPDYPDLAALEAVLETIEAFPPIVFAGEARLLEERLGQAAMGEAFLLQGGDCAESFKEFNANNIRDTFRILLQMGAVLMFGGQVPVVKVGRMAGQFAKPRSDSFEEKDGVKLPSYRGDNINGDAFDSKSRIPDPQRMIRAYCQSAATLNLLRAFATGGYAAMQRVTQWNLDFTERSEQGDRYRELANRVDEALGFMHAAGLTLDHPIMQTTDFWTSHECLLLPYEQSLTRLDSTSGLYYDCSAHMIWVGERTRQLDGAHVEFLRGVANPLGIKVSDKMDPKELVKLIEILNADNKPGRITIITRMGAENMRVKLPHLIREVRRAGQIVTWVSDPMHGNTIKAPCGLKTRPFDAILAEVRAFFDVHEQEGSHPGGIHLEMTGQNVTECIGGSRTVTFDDLGSRYHTHCDPRLNASQSLELSFIIAERLRKRRIKSQKAFAL

SEQ ID NO: 22237 - DNA, 684 bp, Arabidopsis thaliana
  misc_feature (1)..(684): Ceres Seq. ID no. 12393289
  misc_feature (1)..(684): Ortholog of  Ceres SEQ ID NO 14314198 as cited in SEQ ID NO 57472
  misc_feature (1)..(684): Ortholog of  Ceres SEQ ID NO 12783998 as cited in SEQ ID NO 61535
  misc_feature (1)..(684): Ortholog of  Ceres SEQ ID NO 15174264 as cited in SEQ ID NO 61877
agatatcaaaatcactcagatctgtgcttcttcttcttcacccagaaaagtaaaacaaaagtcaaaacaatggcgccgagagcagagaagaagcccgcggagaagaaaccagccgccgagaaaccagtagaggagaaatcaaaagccgagaaagctccggcggagaagaaaccaaaagccggcaagaaactcccgaaggaagccggggccggcggcgataagaagaagaagatgaagaagaagagtgtggaaacttacaagatctacatcttcaaggttctgaaacaagttcatccagatattggtatttcaagcaaggctatgggtattatgaacagtttcatcaacgacatcttcgagaaattggcatcggaatcttcaaagctcgctaggtataacaagaagccgacgattacttctcgggagattcagactgctgttagactcgttcttcctggtgagctcgctaaacacgctgtttctgaaggaaccaaggctgttaccaaattcacaagctcttgaattagtaaattagggtttgtatactctgaatttgattctgatgttgtcataacttgtgttaggatttctctttcgttttattaagctttaattatcattctccgttgtaaagtaatcttatgaatctgtcttcgaatcaaaagttctggttgttaatggctc

SEQ ID NO: 22238 - protein, 173 aa, Arabidopsis thaliana
  peptide (1)..(173): Ceres Seq. ID no. 12393290
RYQNHSDLCFFFFTQKSKTKVKTMAPRAEKKPAEKKPAAEKPVEEKSKAEKAPAEKKPKAGKKLPKEAGAGGDKKKKMKKKSVETYKIYIFKVLKQVHPDIGISSKAMGIMNSFINDIFEKLASESSKLARYNKKPTITSREIQTAVRLVLPGELAKHAVSEGTKAVTKFTSS

SEQ ID NO: 22239 - protein, 150 aa, Arabidopsis thaliana
  peptide (1)..(150): Ceres Seq. ID no. 12393291
MAPRAEKKPAEKKPAAEKPVEEKSKAEKAPAEKKPKAGKKLPKEAGAGGDKKKKMKKKSVETYKIYIFKVLKQVHPDIGISSKAMGIMNSFINDIFEKLASESSKLARYNKKPTITSREIQTAVRLVLPGELAKHAVSEGTKAVTKFTSS

SEQ ID NO: 22240 - protein, 96 aa, Arabidopsis thaliana; identical to SEQ ID NO: 21276
  peptide (1)..(96): Ceres Seq. ID no. 12393292

SEQ ID NO: 22241 - DNA, 1046 bp, Arabidopsis thaliana
  misc_feature (1)..(1046): Ceres Seq. ID no. 12332375
  misc_feature (1)..(1046): Ortholog of  Ceres SEQ ID NO 15178816 as cited in SEQ ID NO 405
acatcttagttcatgttcgagtttctctggtctcttactctttcacctagaaatttgtttggtctcccaacaacataaacgcatgtatacattttcatgtgtctttgtaaggatattgattcattttttgggcaaatagataatcaattcaatgctatgttttgtctgaaatgtgcagcttcaattacaaagaatggctgcttcaagtgctgtcaccgcaaactacgtcctcaagccacctccattcgcactggatgctttggagccgcatatgagcaaacaaactctggagtttcactggggaaaacatcacagagcttacgtggacaacctcaagaaacaggttcttggaaccgagcttgaaggcaagcccttagagcacattatccacagcacttacaacaatggtgatctcctccctgctttcaacaacgctgctcaggcgtggaaccacgagttcttctgggagtcaatgaaaccaggtggtggaggaaaaccatcaggagagcttcttgctttgcttgaaagagatttcacttcttatgagaagttctatgaagagttcaatgctgctgcagccactcagtttggagctggctgggcctggcttgcttattcaaatgaaaaactcaaagtagtgaaaactcccaatgctgtgaatccccttgtgctcggctctttcccattgcttaccattgatgtctgggagcatgcttactaccttgacttccagaaccgaagaccagattacataaagacattcatgaccaatcttgtgtcttgggaagctgtaagtgccagacttgaggccgccaaggctgcttctgcttaagcaaatttctgaacaatttgacttcagtgacagtgagttctgcatcaccgaagtctcttataaaatattggtcgctgtaataaggacacagctctcttgttgtgtatgtgtcacagagttcttcattttgcttgtgtaatgaacaattaaacatgctcttttctgagtgtgtgtgcgttttgtgtgtgtcaagtttttcatcgtctcctttatt

SEQ ID NO: 22242 - protein, 212 aa, Arabidopsis thaliana; identical to SEQ ID NO: 21185
  peptide (1)..(212): Ceres Seq. ID no. 12332376

SEQ ID NO: 22243 - protein, 186 aa, Arabidopsis thaliana; identical to SEQ ID NO: 21186
  peptide (1)..(186): Ceres Seq. ID no. 12332377

SEQ ID NO: 22244 - protein, 119 aa, Arabidopsis thaliana
  peptide (1)..(119): Ceres Seq. ID no. 12332378
MKPGGGGKPSGELLALLERDFTSYEKFYEEFNAAAATQFGAGWAWLAYSNEKLKVVKTPNAVNPLVLGSFPLLTIDVWEHAYYLDFQNRRPDYIKTFMTNLVSWEAVSARLEAAKAASA

SEQ ID NO: 22245 - DNA, 1139 bp, Arabidopsis thaliana
  misc_feature (1)..(1139): Ceres Seq. ID no. 12323678
  misc_feature (1)..(1139): Ortholog of  Ceres SEQ ID NO 15178299 as cited in SEQ ID NO 0
  misc_feature (1)..(1139): Ortholog of  Ceres SEQ ID NO 15226331 as cited in SEQ ID NO 0
gaaccaacctcccttaggcactttctacagagcagctaatcaaaaaaaaaaaaaaaaaaccttgttcttctcttcttcttcttcctctctcacaaatttgactttcatagaagaaaaaaatggtgactacatcgtcacgaaccaagtcaaacggaccggtgcttcgttcacaatcaccgtcaggtcgattttgcggtggttactcaagagccgttccgtcatcttcttcatcagctttcgcttcatcaacgagttctagcttttcatctccgtcgtcagcttttttcagcaatcaccgtcatcacgagagcaatcacagtcaccaccgatctgcgtcaccgactcgtgtgaatctctacacagcgcaaccgatgtctcagtcgtttcgttactctctcgatagcagatctatatctccgactaacaaatcgatctccgtttcgaagaatcagccaccgagccataatcacaagatctcaaggagatgtatgtgttctccgacgacgcatccaggatctttcagatgcagtctacataagaacgtagcgaatccacatggtcaaggtacagcttcgtatacaacgaatggattgaatatgcgtcgatctgcgatgactaattcgctggtgagaattggtggtgttgaaggagagtgggtgagaagagctttgactactttgattcgaccttcttcgcatcatctgaaaagacgagctgcttatcagccacgtcctagtcgactctcaatcatggcgaaagctgatgagaattgattttgatctggattttggttaattcaggtttgttttgtttgttgttcttctctctttaaacgaaaaccaccacaggatttagtagatccggcgaagaagtcttgttatgaagctgaggtctgcgaagaagaatcatcctcgagaaatcgagattttgtaaaaggaagaaacacacacctatcataatttttttgttgttgggtgaaagaagatgctagaatgcattgtacatacgttctcttttttactgtttttgttgctctctcttgcgtctttgtcgaaccccaaaaaaaaaaaaatgttcggagtctcaccaaaaattagagacctaaaatcgaaaatcaaagaactgaatctaatttctgc

SEQ ID NO: 22246 - protein, 217 aa, Arabidopsis thaliana
  peptide (1)..(217): Ceres Seq. ID no. 12323679
MVTTSSRTKSNGPVLRSQSPSGRFCGGYSRAVPSSSSSAFASSTSSSFSSPSSAFFSNHRHHESNHSHHRSASPTRVNLYTAQPMSQSFRYSLDSRSISPTNKSISVSKNQPPSHNHKISRRCMCSPTTHPGSFRCSLHKNVANPHGQGTASYTTNGLNMRRSAMTNSLVRIGGVEGEWVRRALTTLIRPSSHHLKRRAAYQPRPSRLSIMAKADEN

SEQ ID NO: 22247 - protein, 133 aa, Arabidopsis thaliana
  peptide (1)..(133): Ceres Seq. ID no. 12323680
MSQSFRYSLDSRSISPTNKSISVSKNQPPSHNHKISRRCMCSPTTHPGSFRCSLHKNVANPHGQGTASYTTNGLNMRRSAMTNSLVRIGGVEGEWVRRALTTLIRPSSHHLKRRAAYQPRPSRLSIMAKADEN

SEQ ID NO: 22248 - DNA, 1159 bp, Arabidopsis thaliana
  misc_feature (1)..(1159): Ceres Seq. ID no. 12385167
  misc_feature (1)..(1159): Ortholog of  Ceres SEQ ID NO 12608620 as cited in SEQ ID NO 60192
  misc_feature (1)..(1159): Ortholog of  Ceres SEQ ID NO 13662898 as cited in SEQ ID NO 66199
  misc_feature (1)..(1159): Ortholog of  Ceres SEQ ID NO 14313358 as cited in SEQ ID NO 67347
  misc_feature (1)..(1159): Ortholog of  Ceres SEQ ID NO 13654314 as cited in SEQ ID NO 67914
attagttttctccgacactcccattcaaaagtagaaagatactgaagagctcgctcattcacaaaataaccaaaatggttctcactcacaacgtattggcagttacatttggagtcctgggtaacatcatatcgttcatcgttttcttggcaccagtgccaacttttgtaagaatctgcaagaaaaaatcgatagaaggttttgaatcacttccctacgtgtcagccctctttagcgcgatgctatggatttactatgctctgcaaaaagatggagcaggcttccttctcattaccataaacgctgtgggatgcttcatcgaaaccatctacatcatcctcttcatcacctatgctaacaagaaagctagaatatcaactttgaaggttcttgggctcttgaatttcttgggttttgctgctattattctcgtctgcgagctcctaaccaaaggatcgaaccgtgagaaagtccttggagggatttgcgtcggattttctgtttgtgttttcgcagctcctttgagcatcatgagagtggtgatacgaacaaagagtgtggagtttatgcctttctctctatcattgtttcttacaatcagcgccattacgtggctcttctacggtcttgctattaaagacttctacgttgcgcttccaaatatattgggtgcgtttctcggagcagtccaaatgattctatacgtcatattcaagtactacaaaactccactagtggttgatgagacagagaagcccaaaacggtgtcggatcattccatcaacatggtcaagctttcatctactccggcttctggtgatcttacggttcagccgcagactaatcctgacgtgagtcatcctattaaaactcatggtggtgacttagaggaccagatggacaagaaaatgccaaacagtcaagatttagttttcaattatgaattagtgattgactttaatgttgaactgttgagtctggtttcctaatttgtcttttattttctcatcatcttctttcgaaatatctcgaaattgtactatccttcaaaaatttatgtgcgtcgtttagaattttgtaaaatagtttttgatgcctctgttctcagtaatacttaaaagtttattagtccggctaattaaaaaggaaatgaaaattc

SEQ ID NO: 22249 - protein, 304 aa, Arabidopsis thaliana
  peptide (1)..(304): Ceres Seq. ID no. 12385168
MVLTHNVLAVTFGVLGNIISFIVFLAPVPTFVRICKKKSIEGFESLPYVSALFSAMLWIYYALQKDGAGFLLITINAVGCFIETIYIILFITYANKKARISTLKVLGLLNFLGFAAIILVCELLTKGSNREKVLGGICVGFSVCVFAAPLSIMRVVIRTKSVEFMPFSLSLFLTISAITWLFYGLAIKDFYVALPNILGAFLGAVQMILYVIFKYYKTPLVVDETEKPKTVSDHSINMVKLSSTPASGDLTVQPQTNPDVSHPIKTHGGDLEDQMDKKMPNSQDLVFNYELVIDFNVELLSLVS

SEQ ID NO: 22250 - protein, 249 aa, Arabidopsis thaliana
  peptide (1)..(249): Ceres Seq. ID no. 12385169
MLWIYYALQKDGAGFLLITINAVGCFIETIYIILFITYANKKARISTLKVLGLLNFLGFAAIILVCELLTKGSNREKVLGGICVGFSVCVFAAPLSIMRVVIRTKSVEFMPFSLSLFLTISAITWLFYGLAIKDFYVALPNILGAFLGAVQMILYVIFKYYKTPLVVDETEKPKTVSDHSINMVKLSSTPASGDLTVQPQTNPDVSHPIKTHGGDLEDQMDKKMPNSQDLVFNYELVIDFNVELLSLVS

SEQ ID NO: 22251 - protein, 152 aa, Arabidopsis thaliana
  peptide (1)..(152): Ceres Seq. ID no. 12385170
MRVVIRTKSVEFMPFSLSLFLTISAITWLFYGLAIKDFYVALPNILGAFLGAVQMILYVIFKYYKTPLVVDETEKPKTVSDHSINMVKLSSTPASGDLTVQPQTNPDVSHPIKTHGGDLEDQMDKKMPNSQDLVFNYELVIDFNVELLSLVS

SEQ ID NO: 22252 - DNA, 639 bp, Arabidopsis thaliana
  misc_feature (1)..(639): Ceres Seq. ID no. 13580410
  misc_feature (1)..(639): Ortholog of  Ceres SEQ ID NO 13581889 as cited in SEQ ID NO 50900
  misc_feature (1)..(639): Ortholog of  Ceres SEQ ID NO 13581902 as cited in SEQ ID NO 52223
  misc_feature (1)..(639): Ortholog of  Ceres SEQ ID NO 12585528 as cited in SEQ ID NO 62991
aacatcttcttcttcttcatcaaatctcacaaatcttcatcacttattcacaaatctcaaagcttcggatactaaatggctcgtaccaagcaaaccgcaaggaaatccaccggaggaaaagccccaaggaaacaactcgcaacaaaggcggcgaggaaatcagctccggcgaccggaggagtgaagaagccacacagattccgtcctggaactgttgccctaagagaaatcaggaagtatcagaagagcactgagcttctgattcgcaagcttccgttccagcgtttggttcgtgagatcgctcaggatttcaaaacagatctgcgtttccagagcagcgccgtcgcagcacttcaggaagcggctgaagcatacctcgttggattgtttgaagacaccaatctttgcgcgattcatgctaagagagtcactatcatgcctaaggatattcaattggcgaggagaattagaggcgagagggcttaagaaggagattgaagtactctagactgtgatcgttatgcttatgtatatttttcgttttccctaatttcgtgttttagggttggattaggttttgcgtttatgttgttcgatgaaatgcctcaatgaatcttaattaagtctgttttcgaattt

SEQ ID NO: 22253 - protein, 136 aa, Arabidopsis thaliana; identical to SEQ ID NO: 8709
  peptide (1)..(136): Ceres Seq. ID no. 13580411

SEQ ID NO: 22254 - protein, 83 aa, Arabidopsis thaliana
  peptide (1)..(83): Ceres Seq. ID no. 13580412
HLLLLHQISQIFITYSQISKLRILNGSYQANRKEIHRRKSPKETTRNKGGEEISSGDRRSEEATQIPSWNCCPKRNQEVSEEH

SEQ ID NO: 22255 - DNA, 2067 bp, Arabidopsis thaliana
  misc_feature (1)..(2067): Ceres Seq. ID no. 13495763
  misc_feature (1)..(2067): Ortholog of  Ceres SEQ ID NO 13598582 as cited in SEQ ID NO 65294
  misc_feature (1)..(2067): Ortholog of  Ceres SEQ ID NO 15176114 as cited in SEQ ID NO 67627
atgaacaaaaacatcctctgtttctctcttttcatatttttctccacatttcctcatctgggtcatctccaaaaatgatttgatgataacccaaattcgcaatttgattaggacaacaacaacaactttatttatctgattccgtctttgattttcagacaagaaaaaaaaaaaaaagatggaatcggatctggggaagctcttcattggtgggatttcgtgggatacagacgaagaaaggttaagagactactttagcaactatggtgatgttgttgaagctgtgatcatgagagatcgtgccacaggtcgtgcacgtggcttcggcttcattgtctttgcagacccctgtgtctcagagagagtgatcatggataaacacatcatcgatggccgcacggttgaggcgaagaaggctgtgcctcgagatgatcagcaggtgctaaagcgacacgctagtcctatccaccttatgtcacctgtccatggtggtggtggaaggacaaagaagatcttcgttggaggtttaccgtctagcattaccgaggaggagttcaagaactactttgatcagtttggtactattgctgatgttgttgtaatgtatgatcataacacgcagaggccaagaggttttggcttcatcacatttgattcagatgatgctgttgatagagttcttcacaagaccttccatgagctcaatgggaaactagttgaggtcaaaagagctgtacctaaggagatttcccctgtttctaatatccgaagcccgcttgctagcggtgttaactatggaggcgggtctaataggatgcctgctaatagctactttaacaactttgctcctggtcctggtttttataacagtctaggtcctgttggtcgtcggtttagtcctgttattggtagtggtagaaatgcggtttctgcttttggcctcgttttgaatcatgacttgagtttgaatttgaatccaagctgcgatgggacaagttctacgtttggttataaccgtattccaagcaacccttacttcaacggtgcttccccgaaccgttacacctctccaatcgggcacaatagaactgagtctccttacaattcgaacaatagagacttatggggaaacagaaccgacactgcaggtcccggttggaacttgaatgtctcgaatggaaacaacagaggaaattggggacttccttcttcttctgctgttagtaatgataacaatggctttggaaggaactatgggacaagttctggactttcctcgtccccatttaatggttttgaaggttctataggggaactgtacagaggcggctcagtctacagcgactcaacgtggcagcaacagcagctaccatctcagtcttctcacgagctagacaatttgtctcgcgcttacggttatgatattgacaatgtaggttcagacccatctgcaaatgacccagaaacttacaatggaagctacaatgttggaaatagacaaactaatagaggtattgctgcataggttatcaaaaaccaagaaaacaaaaaaaaaagttgagagatttgtagattgaaagcaaccaaatttcagttgcagagtttgaacaggttctcatgacaaagaaaccaactttgttgatcacagtgccaaagattatggtttgctttctcttttgttagaccaaaaaaaaaaaaaaaaaagagaaaaacaaagaaccgtttttgtttttcttcttcttacataaagatcagatcgtagcagccagacaaccaaagatactacaaggtggatttagatttgcttctcaaaaaagtttttttttttctttcatagaataaccaaacaaagatcgtagaattttcgatcaaagattcttcagagttctgtgctctgttttgtaattgtactttttttttcttgtttacaaaatgaattgttcatgaaaactttgttttcttaaaaaaaaaattagcgtgggagaaatattgtgtaagagagggatatgactattttgttgcatgtatccctaatgagatatatatatatatatatttttttaaagc

SEQ ID NO: 22256 - protein, 448 aa, Arabidopsis thaliana
  peptide (1)..(448): Ceres Seq. ID no. 13495764
MESDLGKLFIGGISWDTDEERLRDYFSNYGDVVEAVIMRDRATGRARGFGFIVFADPCVSERVIMDKHIIDGRTVEAKKAVPRDDQQVLKRHASPIHLMSPVHGGGGRTKKIFVGGLPSSITEEEFKNYFDQFGTIADVVVMYDHNTQRPRGFGFITFDSDDAVDRVLHKTFHELNGKLVEVKRAVPKEISPVSNIRSPLASGVNYGGGSNRMPANSYFNNFAPGPGFYNSLGPVGRRFSPVIGSGRNAVSAFGLVLNHDLSLNLNPSCDGTSSTFGYNRIPSNPYFNGASPNRYTSPIGHNRTESPYNSNNRDLWGNRTDTAGPGWNLNVSNGNNRGNWGLPSSSAVSNDNNGFGRNYGTSSGLSSSPFNGFEGSIGELYRGGSVYSDSTWQQQQLPSQSSHELDNLSRAYGYDIDNVGSDPSANDPETYNGSYNVGNRQTNRGIAA

SEQ ID NO: 22257 - protein, 411 aa, Arabidopsis thaliana
  peptide (1)..(411): Ceres Seq. ID no. 13495765
MRDRATGRARGFGFIVFADPCVSERVIMDKHIIDGRTVEAKKAVPRDDQQVLKRHASPIHLMSPVHGGGGRTKKIFVGGLPSSITEEEFKNYFDQFGTIADVVVMYDHNTQRPRGFGFITFDSDDAVDRVLHKTFHELNGKLVEVKRAVPKEISPVSNIRSPLASGVNYGGGSNRMPANSYFNNFAPGPGFYNSLGPVGRRFSPVIGSGRNAVSAFGLVLNHDLSLNLNPSCDGTSSTFGYNRIPSNPYFNGASPNRYTSPIGHNRTESPYNSNNRDLWGNRTDTAGPGWNLNVSNGNNRGNWGLPSSSAVSNDNNGFGRNYGTSSGLSSSPFNGFEGSIGELYRGGSVYSDSTWQQQQLPSQSSHELDNLSRAYGYDIDNVGSDPSANDPETYNGSYNVGNRQTNRGIAA

SEQ ID NO: 22258 - protein, 384 aa, Arabidopsis thaliana
  peptide (1)..(384): Ceres Seq. ID no. 13495766
MDKHIIDGRTVEAKKAVPRDDQQVLKRHASPIHLMSPVHGGGGRTKKIFVGGLPSSITEEEFKNYFDQFGTIADVVVMYDHNTQRPRGFGFITFDSDDAVDRVLHKTFHELNGKLVEVKRAVPKEISPVSNIRSPLASGVNYGGGSNRMPANSYFNNFAPGPGFYNSLGPVGRRFSPVIGSGRNAVSAFGLVLNHDLSLNLNPSCDGTSSTFGYNRIPSNPYFNGASPNRYTSPIGHNRTESPYNSNNRDLWGNRTDTAGPGWNLNVSNGNNRGNWGLPSSSAVSNDNNGFGRNYGTSSGLSSSPFNGFEGSIGELYRGGSVYSDSTWQQQQLPSQSSHELDNLSRAYGYDIDNVGSDPSANDPETYNGSYNVGNRQTNRGIAA

SEQ ID NO: 22259 - DNA, 1100 bp, Arabidopsis thaliana
  misc_feature (1)..(1100): Ceres Seq. ID no. 12334822
  misc_feature (1)..(1100): Ortholog of  Ceres SEQ ID NO 14316324 as cited in SEQ ID NO 55612
  misc_feature (1)..(1100): Ortholog of  Ceres SEQ ID NO 13596097 as cited in SEQ ID NO 68421
  misc_feature (1)..(1100): Ortholog of  Ceres SEQ ID NO 13598439 as cited in SEQ ID NO 69016
  misc_feature (1)..(1100): Ortholog of  Ceres SEQ ID NO 13599524 as cited in SEQ ID NO 0
aaccaaaacattgatctatagagagagagagagaacaaaaaatgggagagagcaaacgcaccgagaaaacgcgcgttttggtggttggagcgactggatacatagggaagaggatagtaagggcgtgtttggctgaaggtcacgagacttacgttttgcagaggccagagattggtctcgaaatcgagaaagtccaactctttctttctttcaagaaactcggcgcacgtatcgttgaaggttctttctccgaccatcaaagcctcgtatccgccgtgaaacttgttgacgtcgttgtctccgccatgtccggtgttcacttccgtagccataacattctagtccagctcaagctcgtcgaagctatcaaagaggctggtaacgtaaagcggtttttaccatctgaatttggtatggatccaccacgtatgggacatgcgctaccgcccggaagagaaacctttgaccagaaaatggaagtgcgtcaggcgatagaggctgccggaattccttacacttacgttgtgggtgcttgctttgccgcctacttcgccggaaacttgtctcagatggtaactttacttcctccgaaagaaaaagttaatatttatggtgatggaaatgtaaaagtggtgtttgcggatgaagatgatatcgcaaaatacaccgcgaaaacgttaaacgatccacggacattaaacaaaaccgtgaatattagacctcccgacaacgttctcacgcagttggaattagttcagatctgggaaaagctaaccggaaaagaattggagaaaacaaatattgctgcacaagacttcctcgccaacattgaacaaatggagattccacaccaagcagggataggacatttctatcacattttctatgaaggatgtctcactgatcacgaagtcggagaagacgaagaagcttctagtctttatcctgacgtcaagtacaaacgcatggatgattacttaagaatgttcctctgatttgaccaagtcttatctatactaaatacacatatcaaaagtttgatgttttatattcattcatgttctgctatatatgcaaatttaaaaatatattcttcatgc

SEQ ID NO: 22260 - protein, 317 aa, Arabidopsis thaliana
  peptide (1)..(317): Ceres Seq. ID no. 12334823
MGESKRTEKTRVLVVGATGYIGKRIVRACLAEGHETYVLQRPEIGLEIEKVQLFLSFKKLGARIVEGSFSDHQSLVSAVKLVDVVVSAMSGVHFRSHNILVQLKLVEAIKEAGNVKRFLPSEFGMDPPRMGHALPPGRETFDQKMEVRQAIEAAGIPYTYVVGACFAAYFAGNLSQMVTLLPPKEKVNIYGDGNVKVVFADEDDIAKYTAKTLNDPRTLNKTVNIRPPDNVLTQLELVQIWEKLTGKELEKTNIAAQDFLANIEQMEIPHQAGIGHFYHIFYEGCLTDHEVGEDEEASSLYPDVKYKRMDDYLRMFL

SEQ ID NO: 22261 - protein, 229 aa, Arabidopsis thaliana
  peptide (1)..(229): Ceres Seq. ID no. 12334824
MSGVHFRSHNILVQLKLVEAIKEAGNVKRFLPSEFGMDPPRMGHALPPGRETFDQKMEVRQAIEAAGIPYTYVVGACFAAYFAGNLSQMVTLLPPKEKVNIYGDGNVKVVFADEDDIAKYTAKTLNDPRTLNKTVNIRPPDNVLTQLELVQIWEKLTGKELEKTNIAAQDFLANIEQMEIPHQAGIGHFYHIFYEGCLTDHEVGEDEEASSLYPDVKYKRMDDYLRMFL

SEQ ID NO: 22262 - protein, 193 aa, Arabidopsis thaliana
  peptide (1)..(193): Ceres Seq. ID no. 12334825
MDPPRMGHALPPGRETFDQKMEVRQAIEAAGIPYTYVVGACFAAYFAGNLSQMVTLLPPKEKVNIYGDGNVKVVFADEDDIAKYTAKTLNDPRTLNKTVNIRPPDNVLTQLELVQIWEKLTGKELEKTNIAAQDFLANIEQMEIPHQAGIGHFYHIFYEGCLTDHEVGEDEEASSLYPDVKYKRMDDYLRMFL

SEQ ID NO: 22263 - DNA, 1339 bp, Arabidopsis thaliana
  misc_feature (1)..(1339): Ceres Seq. ID no. 12338101
  misc_feature (1)..(1339): Ortholog of  Ceres SEQ ID NO 15176230 as cited in SEQ ID NO 58796
  misc_feature (1)..(1339): Ortholog of  Ceres SEQ ID NO 14308156 as cited in SEQ ID NO 59006
  misc_feature (1)..(1339): Ortholog of  Ceres SEQ ID NO 13596321 as cited in SEQ ID NO 67976
aattattactttaatcttctttcccgctctctattcttcttcttctttaggatcaatcaccgtttagctttcttcccatacgtctctccgtttacgaccagtatacagaggctggagctggggaagaaaaggattgtctatggagggagacgtcggaataggtttggtatgccagaatactatggatgggaaggcgagtaatggaaatggtttagagaagactgtaccttcttgttgccttaaggctatggcatgtgtacctgaggatgatgctaagtgtcactccactgttgtttctgggtggttttcggaacctcaccctcgctctgggaaaaaaggcggcaaagcagtctatttcaacaaccctatgtggccaggagaagcacactcactgaaagttgagaaagttctgttcaaagacaagtcggattttcaggaagtcctagtgttcgagtcagccacgtacggaaaggtgcttgttctagatggtatcgtacagctgaccgaaaaagatgaatgtgcatatcaggagatgatagcccatctgcctttatgctctatatcttcccctaaaaatgttcttgttgttggtggaggtgatggtggtgttcttcgagagatttctcgccatagttctgttgaggttattgatatctgtgagatagacaagatggttatagatgtgtctaagaagttcttccccgagttagcggttgggtttgacgatcctcgtgttcaacttcacattagtgatgctgctgagttcctccgtaaatcccctgaagggaagtatgatgccatcattgttgattcttcagatcccgtaggtcctgctcttgcgcttgttgagaagcctttcttcgagacactggctagagcgttgaagcctgggggagttctttgtaacatggcagaaagtatgtggctccatactcatcttattgaagatatgatctccatttgccgtcaaacattcaaaagtgttcactatgcgtggagcagcgtccccacatatccaagcggcgtgattggtttcgtcttgtgctctactgaaggaccagctgttgacttcaagaacccaatcaaccctattgagaaactagacggtgcgatgacccataaaagagaattgaagttctataactctgatatgcacagagccgcatttgctttgcccacattcctgcggagagaagtagcttcacttctggcttcttgacttctgtttggctctaccatatccctcatatcaaactttgtagaactcttgaagaggaataataaatcattgaaggctttgtatctctaagtttactcctttataaaaagacttatattt

SEQ ID NO: 22264 - protein, 359 aa, Arabidopsis thaliana
  peptide (1)..(359): Ceres Seq. ID no. 12338102
MEGDVGIGLVCQNTMDGKASNGNGLEKTVPSCCLKAMACVPEDDAKCHSTVVSGWFSEPHPRSGKKGGKAVYFNNPMWPGEAHSLKVEKVLFKDKSDFQEVLVFESATYGKVLVLDGIVQLTEKDECAYQEMIAHLPLCSISSPKNVLVVGGGDGGVLREISRHSSVEVIDICEIDKMVIDVSKKFFPELAVGFDDPRVQLHISDAAEFLRKSPEGKYDAIIVDSSDPVGPALALVEKPFFETLARALKPGGVLCNMAESMWLHTHLIEDMISICRQTFKSVHYAWSSVPTYPSGVIGFVLCSTEGPAVDFKNPINPIEKLDGAMTHKRELKFYNSDMHRAAFALPTFLRREVASLLAS

SEQ ID NO: 22265 - protein, 345 aa, Arabidopsis thaliana
  peptide (1)..(345): Ceres Seq. ID no. 12338103
MDGKASNGNGLEKTVPSCCLKAMACVPEDDAKCHSTVVSGWFSEPHPRSGKKGGKAVYFNNPMWPGEAHSLKVEKVLFKDKSDFQEVLVFESATYGKVLVLDGIVQLTEKDECAYQEMIAHLPLCSISSPKNVLVVGGGDGGVLREISRHSSVEVIDICEIDKMVIDVSKKFFPELAVGFDDPRVQLHISDAAEFLRKSPEGKYDAIIVDSSDPVGPALALVEKPFFETLARALKPGGVLCNMAESMWLHTHLIEDMISICRQTFKSVHYAWSSVPTYPSGVIGFVLCSTEGPAVDFKNPINPIEKLDGAMTHKRELKFYNSDMHRAAFALPTFLRREVASLLAS

SEQ ID NO: 22266 - protein, 323 aa, Arabidopsis thaliana
  peptide (1)..(323): Ceres Seq. ID no. 12338104
MACVPEDDAKCHSTVVSGWFSEPHPRSGKKGGKAVYFNNPMWPGEAHSLKVEKVLFKDKSDFQEVLVFESATYGKVLVLDGIVQLTEKDECAYQEMIAHLPLCSISSPKNVLVVGGGDGGVLREISRHSSVEVIDICEIDKMVIDVSKKFFPELAVGFDDPRVQLHISDAAEFLRKSPEGKYDAIIVDSSDPVGPALALVEKPFFETLARALKPGGVLCNMAESMWLHTHLIEDMISICRQTFKSVHYAWSSVPTYPSGVIGFVLCSTEGPAVDFKNPINPIEKLDGAMTHKRELKFYNSDMHRAAFALPTFLRREVASLLAS

SEQ ID NO: 22267 - DNA, 1257 bp, Arabidopsis thaliana
  misc_feature (1)..(1257): Ceres Seq. ID no. 12439615
  misc_feature (1)..(1257): Ortholog of  Ceres SEQ ID NO 14314068 as cited in SEQ ID NO 52242
  misc_feature (1)..(1257): Ortholog of  Ceres SEQ ID NO 14314999 as cited in SEQ ID NO 52342
  misc_feature (1)..(1257): Ortholog of  Ceres SEQ ID NO 15177057 as cited in SEQ ID NO 55817
  misc_feature (1)..(1257): Ortholog of  Ceres SEQ ID NO 13585458 as cited in SEQ ID NO 60907
  misc_feature (1)..(1257): Ortholog of  Ceres SEQ ID NO 13598678 as cited in SEQ ID NO 61508
  misc_feature (1)..(1257): Ortholog of  Ceres SEQ ID NO 12625392 as cited in SEQ ID NO 63315
  misc_feature (1)..(1257): Ortholog of  Ceres SEQ ID NO 13598319 as cited in SEQ ID NO 68758
  misc_feature (1)..(1257): Ortholog of  Ceres SEQ ID NO 12589816 as cited in SEQ ID NO 0
gaaaaacacataaactcactctcactctctcactgtcggcaaactaacttattcacttttccggcactgattctgctcgggaaaaacaactccggcacaaaatgcagctttttccagtcatgttagccacactctgcattgtcctgcagcttctcattggctcgtcagctttggctacgacaaatcgccacgtgtcaaactctcattggcttcccgcagtagctacatggtacggaagccccaacggtgacggcagcgacggaggagcgtgtggttacggtacgttggtggatgtgaagccgttacatgcgagggttggagcggtgaatccaattctcttcaaaaatggtgaaggttgcggagcttgttacaaggttcgatgcttggacaagagcatttgttcccggagagccgttaccgtcataattaccgatgagtgtcccggctgctctaaaaccagcactcactttgacctcagtggtgccgtctttggccggttagctattgccggagagtcagggcctctccgtaaccgtggactaatcccagtcatttatcgccggactgcatgcaaatatagagggaagaacatagcattccatgtgaacgaaggatcaactgatttttggctatctctgctggtcgagtttgaagatggagaaggagacattggctccatgcacattcgccaagcaggagccagggaatggttagagatgaagcatgtatggggagccaactggtgcatcattggagggccactcaagggaccattctccatcaagctcaccactttgtctgccggtaaaacactctctgccaccgacgttgtccctagaaactgggctcccaaagcaacttacagttcccgcctcaacttctcccctgtcctttgaaccatctcttctacatagtcaaagactattatagttctattactactactactcgtgtgatcgtttttttttagagagaaacagagtgactgctggccgtaggatggaaacagtaagaaaagtacatccgaatcaacggctattgcgttctctcctcttccttcttgtgatgtggatttgtgtgtgtgtgatgtgtcggtgagtgtgttatagaagtcactatagccatcttcaaaggggagatagagctaggagtagtatttggtggtgtcacgtcgtttgttttttctatataatttttgtcactatgtctttctattatgggacatgacataatatatcatatgaataatttatcacc

SEQ ID NO: 22268 - protein, 264 aa, Arabidopsis thaliana
  peptide (1)..(264): Ceres Seq. ID no. 12439616
MQLFPVMLATLCIVLQLLIGSSALATTNRHVSNSHWLPAVATWYGSPNGDGSDGGACGYGTLVDVKPLHARVGAVNPILFKNGEGCGACYKVRCLDKSICSRRAVTVIITDECPGCSKTSTHFDLSGAVFGRLAIAGESGPLRNRGLIPVIYRRTACKYRGKNIAFHVNEGSTDFWLSLLVEFEDGEGDIGSMHIRQAGAREWLEMKHVWGANWCIIGGPLKGPFSIKLTTLSAGKTLSATDVVPRNWAPKATYSSRLNFSPVL

SEQ ID NO: 22269 - protein, 258 aa, Arabidopsis thaliana
  peptide (1)..(258): Ceres Seq. ID no. 12439617
MLATLCIVLQLLIGSSALATTNRHVSNSHWLPAVATWYGSPNGDGSDGGACGYGTLVDVKPLHARVGAVNPILFKNGEGCGACYKVRCLDKSICSRRAVTVIITDECPGCSKTSTHFDLSGAVFGRLAIAGESGPLRNRGLIPVIYRRTACKYRGKNIAFHVNEGSTDFWLSLLVEFEDGEGDIGSMHIRQAGAREWLEMKHVWGANWCIIGGPLKGPFSIKLTTLSAGKTLSATDVVPRNWAPKATYSSRLNFSPVL

SEQ ID NO: 22270 - DNA, 2160 bp, Arabidopsis thaliana
  misc_feature (1)..(2160): Ceres Seq. ID no. 12327301
  misc_feature (1)..(2160): Ortholog of  Ceres SEQ ID NO 14306319 as cited in SEQ ID NO 59927
gacttcttcgtcttcgtttcttcatttcgaagctctctctgtgtgtgatggcgtgccctagaaactccataacatacaacgccacgcgctgcgcgtgcggtatcggtcagctactaaaccggagctccgggagctgcgagatcttcggttggccgtcaacaatctccacagacaaagatgtaaactacagcgtaatatcattcgccgagactttattcgctttcgataggatccgtaagttcacgcaatctcaagctattttcttagaagctacgctcgtgatgcttctctcttggttagtcttttgtttcttcctgagattcaccaaactcggcgatggtcgtaatgtctggtttaatctccgttggtggattactcgacttgacgtcttcttctccactagacattggctcgttagtgctttctctactctcattgcttttgtctccatgaattggtttcttttgagtaaaccaattaggttcctgaatcttgtaggatgatcaacaaattgtcaagaaacgtaaaacagaacttggtggaacattttctgttgcgagctggattgttttcattggtttattcgctgcgtgagtttgataacttcagaatttagtgcttcctttggtttttgttaacttagtcagtttcttcacaggctgctttatcaaatcataaccaagagaacaattgaagttcacaatgtgagagctactggttctccagatttgatctcattcgagaacgatttggagtttaacatcaccgctgtttcggatatgagttgctctaatttacgcggtattgggaacgtggtcatgggtaatcccgggtttagcgagttcaaagttgctgctctttctagtttaggaagctatacttgtaagaatacaacttcaggaccaacagtgaatttcaaatgtaccaaatgtcgtctcaccaacgattacatatatatctcgtggcatttcgttgatcttcctgattcgcctgctgctgctgttggatttcagtttaactttacgtctaagaatggacctaacgagaagcatatgagttttgttagtggcactctgagaaacggaagcattctcgatgaaagtccggttactttccgtggaaccgaagggaatatattgaagtttaatctgtttcctcggatttaccatcatttgcatgatctaaagctaatccaacctctctttcacgagtttatccctggctctgtttaccgagacactactcagcttcaggcatctatgggaaggtcaacagatggcatactcaatacgacattgttcatcaactatctctctgcttatattgttgagatagaccatgaaaatatactcggtcctgttagcttccttgccgatcttggtggtttgtattgcatcagtattggcatatttttctacctactagtgcagtgtgagtacaggatcaagaagctgcgaaatgaagatactgttttcaggaagataaggaatcgtcgtaaagctctagatcactgggataaactgagaagatatgttgcatacacatgggattgcagcatattggtcaatgatgccatcaaaacgacaaaggtatcaggaatgtgtggtttaacgagacctccaacatcttctaatagctcggaacacggggaatcgatcatggcgaacaagaagcctaacttaagtattgagaagaatgtgatttcacaacctgcaagtttagaactgagctcttttgattcggcttcttctctggctcatggagataatttctcaaataaaaagagtataactcatccaatttctcatagtgaagacgtttcaatccctccacctcctccaatggagttcattgaaggatcttctggttcagaagtggacgcaatggatatcaagaataaatttcaacttctttacgactacaatgtattgcttagggaaaaacttttagagactcagtctttgcttaatactttggcacccaaaccaatagcatcatcatcttcaaccgtggaacgcagtgcctagaacaacgaggttgtttgacatgtattgtttgtatactccctgtaacttccacatttattgaacaaaggaatgactgatgcttgttgtatctttgtgaatatacctagttgctaatagtaacaaattttcgctc

SEQ ID NO: 22271 - protein, 415 aa, Arabidopsis thaliana
  peptide (1)..(415): Ceres Seq. ID no. 12327302
MSCSNLRGIGNVVMGNPGFSEFKVAALSSLGSYTCKNTTSGPTVNFKCTKCRLTNDYIYISWHFVDLPDSPAAAVGFQFNFTSKNGPNEKHMSFVSGTLRNGSILDESPVTFRGTEGNILKFNLFPRIYHHLHDLKLIQPLFHEFIPGSVYRDTTQLQASMGRSTDGILNTTLFINYLSAYIVEIDHENILGPVSFLADLGGLYCISIGIFFYLLVQCEYRIKKLRNEDTVFRKIRNRRKALDHWDKLRRYVAYTWDCSILVNDAIKTTKVSGMCGLTRPPTSSNSSEHGESIMANKKPNLSIEKNVISQPASLELSSFDSASSLAHGDNFSNKKSITHPISHSEDVSIPPPPPMEFIEGSSGSEVDAMDIKNKFQLLYDYNVLLREKLLETQSLLNTLAPKPIASSSSTVERSA

SEQ ID NO: 22272 - protein, 402 aa, Arabidopsis thaliana
  peptide (1)..(402): Ceres Seq. ID no. 12327303
MGNPGFSEFKVAALSSLGSYTCKNTTSGPTVNFKCTKCRLTNDYIYISWHFVDLPDSPAAAVGFQFNFTSKNGPNEKHMSFVSGTLRNGSILDESPVTFRGTEGNILKFNLFPRIYHHLHDLKLIQPLFHEFIPGSVYRDTTQLQASMGRSTDGILNTTLFINYLSAYIVEIDHENILGPVSFLADLGGLYCISIGIFFYLLVQCEYRIKKLRNEDTVFRKIRNRRKALDHWDKLRRYVAYTWDCSILVNDAIKTTKVSGMCGLTRPPTSSNSSEHGESIMANKKPNLSIEKNVISQPASLELSSFDSASSLAHGDNFSNKKSITHPISHSEDVSIPPPPPMEFIEGSSGSEVDAMDIKNKFQLLYDYNVLLREKLLETQSLLNTLAPKPIASSSSTVERSA

SEQ ID NO: 22273 - protein, 324 aa, Arabidopsis thaliana
  peptide (1)..(324): Ceres Seq. ID no. 12327304
MSFVSGTLRNGSILDESPVTFRGTEGNILKFNLFPRIYHHLHDLKLIQPLFHEFIPGSVYRDTTQLQASMGRSTDGILNTTLFINYLSAYIVEIDHENILGPVSFLADLGGLYCISIGIFFYLLVQCEYRIKKLRNEDTVFRKIRNRRKALDHWDKLRRYVAYTWDCSILVNDAIKTTKVSGMCGLTRPPTSSNSSEHGESIMANKKPNLSIEKNVISQPASLELSSFDSASSLAHGDNFSNKKSITHPISHSEDVSIPPPPPMEFIEGSSGSEVDAMDIKNKFQLLYDYNVLLREKLLETQSLLNTLAPKPIASSSSTVERSA

SEQ ID NO: 22274 - DNA, 1689 bp, Arabidopsis thaliana
  misc_feature (1)..(1689): Ceres Seq. ID no. 13488203
  misc_feature (1)..(1689): Ortholog of  Ceres SEQ ID NO 13596935 as cited in SEQ ID NO 63031
  misc_feature (1)..(1689): Ortholog of  Ceres SEQ ID NO 15179123 as cited in SEQ ID NO 0
cgatagaaatagaaggcgaagagataatttccaaaaacaagaaaaacctctaagctcaaaagatgttgttgagaacgatggcggcgacttccccgcggccaccaccgtcaacatccctaacatctcagcagccaccatcacccccctcacagcttcccctccgtacaatgccgggatcgtacggctggccgttggttggaccattatcggaccgtttagattacttctggttccaaggacccgataagtttttccggacaagagctgagaagtataagagcactgtgttccgtacaaatattcctccgacgtttcctttcttcggcaacgttaaccctaacatcgtcgccgttcttgacgtcaagtcttttagccatctttttgacatggatctagttgataaaagagatgttctcatcggagacttccggcctagccttgggttctacggcggcgttcgtgttggagtttatctcgacactactgagccaaagcacgccaagataaaaggtttcgctatggaaacactaaaacgaagctcaaaagtatggctacaagagcttcgttcaaacctaaacattttctggggaacaatcgaatccgaaatctccaaaaacggtgccgcttcatatatcttccctctccaacgttgcatcttcagtttcctctgcgcctctctcgccggcgttgacgcttccgtatcgccggacatcgctgagaacggttggaaaacaatcaatacttggcttgcgttgcaagttattcccactgctaaacttggcgtagttcctcagcctcttgaagagattttacttcatacttggccttatccttctctcttaatcgccggaaattacaaaaagctttacaatttcatcgacgagaacgccggagattgtctccggttaggtcaagaagaattcgggttgacccgagatgaggctattcaaaatcttctctttgttttaggttttaatgcctacgggggcttttccgtcttcttaccttctttgatcgggagaataaccggcgacaattccggtttacaggagaggattagaaccgaagtcaggagagtttgcggatccgggtcggatcttaatttcaagacggttaacgaaatggagctggttaaatccgtggtttacgaaacgctgcgttttagtcctccggttccgctgcaattcgcacgtgcgaggaaagattttcagataagttcacacgatgctgtttttgaggtcaagaaaggtgagcttctttgtggttatcagccgcttgtgatgagagacgctaatgtttttgacgaaccggaggaatttaaaccggaccggtatgtaggtgagaccgggtctgaattgctgaattatctctactggtctaacggtccacaaaccggtaccccgagcgcgtcgaacaaacagtgtgcagctaaggacattgtcactctcacggcttccttgctcgttgccgatttatttctccggtatgatacgattactggtgactccggttcaattaaagctgttgttaaagctaaataagttaaagattgattagtgtttaatgttatgtaatcaatcttcaacggtttcatttgttcggagtgtataaattatatgtaaactaaaataatccgaattgaaactcaaattgttatgttagatggtgttgctatgttagagagatttt

SEQ ID NO: 22275 - protein, 492 aa, Arabidopsis thaliana
  peptide (1)..(492): Ceres Seq. ID no. 13488204
MLLRTMAATSPRPPPSTSLTSQQPPSPPSQLPLRTMPGSYGWPLVGPLSDRLDYFWFQGPDKFFRTRAEKYKSTVFRTNIPPTFPFFGNVNPNIVAVLDVKSFSHLFDMDLVDKRDVLIGDFRPSLGFYGGVRVGVYLDTTEPKHAKIKGFAMETLKRSSKVWLQELRSNLNIFWGTIESEISKNGAASYIFPLQRCIFSFLCASLAGVDASVSPDIAENGWKTINTWLALQVIPTAKLGVVPQPLEEILLHTWPYPSLLIAGNYKKLYNFIDENAGDCLRLGQEEFGLTRDEAIQNLLFVLGFNAYGGFSVFLPSLIGRITGDNSGLQERIRTEVRRVCGSGSDLNFKTVNEMELVKSVVYETLRFSPPVPLQFARARKDFQISSHDAVFEVKKGELLCGYQPLVMRDANVFDEPEEFKPDRYVGETGSELLNYLYWSNGPQTGTPSASNKQCAAKDIVTLTASLLVADLFLRYDTITGDSGSIKAVVKAK

SEQ ID NO: 22276 - protein, 487 aa, Arabidopsis thaliana
  peptide (1)..(487): Ceres Seq. ID no. 13488205
MAATSPRPPPSTSLTSQQPPSPPSQLPLRTMPGSYGWPLVGPLSDRLDYFWFQGPDKFFRTRAEKYKSTVFRTNIPPTFPFFGNVNPNIVAVLDVKSFSHLFDMDLVDKRDVLIGDFRPSLGFYGGVRVGVYLDTTEPKHAKIKGFAMETLKRSSKVWLQELRSNLNIFWGTIESEISKNGAASYIFPLQRCIFSFLCASLAGVDASVSPDIAENGWKTINTWLALQVIPTAKLGVVPQPLEEILLHTWPYPSLLIAGNYKKLYNFIDENAGDCLRLGQEEFGLTRDEAIQNLLFVLGFNAYGGFSVFLPSLIGRITGDNSGLQERIRTEVRRVCGSGSDLNFKTVNEMELVKSVVYETLRFSPPVPLQFARARKDFQISSHDAVFEVKKGELLCGYQPLVMRDANVFDEPEEFKPDRYVGETGSELLNYLYWSNGPQTGTPSASNKQCAAKDIVTLTASLLVADLFLRYDTITGDSGSIKAVVKAK

SEQ ID NO: 22277 - protein, 457 aa, Arabidopsis thaliana
  peptide (1)..(457): Ceres Seq. ID no. 13488206
MPGSYGWPLVGPLSDRLDYFWFQGPDKFFRTRAEKYKSTVFRTNIPPTFPFFGNVNPNIVAVLDVKSFSHLFDMDLVDKRDVLIGDFRPSLGFYGGVRVGVYLDTTEPKHAKIKGFAMETLKRSSKVWLQELRSNLNIFWGTIESEISKNGAASYIFPLQRCIFSFLCASLAGVDASVSPDIAENGWKTINTWLALQVIPTAKLGVVPQPLEEILLHTWPYPSLLIAGNYKKLYNFIDENAGDCLRLGQEEFGLTRDEAIQNLLFVLGFNAYGGFSVFLPSLIGRITGDNSGLQERIRTEVRRVCGSGSDLNFKTVNEMELVKSVVYETLRFSPPVPLQFARARKDFQISSHDAVFEVKKGELLCGYQPLVMRDANVFDEPEEFKPDRYVGETGSELLNYLYWSNGPQTGTPSASNKQCAAKDIVTLTASLLVADLFLRYDTITGDSGSIKAVVKAK

SEQ ID NO: 22278 - DNA, 495 bp, Arabidopsis thaliana
  misc_feature (1)..(495): Ceres Seq. ID no. 12578716
  misc_feature (1)..(495): Ortholog of  Ceres SEQ ID NO 12612330 as cited in SEQ ID NO 56418
  misc_feature (1)..(495): Ortholog of  Ceres SEQ ID NO 13664295 as cited in SEQ ID NO 61486
  misc_feature (1)..(495): Ortholog of  Ceres SEQ ID NO 15179147 as cited in SEQ ID NO 0
caaactcgattagcaccaacgctaaattcgaaatccgaagccctaaacgcgtccagattaagtttgagcaaggcgtaattgggacgcctcagctaacggattctattgagataccggaatatgtagaggttcttggtcaaaagattgatcttaacccgatcagagggttacttacctcggtgcaagacacagcctcgtctgtggctagaaccatatcaagccaaccaccgttgaaattctctttgccggcggacaatgcgcagtcttggctactcacgacttatctagacaaagacattcggatctctagaggagacggtggaagtgtctttgtgcttatcaaagaaggaagccctctcttgaatccttgaacttggtcaaaatatatgtgtctctcttgtcgttgtgttaagtgagacaaatatatatagtgttgttgtaggtttacttcttaatcgttattatgaacttgatgataatgaatataatgttttt

SEQ ID NO: 22279 - protein, 122 aa, Arabidopsis thaliana
  peptide (1)..(122): Ceres Seq. ID no. 12578717
NSISTNAKFEIRSPKRVQIKFEQGVIGTPQLTDSIEIPEYVEVLGQKIDLNPIRGLLTSVQDTASSVARTISSQPPLKFSLPADNAQSWLLTTYLDKDIRISRGDGGSVFVLIKEGSPLLNP

SEQ ID NO: 22280 - DNA, 911 bp, Arabidopsis thaliana
  misc_feature (1)..(911): Ceres Seq. ID no. 12334617
  misc_feature (1)..(911): Ortholog of  Ceres SEQ ID NO 13589868 as cited in SEQ ID NO 55521
  misc_feature (1)..(911): Ortholog of  Ceres SEQ ID NO 14312250 as cited in SEQ ID NO 59168
  misc_feature (1)..(911): Ortholog of  Ceres SEQ ID NO 15173326 as cited in SEQ ID NO 63793
  misc_feature (1)..(911): Ortholog of  Ceres SEQ ID NO 12617659 as cited in SEQ ID NO 65286
  misc_feature (1)..(911): Ortholog of  Ceres SEQ ID NO 12780566 as cited in SEQ ID NO 65822
  misc_feature (1)..(911): Ortholog of  Ceres SEQ ID NO 15179979 as cited in SEQ ID NO 0
gcgtcatcgcgtttctcttaagcttctctcacatttctctttcaaatttcttcgagtctctctcgctctctccgtttcttcgcggtctctctctctcagatctctccgaaacattcttcgtagtgaagcaaaatggggttgagtttcgccaagctgtttagcaggctttttgccaagaaggagatgcgaattctgatggttggtcttgatgctgctggtaagaccacaatcttgtacaagctcaagctcggagagattgtcaccaccatccctactattggtttcaatgtggaaactgtggaatacaagaacattagtttcaccgtgtgggatgtcgggggtcaggacaagatccgtcccttgtggagacactacttccagaacactcaaggtctaatctttgttgttgatagcaatgacagagacagagttgttgaggctcgagatgaactccacaggatgctgaatgaggacgagctgcgtgatgctgtgttgcttgtgtttgccaacaagcaagatcttccaaatgctatgaacgctgctgaaatcacagataagcttggccttcactccctccgtcagcgtcattggtatatccagagcacatgtgccacttcaggtgaagggctttatgaaggtctggactggctctccaacaacatcgctggcaaggcatgatgagggagaaattgcgttgcatcgagatgattctgtctgctgtgttgggatctctctctgtcttgatgcaagagagattataaatattatctgaacctttttgcttttttgggtatgtgaatgtttcttattgtgcaagtagatggtcttgtacctaaaaatttactagaagaacccttttaaatagctttcgtgtattgtgcctggattaatatgattgattgttttgcttt

SEQ ID NO: 22281 - protein, 181 aa, Arabidopsis thaliana
  peptide (1)..(181): Ceres Seq. ID no. 12334618
MGLSFAKLFSRLFAKKEMRILMVGLDAAGKTTILYKLKLGEIVTTIPTIGFNVETVEYKNISFTVWDVGGQDKIRPLWRHYFQNTQGLIFVVDSNDRDRVVEARDELHRMLNEDELRDAVLLVFANKQDLPNAMNAAEITDKLGLHSLRQRHWYIQSTCATSGEGLYEGLDWLSNNIAGKA

SEQ ID NO: 22282 - protein, 164 aa, Arabidopsis thaliana
  peptide (1)..(164): Ceres Seq. ID no. 12334619
MRILMVGLDAAGKTTILYKLKLGEIVTTIPTIGFNVETVEYKNISFTVWDVGGQDKIRPLWRHYFQNTQGLIFVVDSNDRDRVVEARDELHRMLNEDELRDAVLLVFANKQDLPNAMNAAEITDKLGLHSLRQRHWYIQSTCATSGEGLYEGLDWLSNNIAGKA

SEQ ID NO: 22283 - protein, 160 aa, Arabidopsis thaliana
  peptide (1)..(160): Ceres Seq. ID no. 12334620
MVGLDAAGKTTILYKLKLGEIVTTIPTIGFNVETVEYKNISFTVWDVGGQDKIRPLWRHYFQNTQGLIFVVDSNDRDRVVEARDELHRMLNEDELRDAVLLVFANKQDLPNAMNAAEITDKLGLHSLRQRHWYIQSTCATSGEGLYEGLDWLSNNIAGKA

SEQ ID NO: 22284 - DNA, 1451 bp, Arabidopsis thaliana
  misc_feature (1)..(1451): Ceres Seq. ID no. 13487624
  misc_feature (1)..(1451): Ortholog of  Ceres SEQ ID NO 13655660 as cited in SEQ ID NO 63727
gctctcactcccaaaacgatgtcgtctctatctcgcgttctccgtggcaccttcaacacttgcccgatccgccgtttttcctccgccgccaccgtagtctccgaacccaccgcagtcactgccgcaatctcgcctcctcaaaagtcactaaccagtctcgtgaatggcgaacgaaaccccaaacggatcgtggagaaattcaagaaggcatgtgagtcggagcggttccggaccaacatagccgtgtacgatagaaccgtgcgccgtctcgtagccgcaaagagattacactatgtcgaagagattttggaggagcagaagaagtaccgcgacatgtcaaaagagggattcgcggcgaggatcatttctctgtatggaaaagccggcatgtttgaaaatgcacagaaggtgttcgaagaaatgccaaacagagactgcaagaggtcagtgttgtccttcaatgccttgcttagtgcatatagactttccaagaaattcgatgtggttgaagaacttttcaatgagttacctggaaagttatcaatcaaaccagatattgtatcttacaatactttgattaaggcattgtgtgagaaggattctttacctgaagctgttgcattgcttgatgagattgagaacaagggactaaaacctgatatagttacattcaacacacttttactgtcttcgtatctaaagggacagtttgagctaggggaagagatatgggctaaaatggtggagaagaatgtagcaatagacatcaggacttacaatgctaggctgcttggattagccaatgaggcgaaatcgaaagagctagtaaatctctttggagaacttaaggctagtggtctcaaacctgatgttttcagtttcaatgctatgattagaggatctatcaacgaaggaaaaatggacgaagctgaagcgtggtacaaagaaattgtgaagcatggttatcgtcctgataaagctacctttgctttattgcttcctgctatgtgtaaagcaggtgactttgagtctgcgattgagctcttcaaggagacattcagtaagcggtatcttgtcggtcaaacaacgttgcagcagttagttgatgaattggtgaaagggtctaagagagaagaagctgaggagattgtgaagattgcaaagaccaatgatttcttaaagttgaagctaaatttgccgtcccaggaagagtaagtcatttgctactctctcactaagtgtctcgttgaattgtgtctgagcagcttaagctatatgtatttgctggtgttgctttgtggcttttctacttctctaaactttcctctgtggaagtaagacttgtttctttctatgtagtttcgcttatttcactggtgcaaaaaacagcatgtagtcgaggtttaggcagaagaaaccctacaaatttaataaattttggttatttgttt

SEQ ID NO: 22285 - protein, 404 aa, Arabidopsis thaliana
  peptide (1)..(404): Ceres Seq. ID no. 13487625
ALTPKTMSSLSRVLRGTFNTCPIRRFSSAATVVSEPTAVTAAISPPQKSLTSLVNGERNPKRIVEKFKKACESERFRTNIAVYDRTVRRLVAAKRLHYVEEILEEQKKYRDMSKEGFAARIISLYGKAGMFENAQKVFEEMPNRDCKRSVLSFNALLSAYRLSKKFDVVEELFNELPGKLSIKPDIVSYNTLIKALCEKDSLPEAVALLDEIENKGLKPDIVTFNTLLLSSYLKGQFELGEEIWAKMVEKNVAIDIRTYNARLLGLANEAKSKELVNLFGELKASGLKPDVFSFNAMIRGSINEGKMDEAEAWYKEIVKHGYRPDKATFALLLPAMCKAGDFESAIELFKETFSKRYLVGQTTLQQLVDELVKGSKREEAEEIVKIAKTNDFLKLKLNLPSQEE

SEQ ID NO: 22286 - protein, 398 aa, Arabidopsis thaliana
  peptide (1)..(398): Ceres Seq. ID no. 13487626
MSSLSRVLRGTFNTCPIRRFSSAATVVSEPTAVTAAISPPQKSLTSLVNGERNPKRIVEKFKKACESERFRTNIAVYDRTVRRLVAAKRLHYVEEILEEQKKYRDMSKEGFAARIISLYGKAGMFENAQKVFEEMPNRDCKRSVLSFNALLSAYRLSKKFDVVEELFNELPGKLSIKPDIVSYNTLIKALCEKDSLPEAVALLDEIENKGLKPDIVTFNTLLLSSYLKGQFELGEEIWAKMVEKNVAIDIRTYNARLLGLANEAKSKELVNLFGELKASGLKPDVFSFNAMIRGSINEGKMDEAEAWYKEIVKHGYRPDKATFALLLPAMCKAGDFESAIELFKETFSKRYLVGQTTLQQLVDELVKGSKREEAEEIVKIAKTNDFLKLKLNLPSQEE

SEQ ID NO: 22287 - protein, 293 aa, Arabidopsis thaliana
  peptide (1)..(293): Ceres Seq. ID no. 13487627
MSKEGFAARIISLYGKAGMFENAQKVFEEMPNRDCKRSVLSFNALLSAYRLSKKFDVVEELFNELPGKLSIKPDIVSYNTLIKALCEKDSLPEAVALLDEIENKGLKPDIVTFNTLLLSSYLKGQFELGEEIWAKMVEKNVAIDIRTYNARLLGLANEAKSKELVNLFGELKASGLKPDVFSFNAMIRGSINEGKMDEAEAWYKEIVKHGYRPDKATFALLLPAMCKAGDFESAIELFKETFSKRYLVGQTTLQQLVDELVKGSKREEAEEIVKIAKTNDFLKLKLNLPSQEE

SEQ ID NO: 22288 - DNA, 1235 bp, Arabidopsis thaliana
  misc_feature (1)..(1235): Ceres Seq. ID no. 12324896
  misc_feature (1)..(1235): Ortholog of  Ceres SEQ ID NO 12636774 as cited in SEQ ID NO 372
  misc_feature (1)..(1235): Ortholog of  Ceres SEQ ID NO 13582350 as cited in SEQ ID NO 56734
  misc_feature (1)..(1235): Ortholog of  Ceres SEQ ID NO 12476493 as cited in SEQ ID NO 58163
  misc_feature (1)..(1235): Ortholog of  Ceres SEQ ID NO 13597295 as cited in SEQ ID NO 63743
  misc_feature (1)..(1235): Ortholog of  Ceres SEQ ID NO 12617090 as cited in SEQ ID NO 64005
  misc_feature (1)..(1235): Ortholog of  Ceres SEQ ID NO 13597233 as cited in SEQ ID NO 64370
acacctatgaagcaatggaagaagagagagaccacaatgcatctgagtcgtctctcccatctttgagcaagcagttggagagctcgactcttggaggaagcgcggtcgacgttcccgtcgttgatctaagcgtttctgatgaagacttcttggtgcgtgaggtggtgaaagcgagtgaagagtggggagtttttcaggtggttaaccatgggattccaaccgagctgatgcggcagctgcaaatggttggtacgcagtttttcgagctcccggatgctgaaaaggaaaccgtggcgaaagaggaagacttcgaaggatacaagaagaattatctaggaggtataaacaattgggacgaacatctctttcacagactctctccaccctcaattatcaattataaatattggcctaagaatcctcctcaatatagggaggtgacggaggagtatacaaagcatatgaagaggctaacggagaagattcttggttggttatcagagggattagggttacagcgtgagacgttcacgcaaagtataggtggtgacacggcagagtatgtgcttagggtcaatttctatccgccaactcaagatacggaattagtcataggagccgcggcgcacagcgatatgggtgcaatcgcactcctcatcccaaatgaggttcctggacttcaagccttcaaggacgaacaatggttggaccttgactatatcgactccgccgtggttgttatcattggcgatcaactcatgaggatgaccaacgggaggttaaagaacgttcttcacagagcgaagtctgataaggacaaattgaggatttcttggcctgtttttgttgcacctagggctgatatgtccgtcggacctttgccggagtttaccggagacgagaatcctcccaaattcgagactttaatatataatgactatattgaccagaagataagaggctgggcgctcgaagatcttcctgtctactgaaaaccctcaatacctacaataaatgatgatgaattgttcaaggagacaattctttaatagcttccttttgagggtttctatatgtggtacaataaaactatttcaagaatttaaaataatatgtggaaaagctaagcggttagacaaaatattcatctgattgatgctatacattcaaatgtaatcgctcctatcctatgtacgtagtgattaacctcaaaaataatcagcttaagttgctgt

SEQ ID NO: 22289 - protein, 329 aa, Arabidopsis thaliana
  peptide (1)..(329): Ceres Seq. ID no. 12324897
TYEAMEEERDHNASESSLPSLSKQLESSTLGGSAVDVPVVDLSVSDEDFLVREVVKASEEWGVFQVVNHGIPTELMRQLQMVGTQFFELPDAEKETVAKEEDFEGYKKNYLGGINNWDEHLFHRLSPPSIINYKYWPKNPPQYREVTEEYTKHMKRLTEKILGWLSEGLGLQRETFTQSIGGDTAEYVLRVNFYPPTQDTELVIGAAAHSDMGAIALLIPNEVPGLQAFKDEQWLDLDYIDSAVVVIIGDQLMRMTNGRLKNVLHRAKSDKDKLRISWPVFVAPRADMSVGPLPEFTGDENPPKFETLIYNDYIDQKIRGWALEDLPVY

SEQ ID NO: 22290 - protein, 325 aa, Arabidopsis thaliana
  peptide (1)..(325): Ceres Seq. ID no. 12324898
MEEERDHNASESSLPSLSKQLESSTLGGSAVDVPVVDLSVSDEDFLVREVVKASEEWGVFQVVNHGIPTELMRQLQMVGTQFFELPDAEKETVAKEEDFEGYKKNYLGGINNWDEHLFHRLSPPSIINYKYWPKNPPQYREVTEEYTKHMKRLTEKILGWLSEGLGLQRETFTQSIGGDTAEYVLRVNFYPPTQDTELVIGAAAHSDMGAIALLIPNEVPGLQAFKDEQWLDLDYIDSAVVVIIGDQLMRMTNGRLKNVLHRAKSDKDKLRISWPVFVAPRADMSVGPLPEFTGDENPPKFETLIYNDYIDQKIRGWALEDLPVY

SEQ ID NO: 22291 - protein, 254 aa, Arabidopsis thaliana
  peptide (1)..(254): Ceres Seq. ID no. 12324899
MRQLQMVGTQFFELPDAEKETVAKEEDFEGYKKNYLGGINNWDEHLFHRLSPPSIINYKYWPKNPPQYREVTEEYTKHMKRLTEKILGWLSEGLGLQRETFTQSIGGDTAEYVLRVNFYPPTQDTELVIGAAAHSDMGAIALLIPNEVPGLQAFKDEQWLDLDYIDSAVVVIIGDQLMRMTNGRLKNVLHRAKSDKDKLRISWPVFVAPRADMSVGPLPEFTGDENPPKFETLIYNDYIDQKIRGWALEDLPVY

SEQ ID NO: 22292 - DNA, 1107 bp, Arabidopsis thaliana
  misc_feature (1)..(1107): Ceres Seq. ID no. 12334724
  misc_feature (1)..(1107): Ortholog of  Ceres SEQ ID NO 15169248 as cited in SEQ ID NO 55022
  misc_feature (1)..(1107): Ortholog of  Ceres SEQ ID NO 14315042 as cited in SEQ ID NO 56959
  misc_feature (1)..(1107): Ortholog of  Ceres SEQ ID NO 12608620 as cited in SEQ ID NO 60192
  misc_feature (1)..(1107): Ortholog of  Ceres SEQ ID NO 15173077 as cited in SEQ ID NO 64566
  misc_feature (1)..(1107): Ortholog of  Ceres SEQ ID NO 13662898 as cited in SEQ ID NO 66199
  misc_feature (1)..(1107): Ortholog of  Ceres SEQ ID NO 13654314 as cited in SEQ ID NO 67914
tctctgattattttctcaaattatttaattaatttcttcttcttcatcaccaccaattacactcaaaattatggtgtttgcacatttgaaccttcttcggaagattgtggggattataggaaacttcatcgctctatgtctgttcttgtcaccaacgccaacatttgttcggatagtgaaaaagaagtcagtggaggaatattcaccaataccgtatttagcgactcttataaactgtttggtttgggttctttacggactaccaacggtgcatccggacagcacattggtcattacaataaacggcacagggatcttgatcgaaatcgtattccttacgatctttttcgtttattgtggccgccaaaaacagcggttgataatatccgctgttatagcggctgaaaccgcgttcatagctattcttgcggttttggtattaactctccaacacactaccgaaaaacgtactatgagtgttggaatcgtatgttgcgttttcaacgttatgatgtacgcttctccattgtctgttatgaaaatggtaataaaaacaaaaagtgtggagttcatgccgttttggttatcggtagctggatttctaaacgcaggcgtttggacaatttatgctctcatgcctttcgacccattcatggctataccaaatggaattggatgtttatttgggctagctcaactaatattgtatggtgcctactataagtccaccaaaagaataatggcggaaagagaaaaccaacctggttacgtcggtttatcaagtgcgatcgctcgtaccggatctgagaaaaccgcgaataccaaccaagaacctaacaatgtttaatttggtctagtgttattaaacttcggattatgggatttttttcccatccaagactcttagtatatgaataagatggaaactttcattactttgtttttctttttgtctaaaattccattactttgttttaaaattcaaactttgtaatgcaattttgacgtcccttttttgaggagcaataagctacttttcaaagtttctggtgtaatgttcaaacttttatgattatgcggggttaaattaaaataaattagtcgtcg

SEQ ID NO: 22293 - protein, 258 aa, Arabidopsis thaliana
  peptide (1)..(258): Ceres Seq. ID no. 12334725
MVFAHLNLLRKIVGIIGNFIALCLFLSPTPTFVRIVKKKSVEEYSPIPYLATLINCLVWVLYGLPTVHPDSTLVITINGTGILIEIVFLTIFFVYCGRQKQRLIISAVIAAETAFIAILAVLVLTLQHTTEKRTMSVGIVCCVFNVMMYASPLSVMKMVIKTKSVEFMPFWLSVAGFLNAGVWTIYALMPFDPFMAIPNGIGCLFGLAQLILYGAYYKSTKRIMAERENQPGYVGLSSAIARTGSEKTANTNQEPNNV

SEQ ID NO: 22294 - protein, 134 aa, Arabidopsis thaliana
  peptide (1)..(134): Ceres Seq. ID no. 12334726
SLIIFSNYLINFFFFITTNYTQNYGVCTFEPSSEDCGDYRKLHRSMSVLVTNANICSDSEKEVSGGIFTNTVFSDSYKLFGLGSLRTTNGASGQHIGHYNKRHRDLDRNRIPYDLFRLLWPPKTAVDNIRCYSG

SEQ ID NO: 22295 - DNA, 1504 bp, Arabidopsis thaliana
  misc_feature (1)..(1504): Ceres Seq. ID no. 12335092
  misc_feature (1)..(1504): Ortholog of  Ceres SEQ ID NO 13663419 as cited in SEQ ID NO 66561
aaaagggcagtctaactttccttttctaatgattataaatatcctttttccgtaaaaagaaattaaaagaaaatgggttcgacactaaagcatctgcttttgcttctacttttttgattcgtcatgttgattctgctgctatagtcaagtctcttcctggtttagaaggccgtcttcctttcgaactcgaaaccgggtacattggtattggagaggaagaggacatacaattgttctactatttcatcaaatctgagaacaatccaaaagaagaccctcttcttctatggttagatggaggacctggatgttcttctctcggtggccttctttttgagaacggaccggtggctttgaagtctgcggtttacaatggaagtaatccttctttgttctccactacatattcatggacaaagatggcaaacataatatacttggatcagccagttggatctggtttctcttactcaagaactccaattggaaaatctagtgacacaagtgaagttaagaggatccatgagtttcttcaaaagtggctaagcaagcatccacagtttttctccaaccctttttacgtcaccggagattcttactctggtatgattgttccggccctcgttcaagaaatctctaaaggaaattatatatgttgcaaacatcttataaatctacagggttacgtgctcggaaacccgataacatatgctgaacatgagaaaaactatcgtattccattttctcatggaatgtcattaatctctgatgaactctatgagtcactgaagagaaactgcaaaggaaattatgaaaatgtggatccacgtaacacaaaatgtgtgagacttgttgaagaataccataagtgcactgacaaaataaatacgcaacatatattaataccagattgcgataaaaaaggacatggaataacatctcctgattgctattattatctgtattttcttattgaatgttgggccaacaacgagagagttcgtgaagctcttcatgttactaaggggactaaaggacaatggcagcgatgtaattggactattccatacgataacaacatcataagcagcgtaccatatcatatggataacagcatcaatggatatcgatctcttatttacagtggtgatcatgacatcacaatgcctttccaagcaactcaagcctggataaaatctctaaattactccatcgttgatgactggaggccttggatgataaacgatcaaatcgctggatacacgagaacttattccaataagatgacatttgctactgtcaaaggaggtggacacacggcagagtatctaccaaacgagagttccatcatgttccaaaggtggatcagtggccaacctttgtaatagaaggcctcttttagaggcttattgcctgtacgtattacatatattaatattcacgctacgcgcaattcttttgttttgagatgtttacagaaaataggataaaaagtttgtccttg

SEQ ID NO: 22296 - protein, 321 aa, Arabidopsis thaliana
  peptide (1)..(321): Ceres Seq. ID no. 12335093
MANIIYLDQPVGSGFSYSRTPIGKSSDTSEVKRIHEFLQKWLSKHPQFFSNPFYVTGDSYSGMIVPALVQEISKGNYICCKHLINLQGYVLGNPITYAEHEKNYRIPFSHGMSLISDELYESLKRNCKGNYENVDPRNTKCVRLVEEYHKCTDKINTQHILIPDCDKKGHGITSPDCYYYLYFLIECWANNERVREALHVTKGTKGQWQRCNWTIPYDNNIISSVPYHMDNSINGYRSLIYSGDHDITMPFQATQAWIKSLNYSIVDDWRPWMINDQIAGYTRTYSNKMTFATVKGGGHTAEYLPNESSIMFQRWISGQPL

SEQ ID NO: 22297 - protein, 259 aa, Arabidopsis thaliana
  peptide (1)..(259): Ceres Seq. ID no. 12335094
MIVPALVQEISKGNYICCKHLINLQGYVLGNPITYAEHEKNYRIPFSHGMSLISDELYESLKRNCKGNYENVDPRNTKCVRLVEEYHKCTDKINTQHILIPDCDKKGHGITSPDCYYYLYFLIECWANNERVREALHVTKGTKGQWQRCNWTIPYDNNIISSVPYHMDNSINGYRSLIYSGDHDITMPFQATQAWIKSLNYSIVDDWRPWMINDQIAGYTRTYSNKMTFATVKGGGHTAEYLPNESSIMFQRWISGQPL

SEQ ID NO: 22298 - protein, 210 aa, Arabidopsis thaliana
  peptide (1)..(210): Ceres Seq. ID no. 12335095
MSLISDELYESLKRNCKGNYENVDPRNTKCVRLVEEYHKCTDKINTQHILIPDCDKKGHGITSPDCYYYLYFLIECWANNERVREALHVTKGTKGQWQRCNWTIPYDNNIISSVPYHMDNSINGYRSLIYSGDHDITMPFQATQAWIKSLNYSIVDDWRPWMINDQIAGYTRTYSNKMTFATVKGGGHTAEYLPNESSIMFQRWISGQPL

SEQ ID NO: 22299 - DNA, 1314 bp, Arabidopsis thaliana
  misc_feature (1)..(1314): Ceres Seq. ID no. 12483444
  misc_feature (1)..(1314): Ortholog of  Ceres SEQ ID NO 13596474 as cited in SEQ ID NO 62169
  misc_feature (1)..(1314): Ortholog of  Ceres SEQ ID NO 13596969 as cited in SEQ ID NO 63375
  misc_feature (1)..(1314): Ortholog of  Ceres SEQ ID NO 13597519 as cited in SEQ ID NO 64759
  misc_feature (1)..(1314): Ortholog of  Ceres SEQ ID NO 13597870 as cited in SEQ ID NO 64982
  misc_feature (1)..(1314): Ortholog of  Ceres SEQ ID NO 12567001 as cited in SEQ ID NO 0
aaaactcaagagtggtgtagtgagagaagaaagatagagaaaaaaaatgggaggcaaaggtgtgatgatggtggcgatacttttcctttgggcactctctgcaacatctgaagcagtaacagagactgagccaggtttgatgatgaacttctacaaggacacgtgtcctcaggccgaagacatcatccgtgaacaagtcaaactcctctacaaacgccacaagaacaccgctttctcttggctccgtaacatcttccatgactgcgccgttgagtcatgtgatgcgtcgcttttgctggattcgacaagaagagagctaggagagaaagaacacgacaggagcttcggacttagaaactttaggtacatcgaggagatcaaggaagctctcgagagggagtgtcctggtgttgtctcatgttctgacattctcgtcttgtccgcaagagaaggcatcgaagcagtaggaggaccttatattcctttgaagacaggaaggagagatggacttaaaagcaggacggatatgctcgagtcatatcttcccgaccacaacgagagtatctccgtcgttcttgaaaagttcaaatccatcggtatcgacactcccggcctcgtcgccctcctagggtcacacagcgtgggaagaactcactgtgtcaagctggtccatcgtttgtaccctgaggtggacccgtccttaaacccggaccacgtccctcacatgctacacaagtgtcctgactcgatccctgacccaaaggcggtccagtacgtgcgtaacgaccgtggcacccccatggtgctagacaacaattactaccgtaacatcctagacaacaagggtttgctccttgtggaccatcagctcgcacacgacaaacgaaccagaccaatcgttaagaagatggctaaggaccaggcctacttcttcaaggagttcactagggcaatccagatcttatccgagaacaaccccttgactggctctaagggtgagatcaggaagcaatgtaatctcgcaaacaagaaccattgaagttggaaaaagtgagaaagacaggggctctggtgtgttgagttctctgcttggtacgaaccaagatgaataaaaaatcttttaagttaaatcaaagaaagggtgatgatgaatacatcatggtagtgaccacctccttcttttgtgtgttcagccttaatgctttaattatgatgttagtggctttgagttatttaatctaaatgttggctcttcgttgattttgggtttgtggtggggatgatataatgataatggaaaggatgtatgatatg

SEQ ID NO: 22300 - protein, 330 aa, Arabidopsis thaliana
  peptide (1)..(330): Ceres Seq. ID no. 12483445
MGGKGVMMVAILFLWALSATSEAVTETEPGLMMNFYKDTCPQAEDIIREQVKLLYKRHKNTAFSWLRNIFHDCAVESCDASLLLDSTRRELGEKEHDRSFGLRNFRYIEEIKEALERECPGVVSCSDILVLSAREGIEAVGGPYIPLKTGRRDGLKSRTDMLESYLPDHNESISVVLEKFKSIGIDTPGLVALLGSHSVGRTHCVKLVHRLYPEVDPSLNPDHVPHMLHKCPDSIPDPKAVQYVRNDRGTPMVLDNNYYRNILDNKGLLLVDHQLAHDKRTRPIVKKMAKDQAYFFKEFTRAIQILSENNPLTGSKGEIRKQCNLANKNH

SEQ ID NO: 22301 - protein, 324 aa, Arabidopsis thaliana
  peptide (1)..(324): Ceres Seq. ID no. 12483446
MMVAILFLWALSATSEAVTETEPGLMMNFYKDTCPQAEDIIREQVKLLYKRHKNTAFSWLRNIFHDCAVESCDASLLLDSTRRELGEKEHDRSFGLRNFRYIEEIKEALERECPGVVSCSDILVLSAREGIEAVGGPYIPLKTGRRDGLKSRTDMLESYLPDHNESISVVLEKFKSIGIDTPGLVALLGSHSVGRTHCVKLVHRLYPEVDPSLNPDHVPHMLHKCPDSIPDPKAVQYVRNDRGTPMVLDNNYYRNILDNKGLLLVDHQLAHDKRTRPIVKKMAKDQAYFFKEFTRAIQILSENNPLTGSKGEIRKQCNLANKNH

SEQ ID NO: 22302 - protein, 323 aa, Arabidopsis thaliana
  peptide (1)..(323): Ceres Seq. ID no. 12483447
MVAILFLWALSATSEAVTETEPGLMMNFYKDTCPQAEDIIREQVKLLYKRHKNTAFSWLRNIFHDCAVESCDASLLLDSTRRELGEKEHDRSFGLRNFRYIEEIKEALERECPGVVSCSDILVLSAREGIEAVGGPYIPLKTGRRDGLKSRTDMLESYLPDHNESISVVLEKFKSIGIDTPGLVALLGSHSVGRTHCVKLVHRLYPEVDPSLNPDHVPHMLHKCPDSIPDPKAVQYVRNDRGTPMVLDNNYYRNILDNKGLLLVDHQLAHDKRTRPIVKKMAKDQAYFFKEFTRAIQILSENNPLTGSKGEIRKQCNLANKNH

SEQ ID NO: 22303 - DNA, 686 bp, Arabidopsis thaliana
  misc_feature (1)..(686): Ceres Seq. ID no. 12420878
  misc_feature (1)..(686): Ortholog of  Ceres SEQ ID NO 15172768 as cited in SEQ ID NO 52234
aagcatttccccttttagagaagagagctgtgttggtttttgaggtaaaagaagagacccaatttcgatttggaggatagagacgaagaagaagacagctccgatggctgatcctgaactagaagctattagacagaggagaatgcaagagctcatggctcgacaaggcatgggtaagcagggcaatcagcagaatccagagcaagagaaacagcaggaagatgctaaaagggaagctgatgaacgtaggcaaatgatgcttagtcaagtattgtcttctcaagcccgagagagaattgctcgaattgctctggtgaaacctgagaaagctagaggtgtggaggatgttattttgagggctgctcagatgggacagatagttgagaaggtttctgaggaacggcttataacactgttggaacaaataaacagccaaactaccaagcaaacgaaagtcacgtaccaacggcgccgtggggtggacgacgattaggaaggaagaagaatattatgatgtgctttgtatatctatggagatctcactgttatgttagtgagttcacttaagatctacttaaatgtttctgttcaatatgtttattgtgagtgaatcttgattatcttccaaacacttgggatgagattaaagcaatctgaaactgaagctctacatttttatttttggc

SEQ ID NO: 22304 - protein, 129 aa, Arabidopsis thaliana
  peptide (1)..(129): Ceres Seq. ID no. 12420879
MADPELEAIRQRRMQELMARQGMGKQGNQQNPEQEKQQEDAKREADERRQMMLSQVLSSQARERIARIALVKPEKARGVEDVILRAAQMGQIVEKVSEERLITLLEQINSQTTKQTKVTYQRRRGVDDD

SEQ ID NO: 22305 - protein, 116 aa, Arabidopsis thaliana
  peptide (1)..(116): Ceres Seq. ID no. 12420880
MQELMARQGMGKQGNQQNPEQEKQQEDAKREADERRQMMLSQVLSSQARERIARIALVKPEKARGVEDVILRAAQMGQIVEKVSEERLITLLEQINSQTTKQTKVTYQRRRGVDDD

SEQ ID NO: 22306 - protein, 112 aa, Arabidopsis thaliana
  peptide (1)..(112): Ceres Seq. ID no. 12420881
MARQGMGKQGNQQNPEQEKQQEDAKREADERRQMMLSQVLSSQARERIARIALVKPEKARGVEDVILRAAQMGQIVEKVSEERLITLLEQINSQTTKQTKVTYQRRRGVDDD

SEQ ID NO: 22307 - DNA, 852 bp, Arabidopsis thaliana
  misc_feature (1)..(852): Ceres Seq. ID no. 12334035
  misc_feature (1)..(852): Ortholog of  Ceres SEQ ID NO 13597809 as cited in SEQ ID NO 64598
  misc_feature (1)..(852): Ortholog of  Ceres SEQ ID NO 12617960 as cited in SEQ ID NO 69051
  misc_feature (1)..(852): Ortholog of  Ceres SEQ ID NO 13589401 as cited in SEQ ID NO 0
aaaacaactattttacatagtgattacattcatttcattgttgtttcttaccgcagtaacttttatcttaataaatttgatccaaccatgccaatatttacgggatcgtcctccgattctgaagacgaaagaacgattcataaaacaactaagctcttcactcgtcaacgatctattcactctatatttggaggtggtaaagttgcggatattctgttatggagagagccgaaaatagcagcaacattggtgataggagtgagcatcttatggttcttaatggaagtagtggaatacaatttcataaccctaatttgtcatgcttccatgacctccatgctttttttcttcatttggtctactgcttctgattttctcaattgggaaagaccaataataccagaagttgtactagacgaatcttctttcaaacaattagcaagaagcttccatgttagattcaaccaaatcctcacaaagcttcttgacgttgcttgtggaagagatcctcctctcttttttctcacaacgatctcgctttatatcgtatccatcatcgggacatatttcaactttatgaatcttctcttcatagggtttgtaatcatgcaaaccttaccggttatgtatgagatgtacgaggacgacgtggatacagcggcgggtaagttgatgaggaagatgaagaagctgtacaagaaagtcgatacgaatgttcttagtaaaatcccaagaggaactgtcaaaaacaagaaatttacttaattctgatcattctttacttatagagataatgtgtttgctactgtatttatgcgacctcatcaacccaaattaatatacatatctgct

SEQ ID NO: 22308 - protein, 254 aa, Arabidopsis thaliana
  peptide (1)..(254): Ceres Seq. ID no. 12334036
KTTILHSDYIHFIVVSYRSNFYLNKFDPTMPIFTGSSSDSEDERTIHKTTKLFTRQRSIHSIFGGGKVADILLWREPKIAATLVIGVSILWFLMEVVEYNFITLICHASMTSMLFFFIWSTASDFLNWERPIIPEVVLDESSFKQLARSFHVRFNQILTKLLDVACGRDPPLFFLTTISLYIVSIIGTYFNFMNLLFIGFVIMQTLPVMYEMYEDDVDTAAGKLMRKMKKLYKKVDTNVLSKIPRGTVKNKKFT

SEQ ID NO: 22309 - protein, 225 aa, Arabidopsis thaliana
  peptide (1)..(225): Ceres Seq. ID no. 12334037
MPIFTGSSSDSEDERTIHKTTKLFTRQRSIHSIFGGGKVADILLWREPKIAATLVIGVSILWFLMEVVEYNFITLICHASMTSMLFFFIWSTASDFLNWERPIIPEVVLDESSFKQLARSFHVRFNQILTKLLDVACGRDPPLFFLTTISLYIVSIIGTYFNFMNLLFIGFVIMQTLPVMYEMYEDDVDTAAGKLMRKMKKLYKKVDTNVLSKIPRGTVKNKKFT

SEQ ID NO: 22310 - protein, 161 aa, Arabidopsis thaliana
  peptide (1)..(161): Ceres Seq. ID no. 12334038
MEVVEYNFITLICHASMTSMLFFFIWSTASDFLNWERPIIPEVVLDESSFKQLARSFHVRFNQILTKLLDVACGRDPPLFFLTTISLYIVSIIGTYFNFMNLLFIGFVIMQTLPVMYEMYEDDVDTAAGKLMRKMKKLYKKVDTNVLSKIPRGTVKNKKFT

SEQ ID NO: 22311 - DNA, 938 bp, Arabidopsis thaliana
  misc_feature (1)..(938): Ceres Seq. ID no. 12422723
  misc_feature (1)..(938): Ortholog of  Ceres SEQ ID NO 14308278 as cited in SEQ ID NO 55403
  misc_feature (1)..(938): Ortholog of  Ceres SEQ ID NO 12618176 as cited in SEQ ID NO 64489
  misc_feature (1)..(938): Ortholog of  Ceres SEQ ID NO 15179231 as cited in SEQ ID NO 0
atcacaccagattgtagtggatgatcggaaactaagacttcagtcatctgagactttacagtgtttgaggaacgaagattgtgagacacaatggctaaggatgaagccaagggattgctgaaaagtgaagagctctataaatatatactggagactagtgtgtacccacgcgagccagaggttctcagggagcttaggaacattactcataaccaccctcaagctggtatggctactgcaccagacgctggccagttgatggggatgctgctgaatctggtaaatgcaagaaagactatcgaggttggggttttcactggatactctcttctcctcactgctcttacgctaccagaagatggcaaggttatcgccattgacatgaatagagactcgtatgaaataggattgccggttataaagaaagctggtgttgaacacaaaattgatttcaaagagtctgaagctcttccagccctcgacgagcttttaaacaataaagtgaatgagggtggattcgacttcgcatttgtggatgcagacaagctgaattattggaactatcatgagaggcttattagattgatcaaggttggtgggatcatagtgtatgataacactctctggggaggatcagttgctgaaccggactcgtccacgcccgagtggaggatagaagtcaagaaagcaaccctcgagctgaacaagaaactctcggctgatcagcgtgtgcagatctcgcaagctgcgcttggcgatggtatcactatttgcaggaggttatattgagcgagtattgttgttctttgtgatctttagggtcatatgattgtgagccctttatattgagctattgtgatgcaagagtgttattgttctatgtgatattttggttcctgtgtgaatgtgaaccttttctatcaagtttgtggatttct

SEQ ID NO: 22312 - protein, 232 aa, Arabidopsis thaliana
  peptide (1)..(232): Ceres Seq. ID no. 12422724
MAKDEAKGLLKSEELYKYILETSVYPREPEVLRELRNITHNHPQAGMATAPDAGQLMGMLLNLVNARKTIEVGVFTGYSLLLTALTLPEDGKVIAIDMNRDSYEIGLPVIKKAGVEHKIDFKESEALPALDELLNNKVNEGGFDFAFVDADKLNYWNYHERLIRLIKVGGIIVYDNTLWGGSVAEPDSSTPEWRIEVKKATLELNKKLSADQRVQISQAALGDGITICRRLY

SEQ ID NO: 22313 - protein, 186 aa, Arabidopsis thaliana
  peptide (1)..(186): Ceres Seq. ID no. 12422725
MATAPDAGQLMGMLLNLVNARKTIEVGVFTGYSLLLTALTLPEDGKVIAIDMNRDSYEIGLPVIKKAGVEHKIDFKESEALPALDELLNNKVNEGGFDFAFVDADKLNYWNYHERLIRLIKVGGIIVYDNTLWGGSVAEPDSSTPEWRIEVKKATLELNKKLSADQRVQISQAALGDGITICRRLY

SEQ ID NO: 22314 - protein, 176 aa, Arabidopsis thaliana
  peptide (1)..(176): Ceres Seq. ID no. 12422726
MGMLLNLVNARKTIEVGVFTGYSLLLTALTLPEDGKVIAIDMNRDSYEIGLPVIKKAGVEHKIDFKESEALPALDELLNNKVNEGGFDFAFVDADKLNYWNYHERLIRLIKVGGIIVYDNTLWGGSVAEPDSSTPEWRIEVKKATLELNKKLSADQRVQISQAALGDGITICRRLY

SEQ ID NO: 22315 - DNA, 1120 bp, Arabidopsis thaliana
  misc_feature (1)..(1120): Ceres Seq. ID no. 12322828
  misc_feature (1)..(1120): Ortholog of  Ceres SEQ ID NO 15170760 as cited in SEQ ID NO 52747
  misc_feature (1)..(1120): Ortholog of  Ceres SEQ ID NO 15177588 as cited in SEQ ID NO 60367
atacaaatctgaaaaaacattaaaactcatctctctcatcatctttggccatggcaaaagacttggatgtgaacgagagtggaccaccggcggcgagagactacaaggatccgcctcccgcaccatttttcgacatggaggagcttaggaaatggccgctttatagagcggtcatagctgagtttgtagcaacacttctgttcctctacgtctcaatcctgactgtaatcggctacaaagctcaaaccgatgcaaccgccggaggagtggattgtggcggcgtaggaatattgggtattgcgtgggctttcggtggaatgatctttgttctcgtttactgtaccgccggtatctccggtggtcatataaatccggctgtgacggtgggactattcctggctcgtaaagtgtcattggtgcggacagtgttatacattgtggctcagtgccttggtgccatctgcggttgcggtttcgtcaaagcattccaaagttcttactacaccagatatggaggtggagccaacgagctagccgatggctacaacaaaggtaccggactcggtgccgagatcattggaacttttgtccttgtatacaccgtcttctcggcaaccgatcccaagcgaaatgctcgtgactctcacgtgccagttttggctccacttcccattggctttgccgtcttcatggttcatttagccaccattcccatcaccggaaccggtatcaacccggctcgtagctttggagctgccgttatttacaacaacgaaaaggcctgggacgaccaatggattttttgggttggaccgatgatcggagcagcagcagcagcgttttaccatcagtttattttaagagcggctgcgattaaagctcttggctcatttggctcctttggctcctttaggagctttgcttaatatacatttattttaaattaaaccacaagttataaatctttgatcaaaattaaaaggatgattacaaatgaattaagtggaagttacatgtgatcttctttttatatgtttctgtttttttgttctctctttcatttcatggaatttcccattcgtgtaattgtaaatgtggttttaattaatgttgctttaag

SEQ ID NO: 22316 - protein, 291 aa, Arabidopsis thaliana
  peptide (1)..(291): Ceres Seq. ID no. 12322829
MAKDLDVNESGPPAARDYKDPPPAPFFDMEELRKWPLYRAVIAEFVATLLFLYVSILTVIGYKAQTDATAGGVDCGGVGILGIAWAFGGMIFVLVYCTAGISGGHINPAVTVGLFLARKVSLVRTVLYIVAQCLGAICGCGFVKAFQSSYYTRYGGGANELADGYNKGTGLGAEIIGTFVLVYTVFSATDPKRNARDSHVPVLAPLPIGFAVFMVHLATIPITGTGINPARSFGAAVIYNNEKAWDDQWIFWVGPMIGAAAAAFYHQFILRAAAIKALGSFGSFGSFRSFA

SEQ ID NO: 22317 - protein, 263 aa, Arabidopsis thaliana
  peptide (1)..(263): Ceres Seq. ID no. 12322830
MEELRKWPLYRAVIAEFVATLLFLYVSILTVIGYKAQTDATAGGVDCGGVGILGIAWAFGGMIFVLVYCTAGISGGHINPAVTVGLFLARKVSLVRTVLYIVAQCLGAICGCGFVKAFQSSYYTRYGGGANELADGYNKGTGLGAEIIGTFVLVYTVFSATDPKRNARDSHVPVLAPLPIGFAVFMVHLATIPITGTGINPARSFGAAVIYNNEKAWDDQWIFWVGPMIGAAAAAFYHQFILRAAAIKALGSFGSFGSFRSFA

SEQ ID NO: 22318 - protein, 202 aa, Arabidopsis thaliana
  peptide (1)..(202): Ceres Seq. ID no. 12322831
MIFVLVYCTAGISGGHINPAVTVGLFLARKVSLVRTVLYIVAQCLGAICGCGFVKAFQSSYYTRYGGGANELADGYNKGTGLGAEIIGTFVLVYTVFSATDPKRNARDSHVPVLAPLPIGFAVFMVHLATIPITGTGINPARSFGAAVIYNNEKAWDDQWIFWVGPMIGAAAAAFYHQFILRAAAIKALGSFGSFGSFRSFA

SEQ ID NO: 22319 - DNA, 1142 bp, Arabidopsis thaliana
  misc_feature (1)..(1142): Ceres Seq. ID no. 12322489
  misc_feature (1)..(1142): Ortholog of  Ceres SEQ ID NO 14305750 as cited in SEQ ID NO 52458
  misc_feature (1)..(1142): Ortholog of  Ceres SEQ ID NO 14314252 as cited in SEQ ID NO 57492
  misc_feature (1)..(1142): Ortholog of  Ceres SEQ ID NO 12608276 as cited in SEQ ID NO 57871
  misc_feature (1)..(1142): Ortholog of  Ceres SEQ ID NO 13598492 as cited in SEQ ID NO 63882
  misc_feature (1)..(1142): Ortholog of  Ceres SEQ ID NO 13657914 as cited in SEQ ID NO 66230
  misc_feature (1)..(1142): Ortholog of  Ceres SEQ ID NO 13595877 as cited in SEQ ID NO 67702
  misc_feature (1)..(1142): Ortholog of  Ceres SEQ ID NO 13622667 as cited in SEQ ID NO 0
acacacaccaatcttatcataactcaccaaccaatcaactaaccatggattccgagatcgccgtcgactgctctccattgctcaaaatctacaagagtggccgcatcgagcgactcatgggtgaagccaccgtcccaccttcttccgaaccacaaaacggagtcgtttccaaggacgttgtttattctgccgacaacaacctatccgtccgtatttacctcccggagaaagccgccgccgagaccgactcgaaactccctctcctcgtttacttccacggtggaggattcatcattgagacagctttctctccaacttaccacactttcctcacgacgtctgtctctgcgtcgaactgtgtagcggtctctgttgattaccgtcgtgcaccggagcatccgatctccgtcccgttcgatgattcttggacagctctcaaatgggtattcacccatatcactggatctggtcaagatgattggttaaacaaacatgctgacttcagcagagtgttcctctccggagacagtgcaggagcaaacatcgtgcatcacatggcgatgagagctgcgaaagagaaactcagtcctggtttgaacgatacaggaatctctggaatcatcttgcttcatccttacttctggtcgaaaacaccaatcgacgagaaggatacgaaagatgaaacgttgaggatgaagatagaggcgttttggatgatggcaagtcctaatagcaaagatggaacagatgatccgttgctcaacgtggtgcaatcagagtcggtggatttgtctgggttgggttgtggtaaggttttggtaatggtggctgagaaagatgcgttggtgaggcagggttggggttacgcggctaagcttgagaagtctggttggaaaggagaggttgaagtggtggagagtgaaggagaagatcatgtttttcatttgttgaaacctgaatgtgataatgctattgaagtcatgcataaattctcagggtttattaagggagggaactagctttgtgctctctagagatattggaataatttggtactacatattttagttgcgtctctcagtttctgtaatgtttcagtgattggcttttcgcccaaagcaacacaataaaaattgaagacg

SEQ ID NO: 22320 - protein, 338 aa, Arabidopsis thaliana
  peptide (1)..(338): Ceres Seq. ID no. 12322490
THQSYHNSPTNQLTMDSEIAVDCSPLLKIYKSGRIERLMGEATVPPSSEPQNGVVSKDVVYSADNNLSVRIYLPEKAAAETDSKLPLLVYFHGGGFIIETAFSPTYHTFLTTSVSASNCVAVSVDYRRAPEHPISVPFDDSWTALKWVFTHITGSGQDDWLNKHADFSRVFLSGDSAGANIVHHMAMRAAKEKLSPGLNDTGISGIILLHPYFWSKTPIDEKDTKDETLRMKIEAFWMMASPNSKDGTDDPLLNVVQSESVDLSGLGCGKVLVMVAEKDALVRQGWGYAAKLEKSGWKGEVEVVESEGEDHVFHLLKPECDNAIEVMHKFSGFIKGGN

SEQ ID NO: 22321 - protein, 324 aa, Arabidopsis thaliana
  peptide (1)..(324): Ceres Seq. ID no. 12322491
MDSEIAVDCSPLLKIYKSGRIERLMGEATVPPSSEPQNGVVSKDVVYSADNNLSVRIYLPEKAAAETDSKLPLLVYFHGGGFIIETAFSPTYHTFLTTSVSASNCVAVSVDYRRAPEHPISVPFDDSWTALKWVFTHITGSGQDDWLNKHADFSRVFLSGDSAGANIVHHMAMRAAKEKLSPGLNDTGISGIILLHPYFWSKTPIDEKDTKDETLRMKIEAFWMMASPNSKDGTDDPLLNVVQSESVDLSGLGCGKVLVMVAEKDALVRQGWGYAAKLEKSGWKGEVEVVESEGEDHVFHLLKPECDNAIEVMHKFSGFIKGGN

SEQ ID NO: 22322 - protein, 300 aa, Arabidopsis thaliana
  peptide (1)..(300): Ceres Seq. ID no. 12322492
MGEATVPPSSEPQNGVVSKDVVYSADNNLSVRIYLPEKAAAETDSKLPLLVYFHGGGFIIETAFSPTYHTFLTTSVSASNCVAVSVDYRRAPEHPISVPFDDSWTALKWVFTHITGSGQDDWLNKHADFSRVFLSGDSAGANIVHHMAMRAAKEKLSPGLNDTGISGIILLHPYFWSKTPIDEKDTKDETLRMKIEAFWMMASPNSKDGTDDPLLNVVQSESVDLSGLGCGKVLVMVAEKDALVRQGWGYAAKLEKSGWKGEVEVVESEGEDHVFHLLKPECDNAIEVMHKFSGFIKGGN

SEQ ID NO: 22323 - DNA, 1113 bp, Arabidopsis thaliana
  misc_feature (1)..(1113): Ceres Seq. ID no. 12327403
  misc_feature (1)..(1113): Ortholog of  Ceres SEQ ID NO 15170807 as cited in SEQ ID NO 52723
  misc_feature (1)..(1113): Ortholog of  Ceres SEQ ID NO 12611846 as cited in SEQ ID NO 59904
  misc_feature (1)..(1113): Ortholog of  Ceres SEQ ID NO 14303535 as cited in SEQ ID NO 68728
  misc_feature (1)..(1113): Ortholog of  Ceres SEQ ID NO 12635196 as cited in SEQ ID NO 0
  misc_feature (1)..(1113): Ortholog of  Ceres SEQ ID NO 15179463 as cited in SEQ ID NO 0
accacaaaaccctttctcctccaatttcgtcgcacacaggaaaacaaaatgcttctcaaagctgcttctactttctctctattgaacattcatggagagaagaaagacatctctcctctcttctcctcctcctcctccatttcgtctccggtttcttctggaaaatccggcaatctctctttccctcttcgtgcttccaagagttcaaccactaccacaagcacgttgagcggcgttgtgttcgagcctttcgaagaggttaagaaagagatggatctagttccatctggtcaacagctttctcttgctcgtcatttgtactcccctgagtgcgaagccgccgtcaatgagcagatcaatgttgagtataacgtgtcgtatgtgtatcacgctttgtatgcatatttcgatcgtgacaacgttgccctcaagggtctcgccaagtttttcaaggaatcgagtgtggaagaacgagagcacgctgagctgttgatggagtatcagaacaaacgtggtgggagggtcaagttacagcccatggtgttgcctcagtctgagtttgatcatcctgagaaaggagatgctctctatgctatggagttggctctttcattggagaaactagtcaatgaaaagctcctaaacctgcacagtgtggcttccaagaacgatgatgtccagttggcagattttattgagagtgtgtttctgaacgaacaggtggaagccattaagaaaatctcagaatatgtttctcaacttaggagacttggcaaaggacatggaacatggcatttcgatcaggagcttcttggtgctgctgcttaatctgagttttagctgtaatctcgcagtttggttaacttttgagttattttgagtatgagatgtaacttttaaggtagatttgatcaatatcgattctgttgtgagagaaaacaagctattacgctccttggggttaactttctttgtgttttcagtattatggttttgtccacttcgtaatatcactttcctttagaacatttcaaatcagcagttgttttgaggtgtaatgtaatggtcactgatattttctattacccctgcatgaaagtagtatgttttacc

SEQ ID NO: 22324 - protein, 275 aa, Arabidopsis thaliana
  peptide (1)..(275): Ceres Seq. ID no. 12327404
TTKPFLLQFRRTQENKMLLKAASTFSLLNIHGEKKDISPLFSSSSSISSPVSSGKSGNLSFPLRASKSSTTTTSTLSGVVFEPFEEVKKEMDLVPSGQQLSLARHLYSPECEAAVNEQINVEYNVSYVYHALYAYFDRDNVALKGLAKFFKESSVEEREHAELLMEYQNKRGGRVKLQPMVLPQSEFDHPEKGDALYAMELALSLEKLVNEKLLNLHSVASKNDDVQLADFIESVFLNEQVEAIKKISEYVSQLRRLGKGHGTWHFDQELLGAAA

SEQ ID NO: 22325 - protein, 259 aa, Arabidopsis thaliana
  peptide (1)..(259): Ceres Seq. ID no. 12327405
MLLKAASTFSLLNIHGEKKDISPLFSSSSSISSPVSSGKSGNLSFPLRASKSSTTTTSTLSGVVFEPFEEVKKEMDLVPSGQQLSLARHLYSPECEAAVNEQINVEYNVSYVYHALYAYFDRDNVALKGLAKFFKESSVEEREHAELLMEYQNKRGGRVKLQPMVLPQSEFDHPEKGDALYAMELALSLEKLVNEKLLNLHSVASKNDDVQLADFIESVFLNEQVEAIKKISEYVSQLRRLGKGHGTWHFDQELLGAAA

SEQ ID NO: 22326 - protein, 185 aa, Arabidopsis thaliana
  peptide (1)..(185): Ceres Seq. ID no. 12327406
MDLVPSGQQLSLARHLYSPECEAAVNEQINVEYNVSYVYHALYAYFDRDNVALKGLAKFFKESSVEEREHAELLMEYQNKRGGRVKLQPMVLPQSEFDHPEKGDALYAMELALSLEKLVNEKLLNLHSVASKNDDVQLADFIESVFLNEQVEAIKKISEYVSQLRRLGKGHGTWHFDQELLGAAA

SEQ ID NO: 22327 - DNA, 1140 bp, Arabidopsis thaliana
  misc_feature (1)..(1140): Ceres Seq. ID no. 13487399
  misc_feature (1)..(1140): Ortholog of  Ceres SEQ ID NO 15175048 as cited in SEQ ID NO 59975
  misc_feature (1)..(1140): Ortholog of  Ceres SEQ ID NO 13597333 as cited in SEQ ID NO 63974
  misc_feature (1)..(1140): Ortholog of  Ceres SEQ ID NO 13599307 as cited in SEQ ID NO 0
  misc_feature (1)..(1140): Ortholog of  Ceres SEQ ID NO 15179517 as cited in SEQ ID NO 0
gtgtcactgttgctgttgccttggttgggttcggtttaaagttcgtggccaaacagtaaccttgagtcttgccgtcctctgtcatctatccacgcctgaacccgaaaaactctgaaagctgagctctggtaatggcgggtttagcaatttcacctcctctcggtctttccttctcttctcgaactcgaaaccctaaacccacttcctttctatctcacaatcaaaggaatcctataagacgtatagtttctgctctacagagtccatatggagattctctgaaagctggactttctagtaatgtttctggatccccaataaagattgacaacaaggctccaagatttggagtgatagaggcgaaaaagggaaaccccccagtaatgccttcagtgatgacccctggaggacctttagacctctcttctgtgttattccgtaaccgcataatcttcatcgggcaaccaattaacgcacaggttgctcagcgagtcatatctcagcttgtaacccttgcatctattgatgataaatccgacatcctgatgtacttgaattgtcccggtggcagtacttactccgtcctagcaatttatgactgtatgtcttggataaagcctaaagttggaacagtggcgtttggagtagctgcaagccaaggagcacttcttcttgctggaggtgaaaaaggaatgcgctatgcaatgccaaatactcgtgtcatgatacatcaaccacaaactggatgcggaggacatgtagaggacgtgaggagacaggtcaatgaagccatcgaagcccgacaaaaaattgacaggatgtatgcagctttcactggacaacctctggagaaagtgcagcaatacactgaaagagatcgtttcttatcagcatctgaggcgcttgagttcgggctcattgatggtctattggaaacagaatactgaagcagcatacaggacaatgcacaacaacagctcattgcaatgttcaaagcttccattttcatttgaatatgaacggttgtaactgatatttgtgcataaatcagtttggttttcttggttttattgtctactaaacagaatgagaaaactaaactgtttatttttttactgaaaaatctgaaagttgtgttcc

SEQ ID NO: 22328 - protein, 271 aa, Arabidopsis thaliana
  peptide (1)..(271): Ceres Seq. ID no. 13487400
MAGLAISPPLGLSFSSRTRNPKPTSFLSHNQRNPIRRIVSALQSPYGDSLKAGLSSNVSGSPIKIDNKAPRFGVIEAKKGNPPVMPSVMTPGGPLDLSSVLFRNRIIFIGQPINAQVAQRVISQLVTLASIDDKSDILMYLNCPGGSTYSVLAIYDCMSWIKPKVGTVAFGVAASQGALLLAGGEKGMRYAMPNTRVMIHQPQTGCGGHVEDVRRQVNEAIEARQKIDRMYAAFTGQPLEKVQQYTERDRFLSASEALEFGLIDGLLETEY

SEQ ID NO: 22329 - protein, 187 aa, Arabidopsis thaliana
  peptide (1)..(187): Ceres Seq. ID no. 13487401
MPSVMTPGGPLDLSSVLFRNRIIFIGQPINAQVAQRVISQLVTLASIDDKSDILMYLNCPGGSTYSVLAIYDCMSWIKPKVGTVAFGVAASQGALLLAGGEKGMRYAMPNTRVMIHQPQTGCGGHVEDVRRQVNEAIEARQKIDRMYAAFTGQPLEKVQQYTERDRFLSASEALEFGLIDGLLETEY

SEQ ID NO: 22330 - protein, 183 aa, Arabidopsis thaliana
  peptide (1)..(183): Ceres Seq. ID no. 13487402
MTPGGPLDLSSVLFRNRIIFIGQPINAQVAQRVISQLVTLASIDDKSDILMYLNCPGGSTYSVLAIYDCMSWIKPKVGTVAFGVAASQGALLLAGGEKGMRYAMPNTRVMIHQPQTGCGGHVEDVRRQVNEAIEARQKIDRMYAAFTGQPLEKVQQYTERDRFLSASEALEFGLIDGLLETEY

SEQ ID NO: 22331 - DNA, 1748 bp, Arabidopsis thaliana
  misc_feature (1)..(1748): Ceres Seq. ID no. 12334606
  misc_feature (1)..(1748): Ortholog of  Ceres SEQ ID NO 15178169 as cited in SEQ ID NO 58511
atagagatattttcatagagatggtctcgaagctaacaagttgacaaatttcttcgttataagagagatagatgagttgcaggagagtgctgaagtcgatacaagccttggcggctcatagtttactcttctgtttcacgcttttattggtgcttaaactcgatcacaccgtctcttcctcatggtggatggtgtttttcccgctgtgggcttttcatgcagttgttgcaaggggcagattctctcttcctgctcctgttgctccacgtaaccgtcattgggctccttgccatgctgttgtcgcgacaccgttacttgtagcatttgaattactcctctgtatatacctcgagagttcttatgctcgttggccaccagctgtcagtttgaagattgctttcttaccattgttggcttttgaattaacaatactggtagacaatttgagaatgtgtcgagcattgatgccaggagacgacgacagcataactgatgatgcaatatgggaggcacttcctcatttctgggttgcaatttccatggtgttcacgttggctgctacgttctttaccctcctaaagctttctggcgacgtagttgctcttggatggtgggatctattcataaattttggaattgccgagtgctttgcttttcttgtttgcacaaaatggtccaatccagtaatccatagaagctcacgtgcccgagaaaccgggtcatcttctaccagtatcagatatcttgactggaacagcggccttgtggttgctccagaagaggatagacaccaagatagatggtgcggtttgcaagatattggtggtcatatgttaaaaattcccgttattttatttcaagttgtcctttgcatgtatttagaggggactcctgaaagagctaaggatatatcgatcccagtactgttttctccactattcctattgcaaggcctcggtgttctctttgctgcttctaaactcctagagaagatcgtcctcttactccgcggggaagctggtccgggattgtattttagattttcatcaagtgcccatgattgcttgggattcttgcaccatggttccaggctattaggttggtggtcaattgacgaaggaagccgggaggaacaagctcgactgtactttgatcaagaatctggttacaatacattcagtggtcatccgcctgagatagtcaagaaaatgccaaaggaagatcttgcagaagaggtgtggagacttcaagcagcacttggtgaacaaacagaaatcacaaaattcagccagcaggaatatgaaagactgcaaaatgagaaagtgctgtgtagggtttgctttgaaaaagatatcagtttggtactgcttccatgtagacaccgtgttctctgcagaacctgtgcagacaagtgtacaacatgtccaatatgtcgtatagacattgaaaaacgactatctgtatacgacgtatgactgtgttaactttggcccatgatcaagagtaggatttgtggttgatgctccagacaaacattccagtttaccaaccatactgtttcccaaacttctgatgtttttgctgaatctttttgtttgtctgaatcagcagctagtataaaaaaaagtataggtgtatacgtgtatgtatttttctgtaggaaacctcattcaaactttagctgtaacatacaaagtttgtataatatccatctcttttttgtataaatcacaaactaagttatgctt

SEQ ID NO: 22332 - protein, 467 aa, Arabidopsis thaliana
  peptide (1)..(467): Ceres Seq. ID no. 12334607
MSCRRVLKSIQALAAHSLLFCFTLLLVLKLDHTVSSSWWMVFFPLWAFHAVVARGRFSLPAPVAPRNRHWAPCHAVVATPLLVAFELLLCIYLESSYARWPPAVSLKIAFLPLLAFELTILVDNLRMCRALMPGDDDSITDDAIWEALPHFWVAISMVFTLAATFFTLLKLSGDVVALGWWDLFINFGIAECFAFLVCTKWSNPVIHRSSRARETGSSSTSIRYLDWNSGLVVAPEEDRHQDRWCGLQDIGGHMLKIPVILFQVVLCMYLEGTPERAKDISIPVLFSPLFLLQGLGVLFAASKLLEKIVLLLRGEAGPGLYFRFSSSAHDCLGFLHHGSRLLGWWSIDEGSREEQARLYFDQESGYNTFSGHPPEIVKKMPKEDLAEEVWRLQAALGEQTEITKFSQQEYERLQNEKVLCRVCFEKDISLVLLPCRHRVLCRTCADKCTTCPICRIDIEKRLSVYDV

SEQ ID NO: 22333 - protein, 428 aa, Arabidopsis thaliana
  peptide (1)..(428): Ceres Seq. ID no. 12334608
MVFFPLWAFHAVVARGRFSLPAPVAPRNRHWAPCHAVVATPLLVAFELLLCIYLESSYARWPPAVSLKIAFLPLLAFELTILVDNLRMCRALMPGDDDSITDDAIWEALPHFWVAISMVFTLAATFFTLLKLSGDVVALGWWDLFINFGIAECFAFLVCTKWSNPVIHRSSRARETGSSSTSIRYLDWNSGLVVAPEEDRHQDRWCGLQDIGGHMLKIPVILFQVVLCMYLEGTPERAKDISIPVLFSPLFLLQGLGVLFAASKLLEKIVLLLRGEAGPGLYFRFSSSAHDCLGFLHHGSRLLGWWSIDEGSREEQARLYFDQESGYNTFSGHPPEIVKKMPKEDLAEEVWRLQAALGEQTEITKFSQQEYERLQNEKVLCRVCFEKDISLVLLPCRHRVLCRTCADKCTTCPICRIDIEKRLSVYDV

SEQ ID NO: 22334 - protein, 341 aa, Arabidopsis thaliana
  peptide (1)..(341): Ceres Seq. ID no. 12334609
MCRALMPGDDDSITDDAIWEALPHFWVAISMVFTLAATFFTLLKLSGDVVALGWWDLFINFGIAECFAFLVCTKWSNPVIHRSSRARETGSSSTSIRYLDWNSGLVVAPEEDRHQDRWCGLQDIGGHMLKIPVILFQVVLCMYLEGTPERAKDISIPVLFSPLFLLQGLGVLFAASKLLEKIVLLLRGEAGPGLYFRFSSSAHDCLGFLHHGSRLLGWWSIDEGSREEQARLYFDQESGYNTFSGHPPEIVKKMPKEDLAEEVWRLQAALGEQTEITKFSQQEYERLQNEKVLCRVCFEKDISLVLLPCRHRVLCRTCADKCTTCPICRIDIEKRLSVYDV

SEQ ID NO: 22335 - DNA, 1350 bp, Arabidopsis thaliana
  misc_feature (1)..(1350): Ceres Seq. ID no. 13621940
  misc_feature (1)..(1350): Ortholog of  Ceres SEQ ID NO 15177750 as cited in SEQ ID NO 57772
  misc_feature (1)..(1350): Ortholog of  Ceres SEQ ID NO 13596581 as cited in SEQ ID NO 62420
  misc_feature (1)..(1350): Ortholog of  Ceres SEQ ID NO 13591273 as cited in SEQ ID NO 65904
  misc_feature (1)..(1350): Ortholog of  Ceres SEQ ID NO 13623086 as cited in SEQ ID NO 0
aagaccacactactctctctatctctctctatctctctatctctctcatttcttcctgcgtcaatggcgactcaaggtcaggttatcacttgcaaagctgcggtggcttacgagccgaacaagcctctggtcatcgaagatgtgcaagtggctccacctcaagctggtgaggttcggatcaagatcctctacactgctctttgtcacaccgacgcttacacttggagcggcaaggatcctgaaggtctctttccttgtattctaggtcatgaggctgctgggattgttgagagtgttggtgaaggagtaactgaagttcaagctggagatcatgttatcccttgttatcaagctgagtgtcgtgaatgcaagttttgcaaatctgggaagactaacctttgtggcaaggtgagatctgctactggtgttgggattatgatgaatgaccgtaagtcgaggttctcggttaatgggaaacccatttatcacttcatgggtacttccacgtttagtcagtatactgttgttcatgatgttagcgtcgccaaaattgatcctactgctcctttggataaagtttgccttcttggatgtggtgttcccactggccttggagcagtttggaatactgcaaaagtagaaccagggtcaaatgttgccattttcggtcttggcactgttggacttgctgttgccgagggtgcgaaaacagctggtgcttcaaggatcattggcattgacatcgatagcaagaagtatgaaactgcaaagaagtttggtgttaacgaatttgtgaacccaaaggatcacgacaagccaattcaggaagtgattgtcgatctcactgatggcggtgttgactacagctttgagtgcatcgggaatgtctccgtgatgagagctgcattggagtgctgtcacaagggatggggaacttcggtcatagttggtgttgcagcatcaggacaagagatatcaactcgtccgttccaactcgtgactggccgtgtgtggaaaggaacagcttttggtggtttcaagagtcgaacccaagtgccttggcttgtagaaaagtacatgaacaaggagataaaagtggatgaatacataacacacaacttgaccttgggagaaatcaataaggctttcgatctattgcacgaaggtacttgccttcgttgtgtcctcgataccagcaaatgactatatgggtcctctctgctttaatctatgtgttcttgtgactttcgtcttttatcggtattgacatttcctaagagcaacagactactctactcttgtgtgtctcgtttctatcttatgcttcaataaaatatcaattaagaccgc

SEQ ID NO: 22336 - protein, 400 aa, Arabidopsis thaliana
  peptide (1)..(400): Ceres Seq. ID no. 13621941
KTTLLSLSLSISLSLSFLPASMATQGQVITCKAAVAYEPNKPLVIEDVQVAPPQAGEVRIKILYTALCHTDAYTWSGKDPEGLFPCILGHEAAGIVESVGEGVTEVQAGDHVIPCYQAECRECKFCKSGKTNLCGKVRSATGVGIMMNDRKSRFSVNGKPIYHFMGTSTFSQYTVVHDVSVAKIDPTAPLDKVCLLGCGVPTGLGAVWNTAKVEPGSNVAIFGLGTVGLAVAEGAKTAGASRIIGIDIDSKKYETAKKFGVNEFVNPKDHDKPIQEVIVDLTDGGVDYSFECIGNVSVMRAALECCHKGWGTSVIVGVAASGQEISTRPFQLVTGRVWKGTAFGGFKSRTQVPWLVEKYMNKEIKVDEYITHNLTLGEINKAFDLLHEGTCLRCVLDTSK

SEQ ID NO: 22337 - protein, 379 aa, Arabidopsis thaliana
  peptide (1)..(379): Ceres Seq. ID no. 13621942
MATQGQVITCKAAVAYEPNKPLVIEDVQVAPPQAGEVRIKILYTALCHTDAYTWSGKDPEGLFPCILGHEAAGIVESVGEGVTEVQAGDHVIPCYQAECRECKFCKSGKTNLCGKVRSATGVGIMMNDRKSRFSVNGKPIYHFMGTSTFSQYTVVHDVSVAKIDPTAPLDKVCLLGCGVPTGLGAVWNTAKVEPGSNVAIFGLGTVGLAVAEGAKTAGASRIIGIDIDSKKYETAKKFGVNEFVNPKDHDKPIQEVIVDLTDGGVDYSFECIGNVSVMRAALECCHKGWGTSVIVGVAASGQEISTRPFQLVTGRVWKGTAFGGFKSRTQVPWLVEKYMNKEIKVDEYITHNLTLGEINKAFDLLHEGTCLRCVLDTSK

SEQ ID NO: 22338 - protein, 255 aa, Arabidopsis thaliana
  peptide (1)..(255): Ceres Seq. ID no. 13621943
MMNDRKSRFSVNGKPIYHFMGTSTFSQYTVVHDVSVAKIDPTAPLDKVCLLGCGVPTGLGAVWNTAKVEPGSNVAIFGLGTVGLAVAEGAKTAGASRIIGIDIDSKKYETAKKFGVNEFVNPKDHDKPIQEVIVDLTDGGVDYSFECIGNVSVMRAALECCHKGWGTSVIVGVAASGQEISTRPFQLVTGRVWKGTAFGGFKSRTQVPWLVEKYMNKEIKVDEYITHNLTLGEINKAFDLLHEGTCLRCVLDTSK

SEQ ID NO: 22339 - DNA, 1213 bp, Arabidopsis thaliana
  misc_feature (1)..(1213): Ceres Seq. ID no. 12371532
  misc_feature (1)..(1213): Ortholog of  Ceres SEQ ID NO 15169005 as cited in SEQ ID NO 55180
aagaaacagccaacggatttagggatcttaccgttctgcgattcgccgaacagagtttgaagctttttttagagacttcaatggtgagccaaggaatggtatctcttacaaagtctctatgcactatgactccaagagtccgtctcaagaatccgaatatgttgcagaaactaaagactggatcttgtaatttccgttttagaaatctccgtgtcttatgcacaacaaaactgtctcagtgggaaccgtcacctttcattcatgcttctgcggaagaagctgctgatttagtattggacaaaacagcgaatgtgttcgaatctattatatccgagagtgcagaggaagagagagtagatatgtcagcgcaacaacgaactaattctcaagttcaggtgcttaaatggccaatatggcttttgggtccatctgttctcctcacaagcggtatggcgcctactttatggcttccgttgtcatcggtttttctcggttccaacgtggttagtctactttctttgatcggtctagattgcattttcaatcttggagcaacccttttccttttaatggctgattcttgcgcacgtcctaaagacccatcacagtcctgcaacagcaaaccaccatttagctacaagttctggaacatgttttcactcataaccgggtttttagtcccaatgttacttctcttcggatcccaatctggccttctcgcttctctccagccccagattcctttcctctcgtccgctgttatcctcttcccgtacttcattctccttgctgttcagacattaatagagatcctcacatggcactggcaatcaccggtctggctagtcacaccagttgtctacgaggcttaccgaatcttgcaactgatgagagggttgacacttagtgcagaggtcaacgcaccggtttgggtggttcatatgcttcgtgggcttgtctcttggtgggtattgatcttgggaatgcaactcatgagagttgcttggtttgctggttttgcatctagaacaacaacaggtcagcaaccacaatctgcttctaagtaaagacagataaatgtttcttcgtttagtttttaaagtcatgtcaaagatttgtaactctttcttcactgtatagcttttattattcgtgggttggtgataaggattaaaaaaaaacacatattctttatgatcatattcgctctttt

SEQ ID NO: 22340 - protein, 354 aa, Arabidopsis thaliana
  peptide (1)..(354): Ceres Seq. ID no. 12371533
ETANGFRDLTVLRFAEQSLKLFLETSMVSQGMVSLTKSLCTMTPRVRLKNPNMLQKLKTGSCNFRFRNLRVLCTTKLSQWEPSPFIHASAEEAADLVLDKTANVFESIISESAEEERVDMSAQQRTNSQVQVLKWPIWLLGPSVLLTSGMAPTLWLPLSSVFLGSNVVSLLSLIGLDCIFNLGATLFLLMADSCARPKDPSQSCNSKPPFSYKFWNMFSLITGFLVPMLLLFGSQSGLLASLQPQIPFLSSAVILFPYFILLAVQTLIEILTWHWQSPVWLVTPVVYEAYRILQLMRGLTLSAEVNAPVWVVHMLRGLVSWWVLILGMQLMRVAWFAGFASRTTTGQQPQSASK

SEQ ID NO: 22341 - protein, 328 aa, Arabidopsis thaliana
  peptide (1)..(328): Ceres Seq. ID no. 12371534
MVSQGMVSLTKSLCTMTPRVRLKNPNMLQKLKTGSCNFRFRNLRVLCTTKLSQWEPSPFIHASAEEAADLVLDKTANVFESIISESAEEERVDMSAQQRTNSQVQVLKWPIWLLGPSVLLTSGMAPTLWLPLSSVFLGSNVVSLLSLIGLDCIFNLGATLFLLMADSCARPKDPSQSCNSKPPFSYKFWNMFSLITGFLVPMLLLFGSQSGLLASLQPQIPFLSSAVILFPYFILLAVQTLIEILTWHWQSPVWLVTPVVYEAYRILQLMRGLTLSAEVNAPVWVVHMLRGLVSWWVLILGMQLMRVAWFAGFASRTTTGQQPQSASK

SEQ ID NO: 22342 - protein, 323 aa, Arabidopsis thaliana
  peptide (1)..(323): Ceres Seq. ID no. 12371535
MVSLTKSLCTMTPRVRLKNPNMLQKLKTGSCNFRFRNLRVLCTTKLSQWEPSPFIHASAEEAADLVLDKTANVFESIISESAEEERVDMSAQQRTNSQVQVLKWPIWLLGPSVLLTSGMAPTLWLPLSSVFLGSNVVSLLSLIGLDCIFNLGATLFLLMADSCARPKDPSQSCNSKPPFSYKFWNMFSLITGFLVPMLLLFGSQSGLLASLQPQIPFLSSAVILFPYFILLAVQTLIEILTWHWQSPVWLVTPVVYEAYRILQLMRGLTLSAEVNAPVWVVHMLRGLVSWWVLILGMQLMRVAWFAGFASRTTTGQQPQSASK

SEQ ID NO: 22343 - DNA, 1078 bp, Arabidopsis thaliana
  misc_feature (1)..(1078): Ceres Seq. ID no. 12372181
  misc_feature (1)..(1078): Ortholog of  Ceres SEQ ID NO 14311671 as cited in SEQ ID NO 51251
  misc_feature (1)..(1078): Ortholog of  Ceres SEQ ID NO 14304791 as cited in SEQ ID NO 53562
  misc_feature (1)..(1078): Ortholog of  Ceres SEQ ID NO 14307355 as cited in SEQ ID NO 54610
  misc_feature (1)..(1078): Ortholog of  Ceres SEQ ID NO 13594298 as cited in SEQ ID NO 57803
  misc_feature (1)..(1078): Ortholog of  Ceres SEQ ID NO 13503476 as cited in SEQ ID NO 61978
  misc_feature (1)..(1078): Ortholog of  Ceres SEQ ID NO 12578438 as cited in SEQ ID NO 62201
  misc_feature (1)..(1078): Ortholog of  Ceres SEQ ID NO 12617675 as cited in SEQ ID NO 64656
tcaaaaaatatctctcccccttcttctctcttcctcacattcctcaccaaaccctctccaaaacacacccacacgtacgcacacacacaaagacaatgtctcctttcaaaatattcttcttcacgactcttctcgtggcggcgttttcagtgtcggctgctgatttcaacactgacgtcaacgtagcttggggaaatggccgtgggaagatactcaacaacggccagcttcttactctctccttagacaaatcctctggttccggttttcaatccaaaacagagtatttgtttggaaagattgatatgcagattaagcttgttcctggtaactctgcaggaacagtcacaactttttacctaaaatccgaaggatccacttgggatgagattgattttgagttcttgggtaatatgagtggagatccttatactttacacactaatgtttacactcaaggtaaaggtgacaaagagcaacaattccatctctggttcgacccaaccgccaatttccacacttactcaatcctctggaaccctcaaagaatcatattgaccgtcgatgacacacccattagagagtttaaaaactatgagtctctcggtgtcttgtttccaaagaacaagccgatgaggatgtacgcgagtttatggaacgcagacgattgggcaacaagaggcggtcttgttaaaactgattggtctaaagctccattcatggcttcttacagaaacattaagattgactcgaaaccaaactccaattggtacactcaagaaatggattcaacaagccaagctagactcaaatgggttcagaagaattacatgatctacaattattgtactgaccataggaggtttccacagggagctcctaaggaatgcacaacaagctcatagaatctcaaattatattctatttatttatctacacttcctctctttcttttatgtgaaaattgtgaatgctctgtttctagcttgtctattatgtccgagaatttctttttctgtttttgattcttttcgttgtatatctttgtccaataaaggaaatgatgtgtctttactcc

SEQ ID NO: 22344 - protein, 300 aa, Arabidopsis thaliana
  peptide (1)..(300): Ceres Seq. ID no. 12372182
KKYLSPFFSLPHIPHQTLSKTHPHVRTHTKTMSPFKIFFFTTLLVAAFSVSAADFNTDVNVAWGNGRGKILNNGQLLTLSLDKSSGSGFQSKTEYLFGKIDMQIKLVPGNSAGTVTTFYLKSEGSTWDEIDFEFLGNMSGDPYTLHTNVYTQGKGDKEQQFHLWFDPTANFHTYSILWNPQRIILTVDDTPIREFKNYESLGVLFPKNKPMRMYASLWNADDWATRGGLVKTDWSKAPFMASYRNIKIDSKPNSNWYTQEMDSTSQARLKWVQKNYMIYNYCTDHRRFPQGAPKECTTSS

SEQ ID NO: 22345 - protein, 269 aa, Arabidopsis thaliana; identical to SEQ ID NO: 21034
  peptide (1)..(269): Ceres Seq. ID no. 12372183

SEQ ID NO: 22346 - protein, 199 aa, Arabidopsis thaliana; identical to SEQ ID NO: 21035
  peptide (1)..(199): Ceres Seq. ID no. 12372184

SEQ ID NO: 22347 - DNA, 1451 bp, Arabidopsis thaliana
  misc_feature (1)..(1451): Ceres Seq. ID no. 12337916
  misc_feature (1)..(1451): Ortholog of  Ceres SEQ ID NO 13597034 as cited in SEQ ID NO 69002
atttttgagttctcagatttcaaacacaaaagtttcgtctccgatttaatctttctacgtcttggtttatgagctcaaaggagaagcccactctcgggggtacgcggattaagacccgcaaaaggaatattgctgctcctctcgaccctgctgctttttctgatgcactagttcagatttatctggataatgctggtgatctggaacttgttgccagaagtttagagtcatctgatcttaatttctcaagatacggtgatattttctttgaggttgttttcattggaggacgtactcaaactggttcagtgaaatctgatgaaggggaacgccacccttactctataatcgactgtgaaccaaagcgtgaagctattttaccatcagttgtatacatacagaaaattttgcggaggaaagccttccttattaagaaccttgagaatgttacacggagattcttacagtcactggagctttttgaggagaatgagagaaagaagcttgcaatattcacagcacttgcattttcacagaagctctcaggattacctgcagagactgtcttccagccattgcttaaggatactcttgttgccaaagggatagttctcaattttgtaacagacttcttcaatgaatatttggttgagaacagtcttgatgacttgatttctattctgaggcgtggcaagatggatgacaaactcttggagttcctgccacccacaaagcggactacagaaagttttgccgagcatttcactaaggcaggattgacagctctggtagagtacaatgaaaggaaaatatttgaggtgaagctgaaggaaatcaaagcggtccttacgagccaagtgacagaggaaataaacgtagatgaagtgactgaaatggtgaagcaacaggtgaaagatgcaaagctgccagagactgaggttgtgcatgtgatctgggatgggataatgaatgctgttcaatggtctgggaaaaaccagcagcagaattcgaatgctgtattacgccaagtgaaaacatgggcaccccttctgaacacgctgtgtagcaccgggaacatggagatggaactgatgtataaagtacagatgcaatgctatgaggatgcaaagctgatgaaagtgtttcctgaggtagtgagatctctgtatgaactggatgtgcttgcggaagacaccattctgcactggtatcgcaaagggaccaaccctaagggcaggcaaacgtttgtgaagggattggaaccgttagtgaattggctcgaagaggccgaagaagaggagtgagtgagacgctctgcttcttgttttctctttttactctcttctaataaaagaaagacaatattttacttctcttaacgcaaaattcagatgctctacattgttggtgacttggtgtgatctcttttttgaatgaataagtacttcttc

SEQ ID NO: 22348 - protein, 411 aa, Arabidopsis thaliana
  peptide (1)..(411): Ceres Seq. ID no. 12337917
MSSKEKPTLGGTRIKTRKRNIAAPLDPAAFSDALVQIYLDNAGDLELVARSLESSDLNFSRYGDIFFEVVFIGGRTQTGSVKSDEGERHPYSIIDCEPKREAILPSVVYIQKILRRKAFLIKNLENVTRRFLQSLELFEENERKKLAIFTALAFSQKLSGLPAETVFQPLLKDTLVAKGIVLNFVTDFFNEYLVENSLDDLISILRRGKMDDKLLEFLPPTKRTTESFAEHFTKAGLTALVEYNERKIFEVKLKEIKAVLTSQVTEEINVDEVTEMVKQQVKDAKLPETEVVHVIWDGIMNAVQWSGKNQQQNSNAVLRQVKTWAPLLNTLCSTGNMEMELMYKVQMQCYEDAKLMKVFPEVVRSLYELDVLAEDTILHWYRKGTNPKGRQTFVKGLEPLVNWLEEAEEEE

SEQ ID NO: 22349 - DNA, 1032 bp, Arabidopsis thaliana
  misc_feature (1)..(1032): Ceres Seq. ID no. 12327106
  misc_feature (1)..(1032): Ortholog of  Ceres SEQ ID NO 14315330 as cited in SEQ ID NO 58134
aaatataagtcttcttcttctccaatggcgtcttcttctcttgttcgaatcgctgtcgtcggagacatccatggcttctggaacctagatgaagatcgaaaggctctacgagttctccagccggatttggtgctcttcacaggtgattttggtgaagaaaacgtcccactggttcaaagtgttgccgctcttactttccctaaagcagtcatattggggaatcatgatgcctggttcacccaagattttccaaggaaagaaaaacaaaaacaaaacggtgttcaaatgcaactcgatatccttggtgacgagcacataggatatcaacgcatggacttcccatcttttaagctcagtattgttggtggtcgacccttttcacatggtggggatcgattgtttcggaaaaatctgcttgtccagaggtatggagttcatgatatggaagccagtgctgggagtatttgtcgagctgcacatggaacaccggaagatcacgtggctataattctcgctcacaatgggccaacaggtcttggttggcaagcagaggatatatgtggaaaagactggggggctgaaggcggtgaccatggtgatccagatctagagcaggcgatacgacagttgaaggagacgactaagttgtcgattcctttagttgtgtttgggcacatgcataaggagctgcaacgggggaaaggaaatcggaaaatggtagtgcaagatagtgacaaccagactgtgtatgtgaacggtgcaatagttccaagggttaaagaggcaaagaaaagaggagcagcagagtctgagagtggtggcacaacaagagctttcacattggtggagattttagatgggaaaatcaagaaaatagcagaaatttgggtacatgtaaatggaagtatggctaagattgtggaggaaaatactttgtttgaagatgtaacctgatttgaaatttaaacaattaattcgggacaagactgtaataactaattatacatttgtcttggcgaacaagtccctttt

SEQ ID NO: 22350 - protein, 317 aa, Arabidopsis thaliana
  peptide (1)..(317): Ceres Seq. ID no. 12327107
KYKSSSSPMASSSLVRIAVVGDIHGFWNLDEDRKALRVLQPDLVLFTGDFGEENVPLVQSVAALTFPKAVILGNHDAWFTQDFPRKEKQKQNGVQMQLDILGDEHIGYQRMDFPSFKLSIVGGRPFSHGGDRLFRKNLLVQRYGVHDMEASAGSICRAAHGTPEDHVAIILAHNGPTGLGWQAEDICGKDWGAEGGDHGDPDLEQAIRQLKETTKLSIPLVVFGHMHKELQRGKGNRKMVVQDSDNQTVYVNGAIVPRVKEAKKRGAAESESGGTTRAFTLVEILDGKIKKIAEIWVHVNGSMAKIVEENTLFEDVT

SEQ ID NO: 22351 - protein, 309 aa, Arabidopsis thaliana
  peptide (1)..(309): Ceres Seq. ID no. 12327108
MASSSLVRIAVVGDIHGFWNLDEDRKALRVLQPDLVLFTGDFGEENVPLVQSVAALTFPKAVILGNHDAWFTQDFPRKEKQKQNGVQMQLDILGDEHIGYQRMDFPSFKLSIVGGRPFSHGGDRLFRKNLLVQRYGVHDMEASAGSICRAAHGTPEDHVAIILAHNGPTGLGWQAEDICGKDWGAEGGDHGDPDLEQAIRQLKETTKLSIPLVVFGHMHKELQRGKGNRKMVVQDSDNQTVYVNGAIVPRVKEAKKRGAAESESGGTTRAFTLVEILDGKIKKIAEIWVHVNGSMAKIVEENTLFEDVT

SEQ ID NO: 22352 - protein, 222 aa, Arabidopsis thaliana
  peptide (1)..(222): Ceres Seq. ID no. 12327109
MQLDILGDEHIGYQRMDFPSFKLSIVGGRPFSHGGDRLFRKNLLVQRYGVHDMEASAGSICRAAHGTPEDHVAIILAHNGPTGLGWQAEDICGKDWGAEGGDHGDPDLEQAIRQLKETTKLSIPLVVFGHMHKELQRGKGNRKMVVQDSDNQTVYVNGAIVPRVKEAKKRGAAESESGGTTRAFTLVEILDGKIKKIAEIWVHVNGSMAKIVEENTLFEDVT

SEQ ID NO: 22353 - DNA, 836 bp, Arabidopsis thaliana
  misc_feature (1)..(836): Ceres Seq. ID no. 13496938
  misc_feature (1)..(836): Ortholog of  Ceres SEQ ID NO 13659393 as cited in SEQ ID NO 67047
  misc_feature (1)..(836): Ortholog of  Ceres SEQ ID NO 12635162 as cited in SEQ ID NO 0
ctaaaagttatcagaatagaaatctctctctctcaacaagtctaacagtgccatttgtatctctgaactccaaccatggctcctctggttctctaccttctcactctcctcatggctggccataccagtgcctcatggtgtgtgtgcaaaacagggctgagtgactcagtgctacaaaagacattagactatgcttgtggaaatggagctgactgtaacccaactcacccaaaaggctcttgcttcaatcctgacaatgttagggctcattgcaactatgcagtcaatagcttcttccaaaagaaaggtcaagcttctgagtcttgtaacttcactggtactgccactcttaccaccaccgatcccagctatacaggatgtgcattcccttctagtgctagtggttctagtggaagcggtagcaccaccgtgacgccaggcaaaaacagtccaaaaggaagcaacagcatcaccacatttcccggcggaaacagtccatactctggcacaccatccaccggcttattaggaggcaatatcactgatgctactggaaccgggttgaacccggattactcaaccgaaagcagtggatttgcgctctattactccaacaaccttctgttaaccggcttttgttctctcgtgatgatgctctgaactgaagaagaatcactgtcttcttttagtttatgcttagtcaaaaaatatgttatttatatgttcttgttgttttagagataatttaatctggatttcggttcttttttactttccggttttaagaaaacacttatcaatgtaaaaccaaatctactatcgatcggtttggtacg

SEQ ID NO: 22354 - protein, 194 aa, Arabidopsis thaliana
  peptide (1)..(194): Ceres Seq. ID no. 13496939
MAPLVLYLLTLLMAGHTSASWCVCKTGLSDSVLQKTLDYACGNGADCNPTHPKGSCFNPDNVRAHCNYAVNSFFQKKGQASESCNFTGTATLTTTDPSYTGCAFPSSASGSSGSGSTTVTPGKNSPKGSNSITTFPGGNSPYSGTPSTGLLGGNITDATGTGLNPDYSTESSGFALYYSNNLLLTGFCSLVMML

SEQ ID NO: 22355 - protein, 182 aa, Arabidopsis thaliana
  peptide (1)..(182): Ceres Seq. ID no. 13496940
MAGHTSASWCVCKTGLSDSVLQKTLDYACGNGADCNPTHPKGSCFNPDNVRAHCNYAVNSFFQKKGQASESCNFTGTATLTTTDPSYTGCAFPSSASGSSGSGSTTVTPGKNSPKGSNSITTFPGGNSPYSGTPSTGLLGGNITDATGTGLNPDYSTESSGFALYYSNNLLLTGFCSLVMML

SEQ ID NO: 22356 - DNA, 812 bp, Arabidopsis thaliana
  misc_feature (1)..(812): Ceres Seq. ID no. 12334024
  misc_feature (1)..(812): Ortholog of  Ceres SEQ ID NO 12474478 as cited in SEQ ID NO 96
  misc_feature (1)..(812): Ortholog of  Ceres SEQ ID NO 13647991 as cited in SEQ ID NO 187
aaagaagaaataaacagagtaaaaaacttaaagcttaaaatggggaggcagctttatacgacgacggttctctacttagtcaccctactcttcatttgccggacaatctcagccgtccgtttccctccggaacaaccaacaaccgatgatctagatttcatccgtacgagctgcaacacaacgctgtatccagacgtatgttacacgtctctagctggatacgcctccgccgtccaagataatccggcaaggctagctaaactcgcaatcggcgtttctctctcccgcgcaaaatacacggcggcttacctctccaaactctcacgtcgcgctgcctcagctgctgtccacgactgcgtttcgaacgtgggagatgccgtggatcagatgcgtggctccctaaggcagctccgagagatgaaccaccgtcgtcccggagatccggcgtttaggtttcagatgagtaacgtgcagacgtggatgagcgcggcgttgacggacgaggagacgtgtacggatggggtcacggaggagatggaagacggagagacgaagacggctatttgcgatagagtcgccgacgtcaagaggttcacgagtaatgcgctcgctctcgttaatacctacgccaacaatggagcctaactaactaagctaggtcttgaaattcctaaagttataaaaacacttgtatatatatatgtgttaagttgtgtgcttagtttataatgtgtattcgaggctttgaaaccgagttagaactctgagtttgggtgttcaaattatacattaatctatgtttgattgtattg

SEQ ID NO: 22357 - protein, 214 aa, Arabidopsis thaliana
  peptide (1)..(214): Ceres Seq. ID no. 12334025
KEEINRVKNLKLKMGRQLYTTTVLYLVTLLFICRTISAVRFPPEQPTTDDLDFIRTSCNTTLYPDVCYTSLAGYASAVQDNPARLAKLAIGVSLSRAKYTAAYLSKLSRRAASAAVHDCVSNVGDAVDQMRGSLRQLREMNHRRPGDPAFRFQMSNVQTWMSAALTDEETCTDGVTEEMEDGETKTAICDRVADVKRFTSNALALVNTYANNGA

SEQ ID NO: 22358 - protein, 201 aa, Arabidopsis thaliana
  peptide (1)..(201): Ceres Seq. ID no. 12334026
MGRQLYTTTVLYLVTLLFICRTISAVRFPPEQPTTDDLDFIRTSCNTTLYPDVCYTSLAGYASAVQDNPARLAKLAIGVSLSRAKYTAAYLSKLSRRAASAAVHDCVSNVGDAVDQMRGSLRQLREMNHRRPGDPAFRFQMSNVQTWMSAALTDEETCTDGVTEEMEDGETKTAICDRVADVKRFTSNALALVNTYANNGA

SEQ ID NO: 22359 - DNA, 1204 bp, Arabidopsis thaliana
  misc_feature (1)..(1204): Ceres Seq. ID no. 13490357
  misc_feature (1)..(1204): Ortholog of  Ceres SEQ ID NO 14316378 as cited in SEQ ID NO 57746
  misc_feature (1)..(1204): Ortholog of  Ceres SEQ ID NO 13596097 as cited in SEQ ID NO 68421
  misc_feature (1)..(1204): Ortholog of  Ceres SEQ ID NO 13598439 as cited in SEQ ID NO 69016
  misc_feature (1)..(1204): Ortholog of  Ceres SEQ ID NO 13599524 as cited in SEQ ID NO 0
gtctcaattattctccccgcccctctatgtagacgtgtgaatattagagagattgataacgaactcctcacaacatcatatctcaagttcaccacccaaaagaaaaaacacacacacatcttagagagatgaaagagactaattttggcgagaaaacgcgcgttctggtagttggtgggacgggatcattggggaggaggattgtaagtgcgtgtttggctgagggacacgagacttatgttctccagcggccggagattggagtggacatcgagaaggtgcagctacttctttctttcaaaagactcggcgcacatcttgtggaaggctcattctccgatcaccaaagccttgtctctgccgtaaagcaagtcgacgtggttgtctccgccatgtccggtgtccacttccgcacccacaacatccccgttcagctcaagctcgtcgcagccatcaaagaggccggtaacgtcaagcgtttcttaccatcagaatttggaatggatccgtcacgtatgggacatgccatgccaccaggaagtgaaacatttgatcaaaaaatggaaatacgaaatgcaattaaggccgccgggatctcccacacatacctcgtcggtgcttgttttgccgcatacttcggcggaaatttatctcaaatgggaactttgttccctccgaaaaacaaagttgatatttatggggacggaaatgttaaagtggtgttcgtagatgaagatgacatggcaaaatatacagcgaagacgcttaatgatccccgaacgttgaataaaactgtgtatgttagacctaccgacaacattctcacacaaatggaactagttcagatatgggagaaactaaccgaaaaagagttggagaagacctatgtttcaggaaacgactttcttgctgacattgaagataaggagatatcacaccaagcgggactaggacacttttatcacatatactacgaaggttgtctcacagatcatgaagttggagacgacgaagaagctactaaactctatccggatgtgaagtacaaacgcatggatgaatatttgaaaattttcgtataatgttacatatatgtgaaacacatcgccatttccttatttttatgttttaccatggccttttgttttgtttgcttgaagatgttttccgaatttattttaaaatttaaatgtttcagttatgg

SEQ ID NO: 22360 - protein, 317 aa, Arabidopsis thaliana
  peptide (1)..(317): Ceres Seq. ID no. 13490358
MKETNFGEKTRVLVVGGTGSLGRRIVSACLAEGHETYVLQRPEIGVDIEKVQLLLSFKRLGAHLVEGSFSDHQSLVSAVKQVDVVVSAMSGVHFRTHNIPVQLKLVAAIKEAGNVKRFLPSEFGMDPSRMGHAMPPGSETFDQKMEIRNAIKAAGISHTYLVGACFAAYFGGNLSQMGTLFPPKNKVDIYGDGNVKVVFVDEDDMAKYTAKTLNDPRTLNKTVYVRPTDNILTQMELVQIWEKLTEKELEKTYVSGNDFLADIEDKEISHQAGLGHFYHIYYEGCLTDHEVGDDEEATKLYPDVKYKRMDEYLKIFV

SEQ ID NO: 22361 - protein, 229 aa, Arabidopsis thaliana
  peptide (1)..(229): Ceres Seq. ID no. 13490359
MSGVHFRTHNIPVQLKLVAAIKEAGNVKRFLPSEFGMDPSRMGHAMPPGSETFDQKMEIRNAIKAAGISHTYLVGACFAAYFGGNLSQMGTLFPPKNKVDIYGDGNVKVVFVDEDDMAKYTAKTLNDPRTLNKTVYVRPTDNILTQMELVQIWEKLTEKELEKTYVSGNDFLADIEDKEISHQAGLGHFYHIYYEGCLTDHEVGDDEEATKLYPDVKYKRMDEYLKIFV

SEQ ID NO: 22362 - protein, 193 aa, Arabidopsis thaliana
  peptide (1)..(193): Ceres Seq. ID no. 13490360
MDPSRMGHAMPPGSETFDQKMEIRNAIKAAGISHTYLVGACFAAYFGGNLSQMGTLFPPKNKVDIYGDGNVKVVFVDEDDMAKYTAKTLNDPRTLNKTVYVRPTDNILTQMELVQIWEKLTEKELEKTYVSGNDFLADIEDKEISHQAGLGHFYHIYYEGCLTDHEVGDDEEATKLYPDVKYKRMDEYLKIFV

SEQ ID NO: 22363 - DNA, 1660 bp, Arabidopsis thaliana
  misc_feature (1)..(1660): Ceres Seq. ID no. 12327451
  misc_feature (1)..(1660): Ortholog of  Ceres SEQ ID NO 13581273 as cited in SEQ ID NO 54551
  misc_feature (1)..(1660): Ortholog of  Ceres SEQ ID NO 13594209 as cited in SEQ ID NO 59089
  misc_feature (1)..(1660): Ortholog of  Ceres SEQ ID NO 15169611 as cited in SEQ ID NO 65939
  misc_feature (1)..(1660): Ortholog of  Ceres SEQ ID NO 13502874 as cited in SEQ ID NO 66298
  misc_feature (1)..(1660): Ortholog of  Ceres SEQ ID NO 12614124 as cited in SEQ ID NO 68392
aaatcctcgcacaagtagaaaaaaacacaaacatcctgaaactagaagagagagacaaaatgttatacttcatccttctccctcttctatttcttgtaataagttacaaatttctctactccaaaacgcaacgtttcaaccttcctccaggaccaccgtcacgacccttcgtcggccatctccacctcatgaaaccgccgatccaccgtctcctccaacgctactccaaccaatacggcccaatcttttccctccgtttcggctcccgacgcgtcgtggtcataacatccccttctctcgcccaagaatccttcaccggccaaaacgacatcgttctctccagccggccgctccaactcaccgccaaatacgtcgcatacaaccacacaaccgttggtacagctccttacggcgaccactggcgtaacctccgccgcatttgctcccaagagattctctcctctcaccgtctcatcaacttccaacacatccgcaaagacgagatcttacggatgctcacacgcctctcacgttacacacaaacctccaacgaaagcaacgatttcactcacatcgagctagaaccgctcttatctgatctaacattcaacaacatagtaagaatggttacagggaagagatattacggcgacgacgtcaacaacaaagaagaagcagagctattcaagaagctagtctacgatatcgccatgtatagcggcgctaatcattccgctgattacttaccaatactaaaactattcggaaacaaattcgagaaagaagttaaagctataggcaaatcaatggatgatattttgcagcgtttgttagatgaatgtagaagagataaagaaggtaacacaatggtcaatcatttgatctctctacaacaacaacaacctgagtattacactgacgttatcatcaaaggccttatgatgtcgatgatgctcgccggaactgagacctccgctgtgacattagagtgggcgatggcgaatctactgagaaatccagaagtactggagaaggcgagatcggagatcgatgagaagatcggaaaagatcgactaatcgacgaatcagacatcgcagtgcttccttacctccaaaacgtcgtctccgaaacattccggctatttccggtggcgccgtttctaatccctcgatcaccgacggacgacatgaaaatcggaggttacgacgtcccgcgagatacgatagtgatggttaacgcttgggctatacatagagatccagagatttgggaggagccagagaagtttaatccagatcgatataatgacggatgcggaagcgattactatgtttacaagctgatgccgtttgggaatggccggagaacttgtcccggcgccggattaggtcagaggattgtgacattggcgcttggatcgttgattcaatgctttgaatgggagaatgtgaaaggggaagagatggatatgtctgagagtactgggttgggtatgcgtaagatggatcctttacgggccatgtgtaggcctaggcccattatgtcaaagcttttactctaataagatgagtagaggttaaaaaaagaaaaaataacttattggatgtaactggtaattatctttaagataaagatgaataaaatgaatctttgcctcat

SEQ ID NO: 22364 - protein, 519 aa, Arabidopsis thaliana
  peptide (1)..(519): Ceres Seq. ID no. 12327452
ILAQVEKNTNILKLEERDKMLYFILLPLLFLVISYKFLYSKTQRFNLPPGPPSRPFVGHLHLMKPPIHRLLQRYSNQYGPIFSLRFGSRRVVVITSPSLAQESFTGQNDIVLSSRPLQLTAKYVAYNHTTVGTAPYGDHWRNLRRICSQEILSSHRLINFQHIRKDEILRMLTRLSRYTQTSNESNDFTHIELEPLLSDLTFNNIVRMVTGKRYYGDDVNNKEEAELFKKLVYDIAMYSGANHSADYLPILKLFGNKFEKEVKAIGKSMDDILQRLLDECRRDKEGNTMVNHLISLQQQQPEYYTDVIIKGLMMSMMLAGTETSAVTLEWAMANLLRNPEVLEKARSEIDEKIGKDRLIDESDIAVLPYLQNVVSETFRLFPVAPFLIPRSPTDDMKIGGYDVPRDTIVMVNAWAIHRDPEIWEEPEKFNPDRYNDGCGSDYYVYKLMPFGNGRRTCPGAGLGQRIVTLALGSLIQCFEWENVKGEEMDMSESTGLGMRKMDPLRAMCRPRPIMSKLLL

SEQ ID NO: 22365 - protein, 500 aa, Arabidopsis thaliana
  peptide (1)..(500): Ceres Seq. ID no. 12327453
MLYFILLPLLFLVISYKFLYSKTQRFNLPPGPPSRPFVGHLHLMKPPIHRLLQRYSNQYGPIFSLRFGSRRVVVITSPSLAQESFTGQNDIVLSSRPLQLTAKYVAYNHTTVGTAPYGDHWRNLRRICSQEILSSHRLINFQHIRKDEILRMLTRLSRYTQTSNESNDFTHIELEPLLSDLTFNNIVRMVTGKRYYGDDVNNKEEAELFKKLVYDIAMYSGANHSADYLPILKLFGNKFEKEVKAIGKSMDDILQRLLDECRRDKEGNTMVNHLISLQQQQPEYYTDVIIKGLMMSMMLAGTETSAVTLEWAMANLLRNPEVLEKARSEIDEKIGKDRLIDESDIAVLPYLQNVVSETFRLFPVAPFLIPRSPTDDMKIGGYDVPRDTIVMVNAWAIHRDPEIWEEPEKFNPDRYNDGCGSDYYVYKLMPFGNGRRTCPGAGLGQRIVTLALGSLIQCFEWENVKGEEMDMSESTGLGMRKMDPLRAMCRPRPIMSKLLL

SEQ ID NO: 22366 - protein, 457 aa, Arabidopsis thaliana
  peptide (1)..(457): Ceres Seq. ID no. 12327454
MKPPIHRLLQRYSNQYGPIFSLRFGSRRVVVITSPSLAQESFTGQNDIVLSSRPLQLTAKYVAYNHTTVGTAPYGDHWRNLRRICSQEILSSHRLINFQHIRKDEILRMLTRLSRYTQTSNESNDFTHIELEPLLSDLTFNNIVRMVTGKRYYGDDVNNKEEAELFKKLVYDIAMYSGANHSADYLPILKLFGNKFEKEVKAIGKSMDDILQRLLDECRRDKEGNTMVNHLISLQQQQPEYYTDVIIKGLMMSMMLAGTETSAVTLEWAMANLLRNPEVLEKARSEIDEKIGKDRLIDESDIAVLPYLQNVVSETFRLFPVAPFLIPRSPTDDMKIGGYDVPRDTIVMVNAWAIHRDPEIWEEPEKFNPDRYNDGCGSDYYVYKLMPFGNGRRTCPGAGLGQRIVTLALGSLIQCFEWENVKGEEMDMSESTGLGMRKMDPLRAMCRPRPIMSKLLL

SEQ ID NO: 22367 - DNA, 1520 bp, Arabidopsis thaliana
  misc_feature (1)..(1520): Ceres Seq. ID no. 13488272
  misc_feature (1)..(1520): Ortholog of  Ceres SEQ ID NO 15171297 as cited in SEQ ID NO 51458
agatgaaaaaaatattattatttgttggagaagaaagagagattcttcttcttcgattccagcgaaggaaaagcgtattcctcgtgagcactaacttctcactcctctcttcttcttcttcatcagtctacgttcacacaatctttcacccacctattcaaagctctctccggaagtttcgaggggttggttgttggttttcccgatgacttcggatggagctacgtcgacatcagcagctgcagctgcggcggcggcagcagcggcgaggaggaagccgtcgtggagagaaagggagaataatcggaggagagaaagacggagaagagctgtagctgcgaagatatacactgggcttagagctcaaggtgattataatttgcctaaacattgtgataataatgaagtccttaaagctctttgtgttgaagctggttgggttgttgaagaagatggtactacttatcgcaagggatgcaagcctttacctggtgagatagctgggacttcatctcgagtaactccatattcatcacagaaccagagccctctttcatcagcctttcaaagtcccatcccatcttaccaagttagcccgtcttcttcatcattcccgagtccttctcgcggtgaaccaaataacaacatgtcctctacattcttccctttcctcagaaatggtggcattccttcttctcttccttccctcagaatctcaaacagttgtccagttaccccaccgctctcatcgccgacttctaagaacccgaaaccgttgcctaactgggaatctatcgctaagcaatccatggccattgctaaacaatcaatggcgtcttttaattatcctttctatgcggtttctgcacctgctagtccgacacatcgccaccagtttcataccccggctactatacctgaatgtgatgagtctgactcttccactgttgattctggtcattggataagctttcagaagtttgcacaacaacagccattctctgcctctatggtgccaacctctcctaccttcaatcttgtgaaacctgcgcctcagcagatgtctccaaatactgctgccttccaagagattggtcaaagctctgagtttaaatttgagaatagccaagttaaaccctgggaaggagagaggatacatgatgtgggtatggaggatcttgagcttacacttggaaatgggaaggctcgtggttgacataaacaactaggcaaacccaaatggcatgtcattggaatatgagaaactaatcctcttgagtattttcttcttcgtccaggtatttggatctttatggaatctcatatgttcttcacttattatccaaatatgctgcccaaagccttctccatggaagcattggagtgttagagtggttattcaattcatgaatttggtttcaaaagcattatttgtagataaaaaaatcttaagatgtatgattctgtttccttacatttgttacattaattagtggcttgaaactgtcttgtgtcttgtc

SEQ ID NO: 22368 - protein, 336 aa, Arabidopsis thaliana
  peptide (1)..(336): Ceres Seq. ID no. 13488273
MTSDGATSTSAAAAAAAAAAARRKPSWRERENNRRRERRRRAVAAKIYTGLRAQGDYNLPKHCDNNEVLKALCVEAGWVVEEDGTTYRKGCKPLPGEIAGTSSRVTPYSSQNQSPLSSAFQSPIPSYQVSPSSSSFPSPSRGEPNNNMSSTFFPFLRNGGIPSSLPSLRISNSCPVTPPLSSPTSKNPKPLPNWESIAKQSMAIAKQSMASFNYPFYAVSAPASPTHRHQFHTPATIPECDESDSSTVDSGHWISFQKFAQQQPFSASMVPTSPTFNLVKPAPQQMSPNTAAFQEIGQSSEFKFENSQVKPWEGERIHDVGMEDLELTLGNGKARG

SEQ ID NO: 22369 - protein, 189 aa, Arabidopsis thaliana
  peptide (1)..(189): Ceres Seq. ID no. 13488274
MSSTFFPFLRNGGIPSSLPSLRISNSCPVTPPLSSPTSKNPKPLPNWESIAKQSMAIAKQSMASFNYPFYAVSAPASPTHRHQFHTPATIPECDESDSSTVDSGHWISFQKFAQQQPFSASMVPTSPTFNLVKPAPQQMSPNTAAFQEIGQSSEFKFENSQVKPWEGERIHDVGMEDLELTLGNGKARG

SEQ ID NO: 22370 - DNA, 1231 bp, Arabidopsis thaliana
  misc_feature (1)..(1231): Ceres Seq. ID no. 12335283
  misc_feature (1)..(1231): Ortholog of  Ceres SEQ ID NO 15168355 as cited in SEQ ID NO 57246
aaggaagatcgatcacggacaaaatttgcagagacattgtagacaaagatcattcatgtttcttcaactccggtcttagttagagaaaggagcttattgaagaatcaatggcctctgatagagaagagtttaacttgtgtggacctacacacctcacaactgttgattggggaaatgaagatcaccaacgttgtgtagcagcttgtttggtacaaggaatctatatagtagagcaagaccgtcagcttaaacgtgaaggcactgaagctcttgcatctccatggtgggaatcattcaactttaaattgatccgtcaccttaaagacgatgctgatttctccatctttggtggcatttttgaatacaaatcgttacagccagatgttgtggactctggagttccacggtatgttatagcctttagagggactttgactaaagcggattcgataacccgtgatatcgagttggatatccatattatacggaatgggcttcaccgaacgtcgcgttttgagatagcgatgcaagctgtgagaagtatggctgattctgtgggagcttcgagcttttggcttacggggcattctttaggtgcagcgatggcgcttcttgctggtaaaacaatggggaagagtggagtttatattaagtcattgttgtttaaccctccttatgtgtctcccccgattgagaggatagcaaacgaacgggttaggcacgggattagattcgcggggagtctaatcaccgcaggactcgctctctctagaactcttaaacaaacacagcagccgcaacaacagcaactgcaactacaaaacttgactgaagatccactagaggcattatcttcgtggctccctaacatacatgtaaatccaggggaccatctatgttcggagtatatcgggtttttcgagcaccggggaaatatggaacagattgggtatggagccggaattgtggagcggatggcgatgcagcattccttgggaggtttgttgatggatgcgatgggagtgagcaatgcagttgaagtagaagagccggttcatgtcatcccatctgctaatcttatagtaaacaaaaccatatccgaagattacaaggacgctcatgggatacaccaatggtggagagatgaccaagatttggtttcccacatttacatgtacaaatagctctcattcttttcctttttctcattactaagatttggtttgttcct

SEQ ID NO: 22371 - protein, 358 aa, Arabidopsis thaliana
  peptide (1)..(358): Ceres Seq. ID no. 12335284
MASDREEFNLCGPTHLTTVDWGNEDHQRCVAACLVQGIYIVEQDRQLKREGTEALASPWWESFNFKLIRHLKDDADFSIFGGIFEYKSLQPDVVDSGVPRYVIAFRGTLTKADSITRDIELDIHIIRNGLHRTSRFEIAMQAVRSMADSVGASSFWLTGHSLGAAMALLAGKTMGKSGVYIKSLLFNPPYVSPPIERIANERVRHGIRFAGSLITAGLALSRTLKQTQQPQQQQLQLQNLTEDPLEALSSWLPNIHVNPGDHLCSEYIGFFEHRGNMEQIGYGAGIVERMAMQHSLGGLLMDAMGVSNAVEVEEPVHVIPSANLIVNKTISEDYKDAHGIHQWWRDDQDLVSHIYMYK

SEQ ID NO: 22372 - protein, 219 aa, Arabidopsis thaliana
  peptide (1)..(219): Ceres Seq. ID no. 12335285
MQAVRSMADSVGASSFWLTGHSLGAAMALLAGKTMGKSGVYIKSLLFNPPYVSPPIERIANERVRHGIRFAGSLITAGLALSRTLKQTQQPQQQQLQLQNLTEDPLEALSSWLPNIHVNPGDHLCSEYIGFFEHRGNMEQIGYGAGIVERMAMQHSLGGLLMDAMGVSNAVEVEEPVHVIPSANLIVNKTISEDYKDAHGIHQWWRDDQDLVSHIYMYK

SEQ ID NO: 22373 - protein, 213 aa, Arabidopsis thaliana
  peptide (1)..(213): Ceres Seq. ID no. 12335286
MADSVGASSFWLTGHSLGAAMALLAGKTMGKSGVYIKSLLFNPPYVSPPIERIANERVRHGIRFAGSLITAGLALSRTLKQTQQPQQQQLQLQNLTEDPLEALSSWLPNIHVNPGDHLCSEYIGFFEHRGNMEQIGYGAGIVERMAMQHSLGGLLMDAMGVSNAVEVEEPVHVIPSANLIVNKTISEDYKDAHGIHQWWRDDQDLVSHIYMYK

SEQ ID NO: 22374 - DNA, 715 bp, Arabidopsis thaliana
  misc_feature (1)..(715): Ceres Seq. ID no. 12370447
  misc_feature (1)..(715): Ortholog of  Ceres SEQ ID NO 14309653 as cited in SEQ ID NO 0
aaactaaaaccctagctacctttttctcctcaccgcttctttcttccctgaactcagaacttagaacaaagaactctcgtagacgaagaagaagatgacggtagaaggagtgaaccctaaggcgtatccgttagctgattctcagttatcgataacgattcttgatcttgttcaacaagctacgaattacaaacagttaaagaaaggagctaatgaagctaccaagacattgaaccgtgggatctctgagttcattgttatggctgctgatactgagcctctcgagattcttcttcatcttcctcttcttgctgaagataagaatgtgccgtatgtgtttgtgccatcgaaacaagcccttggaagagcatgtgatgtaaccagacccgtgatcgcttgttccgttacatcaaacgaggctagtcagttgaaatctcaaattcagcaccttaaggatgccattgagaagctcctcatctagattcttggtggaatgaatgaatgatgggtctctccatttatgaagaggcttggactgaagtgagtttatgtgcaactttttagcctatgagaaaaacaaaaaacttgtgaacgaatcctatcctttttgaagattgtaatgctttttatttgatattgtgttggtgccaatgcatttatgaacaacaagaatccttttaaagtgagtttcttcaatttggttatttgtttggtg

SEQ ID NO: 22375 - protein, 128 aa, Arabidopsis thaliana
  peptide (1)..(128): Ceres Seq. ID no. 12370448
MTVEGVNPKAYPLADSQLSITILDLVQQATNYKQLKKGANEATKTLNRGISEFIVMAADTEPLEILLHLPLLAEDKNVPYVFVPSKQALGRACDVTRPVIACSVTSNEASQLKSQIQHLKDAIEKLLI

SEQ ID NO: 22376 - protein, 73 aa, Arabidopsis thaliana
  peptide (1)..(73): Ceres Seq. ID no. 12370449
MAADTEPLEILLHLPLLAEDKNVPYVFVPSKQALGRACDVTRPVIACSVTSNEASQLKSQIQHLKDAIEKLLI

SEQ ID NO: 22377 - DNA, 1460 bp, Arabidopsis thaliana
  misc_feature (1)..(1460): Ceres Seq. ID no. 12396066
  misc_feature (1)..(1460): Ortholog of  Ceres SEQ ID NO 15176440 as cited in SEQ ID NO 53697
  misc_feature (1)..(1460): Ortholog of  Ceres SEQ ID NO 14314717 as cited in SEQ ID NO 54224
  misc_feature (1)..(1460): Ortholog of  Ceres SEQ ID NO 14313429 as cited in SEQ ID NO 55662
actcaactctctttcgaaactcaatccttatataacacatcccatttaagcctataagctacacatatcagctctctcacaaaaataaaatggagggaagcccagtgaccagtgtcaggctctcttcggtggtgcctgcttctgtggtaggtgagaacaagccacgacagctcacacccatggacttagccatgaagctccactacgtccgagccgtctacttcttcaagggtgcacgtgacttcactgtcgccgacgtgaagaacaccatgtttactctacagtctctactccaatcttatcaccacgtctcaggtcggatccggatgtccgacaacgacaacgacacttcagctgcagccataccttacattcgctgcaacgacagtggcatacgcgtggtcgaggccaacgtcgaagagttcacagtggagaagtggctcgagttggacgaccgttccattgaccaccgattccttgtctacgatcacgttcttggtcctgatcttaccttctcgccactcgttttcctccagataactcagtttaaatgtggtgggctctgtattgggttgagttgggcccatattcttggagacgtgttttcagcatcaacgttcatgaaaacacttggacagctggtatcgggtcatgccccaacaaaaccggtttacccgaaaacccccgaactaacctctcatgctcgtaatgatggtgaagctatttccattgaaaagatagattcggttggcgagtattggttacttaccaataaatgcaagatggggagacacatttttaattttagcctcaaccacattgatagcttgatggccaagtacaccacgcgagaccaacctttctcggaggttgatattttgtatgcattgatatggaagtcgctactgaatatccgcggcgaaacaaacacgaatgttataacaatttgtgaccgtaaaaagtcttcaacctgttggaacgaggacttggtaataagcgtagtggaaaagaatgacgaaatggttgggatatccgaactagctgcactgattgctggtgaaaaaagagaagaaaacggtgcgatcaagaggatgatagaacaagataaaggctcttcggattttttcacgtacggtgcaaatttaacgtttgtgaatcttgatgaaatagatatgtatgaacttgagatcaacggagggaagccggatttcgtaaactacacgattcatggggtcggagacaaaggtgttgttttggtttttcccaagcaaaactttgcaaggattgtaagtgtagtgatgcctgaagaagaccttgcaaaactcaaggaggaggtgactaatatgattatataactttgtatcttcttcttgttgttatacataaatgctgttttttactctttgtaatttcattatcgaattgttgggaagcctatcaataaattgtttgaactgttt

SEQ ID NO: 22378 - protein, 421 aa, Arabidopsis thaliana
  peptide (1)..(421): Ceres Seq. ID no. 12396067
MEGSPVTSVRLSSVVPASVVGENKPRQLTPMDLAMKLHYVRAVYFFKGARDFTVADVKNTMFTLQSLLQSYHHVSGRIRMSDNDNDTSAAAIPYIRCNDSGIRVVEANVEEFTVEKWLELDDRSIDHRFLVYDHVLGPDLTFSPLVFLQITQFKCGGLCIGLSWAHILGDVFSASTFMKTLGQLVSGHAPTKPVYPKTPELTSHARNDGEAISIEKIDSVGEYWLLTNKCKMGRHIFNFSLNHIDSLMAKYTTRDQPFSEVDILYALIWKSLLNIRGETNTNVITICDRKKSSTCWNEDLVISVVEKNDEMVGISELAALIAGEKREENGAIKRMIEQDKGSSDFFTYGANLTFVNLDEIDMYELEINGGKPDFVNYTIHGVGDKGVVLVFPKQNFARIVSVVMPEEDLAKLKEEVTNMII

SEQ ID NO: 22379 - protein, 391 aa, Arabidopsis thaliana
  peptide (1)..(391): Ceres Seq. ID no. 12396068
MDLAMKLHYVRAVYFFKGARDFTVADVKNTMFTLQSLLQSYHHVSGRIRMSDNDNDTSAAAIPYIRCNDSGIRVVEANVEEFTVEKWLELDDRSIDHRFLVYDHVLGPDLTFSPLVFLQITQFKCGGLCIGLSWAHILGDVFSASTFMKTLGQLVSGHAPTKPVYPKTPELTSHARNDGEAISIEKIDSVGEYWLLTNKCKMGRHIFNFSLNHIDSLMAKYTTRDQPFSEVDILYALIWKSLLNIRGETNTNVITICDRKKSSTCWNEDLVISVVEKNDEMVGISELAALIAGEKREENGAIKRMIEQDKGSSDFFTYGANLTFVNLDEIDMYELEINGGKPDFVNYTIHGVGDKGVVLVFPKQNFARIVSVVMPEEDLAKLKEEVTNMII

SEQ ID NO: 22380 - protein, 387 aa, Arabidopsis thaliana
  peptide (1)..(387): Ceres Seq. ID no. 12396069
MKLHYVRAVYFFKGARDFTVADVKNTMFTLQSLLQSYHHVSGRIRMSDNDNDTSAAAIPYIRCNDSGIRVVEANVEEFTVEKWLELDDRSIDHRFLVYDHVLGPDLTFSPLVFLQITQFKCGGLCIGLSWAHILGDVFSASTFMKTLGQLVSGHAPTKPVYPKTPELTSHARNDGEAISIEKIDSVGEYWLLTNKCKMGRHIFNFSLNHIDSLMAKYTTRDQPFSEVDILYALIWKSLLNIRGETNTNVITICDRKKSSTCWNEDLVISVVEKNDEMVGISELAALIAGEKREENGAIKRMIEQDKGSSDFFTYGANLTFVNLDEIDMYELEINGGKPDFVNYTIHGVGDKGVVLVFPKQNFARIVSVVMPEEDLAKLKEEVTNMII

SEQ ID NO: 22381 - DNA, 1996 bp, Arabidopsis thaliana
  misc_feature (1)..(1996): Ceres Seq. ID no. 12703385
  misc_feature (1)..(1996): Ortholog of  Ceres SEQ ID NO 12626078 as cited in SEQ ID NO 69113
attcgtttacactaaccacttccttatccacaccaatccagaacgttcctcaaaaagctccctccttttctctcaaaatggcgtctgcaaacgctctctcttccgcctccgtcctctgttcttcccgtcagagtaagttgggaggaggaaatcagcagcaaggtcagagagttagctacaacaagaggacaatcagacgttttagtgttagagctaatgtaaaggaaatagcttttgaccagcactctagagctgctctacaagctggtattgataagcttgctgattgtgttggtctcactcttggccctagagggaggaatgttgtgttggatgaatttggaagtcctaaggttgtgaatgatggagtcaccattgctagagctattgagttacctaatgccatggaaaatgctggtgcagcgcttattcgtgaggttgcgagtaagactaatgactctgctggtgatgggacaaccactgcgtctatccttgctcgggagataatcaaacatggattgttgagcgtcacttctggtgcgaatcccgtttcactcaagaggggaattgataagactgttcaaggtctgatcgaagagcttcagaagaaagctaggcccgtgaaaggtcgtgatgacatcagagctgtggcttctatctctgctggaaatgatgaccttatagggtcaatgattgctgatgccatcgacaaagttggacctgatggtgttttgtccattgaatcttcatcttcttttgagaccacggtcgaagttgaagaagggatggagattgacagaggttacatctcgcctcagtttgttacaaaccctgagaaactactagctgagtttgagaatgctagggtattgatcactgatcagaagatcactgcgatcaaagacatcatccctattttggagaagaccactcagcttcgtgctccgttgttgattattgcagaggatgttactggtgaagccttagctacccttgtcgtgaacaagcttcgtggtgtcctcaatgttgttgccgttaaagcgccaggatttggagaaagaagaaaagccatgcttcaagatattgcaatcttgacaggagctgagtacctagccatggacatgagcttactggttgaaaacgcaaccatagatcaattgggtattgcccgaaaagtcacgattagcaaagattcgactaccctcattgcagatgcagcttccaaggacgaattacaagctcggattgctcagctgaagaaagaactattcgagactgattctgtgtatgactcagagaagctcgctgagagaattgcgaagctatctggaggtgttgctgtcattaaagtcggagcagcaactgaaactgagcttgaggaccgtaagcttcgtatcgaggatgcaaagaacgcaacatttgctgctatcgaggaaggcatagttccaggtggtggtgctgctttggtgcatctctccactgttattcccgccattaaggagacttttgaggatgctgatgaacgtttgggagctgacatagtacaaaaggcattgctgtcaccagctgctcttattgctcagaacgctggagttgaaggagaagttgttgtggaaaagattatgttcagcgattgggagaatgggtacaacgcaatgactgatacatatgagaatctgttcgaagctggagtgattgatccggctaaagtgacaagatgtgcgctacagaacgctgcttccgtagcaggaatggtactgaccactcaggccattgttgttgacaaaccgaaacccaaggctcctgctgctgctgctcctgagggtctcatggtgtaatcaaaacacaacatcttatcatcacaatggcatctttgtctttttgcacatttgtcatccccatttatctgcaatgtttttcttttttgggggaatatgagtagtttgttaacagtatcgagaaataattatcatcttttttgtccaatggaaattgc

SEQ ID NO: 22382 - protein, 611 aa, Arabidopsis thaliana
  peptide (1)..(611): Ceres Seq. ID no. 12703386
SFTLTTSLSTPIQNVPQKAPSFSLKMASANALSSASVLCSSRQSKLGGGNQQQGQRVSYNKRTIRRFSVRANVKEIAFDQHSRAALQAGIDKLADCVGLTLGPRGRNVVLDEFGSPKVVNDGVTIARAIELPNAMENAGAALIREVASKTNDSAGDGTTTASILAREIIKHGLLSVTSGANPVSLKRGIDKTVQGLIEELQKKARPVKGRDDIRAVASISAGNDDLIGSMIADAIDKVGPDGVLSIESSSSFETTVEVEEGMEIDRGYISPQFVTNPEKLLAEFENARVLITDQKITAIKDIIPILEKTTQLRAPLLIIAEDVTGEALATLVVNKLRGVLNVVAVKAPGFGERRKAMLQDIAILTGAEYLAMDMSLLVENATIDQLGIARKVTISKDSTTLIADAASKDELQARIAQLKKELFETDSVYDSEKLAERIAKLSGGVAVIKVGAATETELEDRKLRIEDAKNATFAAIEEGIVPGGGAALVHLSTVIPAIKETFEDADERLGADIVQKALLSPAALIAQNAGVEGEVVVEKIMFSDWENGYNAMTDTYENLFEAGVIDPAKVTRCALQNAASVAGMVLTTQAIVVDKPKPKAPAAAAPEGLMV

SEQ ID NO: 22383 - protein, 586 aa, Arabidopsis thaliana
  peptide (1)..(586): Ceres Seq. ID no. 12703387
MASANALSSASVLCSSRQSKLGGGNQQQGQRVSYNKRTIRRFSVRANVKEIAFDQHSRAALQAGIDKLADCVGLTLGPRGRNVVLDEFGSPKVVNDGVTIARAIELPNAMENAGAALIREVASKTNDSAGDGTTTASILAREIIKHGLLSVTSGANPVSLKRGIDKTVQGLIEELQKKARPVKGRDDIRAVASISAGNDDLIGSMIADAIDKVGPDGVLSIESSSSFETTVEVEEGMEIDRGYISPQFVTNPEKLLAEFENARVLITDQKITAIKDIIPILEKTTQLRAPLLIIAEDVTGEALATLVVNKLRGVLNVVAVKAPGFGERRKAMLQDIAILTGAEYLAMDMSLLVENATIDQLGIARKVTISKDSTTLIADAASKDELQARIAQLKKELFETDSVYDSEKLAERIAKLSGGVAVIKVGAATETELEDRKLRIEDAKNATFAAIEEGIVPGGGAALVHLSTVIPAIKETFEDADERLGADIVQKALLSPAALIAQNAGVEGEVVVEKIMFSDWENGYNAMTDTYENLFEAGVIDPAKVTRCALQNAASVAGMVLTTQAIVVDKPKPKAPAAAAPEGLMV

SEQ ID NO: 22384 - protein, 477 aa, Arabidopsis thaliana
  peptide (1)..(477): Ceres Seq. ID no. 12703388
MENAGAALIREVASKTNDSAGDGTTTASILAREIIKHGLLSVTSGANPVSLKRGIDKTVQGLIEELQKKARPVKGRDDIRAVASISAGNDDLIGSMIADAIDKVGPDGVLSIESSSSFETTVEVEEGMEIDRGYISPQFVTNPEKLLAEFENARVLITDQKITAIKDIIPILEKTTQLRAPLLIIAEDVTGEALATLVVNKLRGVLNVVAVKAPGFGERRKAMLQDIAILTGAEYLAMDMSLLVENATIDQLGIARKVTISKDSTTLIADAASKDELQARIAQLKKELFETDSVYDSEKLAERIAKLSGGVAVIKVGAATETELEDRKLRIEDAKNATFAAIEEGIVPGGGAALVHLSTVIPAIKETFEDADERLGADIVQKALLSPAALIAQNAGVEGEVVVEKIMFSDWENGYNAMTDTYENLFEAGVIDPAKVTRCALQNAASVAGMVLTTQAIVVDKPKPKAPAAAAPEGLMV

SEQ ID NO: 22385 - DNA, 1065 bp, Arabidopsis thaliana
  misc_feature (1)..(1065): Ceres Seq. ID no. 12329120
  misc_feature (1)..(1065): Ortholog of  Ceres SEQ ID NO 15168525 as cited in SEQ ID NO 58192
atcatcactctctgagatcgaagagaaagcaaaatcaaagttgtgatgaaatctctattgatgagaaccggttcgatgccggttcttcaaaaccggttaatttcaggtggttcatcgcggaagatgacgcctatctccaggaccaactccgtcgaatcattatccagctacggcgagagattcgccggcgggaagatttcgatcgaggttaaggctaatgtagggatgcggagggtgttatcggaaagtgatgtgattagatctgagagaatgttgaaaagtgttggatctaagccttcgccggcgagaatcccggaggatgatgaagcgggggaggaagaaattaggtttgcagatggttgggggtctatgatctccggtggtttacctgtggaggagaaatgtttcacgggtggcggtgttggtggtggatctggttatagcggcggttatggaaacggaggaggaggcggttatgaagataagagcaagatcggtgattattatcgagagatgttgagatctaatcctaataattcgcttcttctgatgaattacggcaagtttttgtatgaggtggagaaagatgcagagggagctgaagagtactatggaagagcaatactggagaatccaggagatggagaagctttatccatgtatggaagattgatatgggaaacgaagagagatgagaagagagctcaaggttactttgatcaagctgttaatgcttctcctaatgattgtatggttttgggatcatatgcacgtttcatgtgggaggcagaggatgatgatgatgatgatgaagaagaagaagaagaagaagaagaatggatggctgcatcaccactcatggtttctgcagtttagagactaacacgacgaagatgaagaagaagtaatggagactaagattatgtatcaagtatcaacctttttttttgtctatttcactgtctttttactaacttttgctgtaataacctgaagagtaatgaaaacatgtatgtgaaagaaaacgaatgtaaccttattataagagaataaaagtgcttttgc

SEQ ID NO: 22386 - protein, 276 aa, Arabidopsis thaliana
  peptide (1)..(276): Ceres Seq. ID no. 12329121
MKSLLMRTGSMPVLQNRLISGGSSRKMTPISRTNSVESLSSYGERFAGGKISIEVKANVGMRRVLSESDVIRSERMLKSVGSKPSPARIPEDDEAGEEEIRFADGWGSMISGGLPVEEKCFTGGGVGGGSGYSGGYGNGGGGGYEDKSKIGDYYREMLRSNPNNSLLLMNYGKFLYEVEKDAEGAEEYYGRAILENPGDGEALSMYGRLIWETKRDEKRAQGYFDQAVNASPNDCMVLGSYARFMWEAEDDDDDDEEEEEEEEEWMAASPLMVSAV

SEQ ID NO: 22387 - protein, 271 aa, Arabidopsis thaliana
  peptide (1)..(271): Ceres Seq. ID no. 12329122
MRTGSMPVLQNRLISGGSSRKMTPISRTNSVESLSSYGERFAGGKISIEVKANVGMRRVLSESDVIRSERMLKSVGSKPSPARIPEDDEAGEEEIRFADGWGSMISGGLPVEEKCFTGGGVGGGSGYSGGYGNGGGGGYEDKSKIGDYYREMLRSNPNNSLLLMNYGKFLYEVEKDAEGAEEYYGRAILENPGDGEALSMYGRLIWETKRDEKRAQGYFDQAVNASPNDCMVLGSYARFMWEAEDDDDDDEEEEEEEEEWMAASPLMVSAV

SEQ ID NO: 22388 - protein, 266 aa, Arabidopsis thaliana
  peptide (1)..(266): Ceres Seq. ID no. 12329123
MPVLQNRLISGGSSRKMTPISRTNSVESLSSYGERFAGGKISIEVKANVGMRRVLSESDVIRSERMLKSVGSKPSPARIPEDDEAGEEEIRFADGWGSMISGGLPVEEKCFTGGGVGGGSGYSGGYGNGGGGGYEDKSKIGDYYREMLRSNPNNSLLLMNYGKFLYEVEKDAEGAEEYYGRAILENPGDGEALSMYGRLIWETKRDEKRAQGYFDQAVNASPNDCMVLGSYARFMWEAEDDDDDDEEEEEEEEEWMAASPLMVSAV

SEQ ID NO: 22389 - DNA, 1840 bp, Arabidopsis thaliana
  misc_feature (1)..(1840): Ceres Seq. ID no. 13488395
  misc_feature (1)..(1840): Ortholog of  Ceres SEQ ID NO 13663419 as cited in SEQ ID NO 66561
aaaaaaatcaaaaaaattcatatcatctttttgtctttttttaccagaatttcatccttatttcgtgctaaatcattttccaaacattcataatactttttgttggtttatggccaactaacaaaatatcctctagattttcttctttgtgttagtctatataaagcaataccacagtgatcctcttttttaattcattctgtgtttatgtcaataatcacaatggtttggttaatgaaagtttttgtctttgtgacattactctctttagtgtttgtaataacagaatcagctcctgaatctgctcttatcaccaaacttcctggtttcgaaggcacttttccttcgaaacattactccgggtatgtgacaattgataaggaacatggaaagaatctatggtattactttattgaatcggagaagaatccatcgaaagatccggtggtgctttggctcaatggtggtccaggttgttcaagcatggatggatttgtgtatgagcatggtccattcaatttcgaactaccaaagaaaaacaatagtctcccactcttgcatcttaatccttatagttggtccaaggtctctaacattatataccttgattctcctgttggtgtgggattctcttactcaaacaataagtctgattacataaccggtgatattaaaaccgcggttgactctcacgcgttccttctcaagtggttccaaatgtttcctgagtttcaatcaaatccttttttcatctctggagaatcttacgccggagtttatgtcccaactcttgcttcagaagttgtcatagggaacaaaaatggagtaaagccggctcttaacttcaaggggtatttggttggaaatgtagttgcggatccgaagtttgatggaaatgcttttgtcccgtttgcacatgggatgggactaatctctgatgaactctttgagaacgttacaaaagcttgcaagggaaatttctatgaaatagagggactcgagtgcgaggaacagtatacgaaagttaacgatgatactaaccagttgaatatatacaacattcttgagccatgttaccacggaacatcgctatctgcattcgacattagatcgcttccttcaagtctccttcagctaggcaaaactgaaaaacggttacctataagaaaaagaatgtttggtcgagcgtggccagttcgtgcgcctgttcatccaggcattgtccctagctggtctcaacttcttgccgacgtcactgttccttgcattgatgatagagttgcaacagcgtggttgaacgatccagagattaggaaagctattcatactaaagaggagagcgagattggaaggtgggaactttgcagtgggaaactctcattctatcacgacgcaggaagcatgatcgatttccatagaaaccttacactaagtggatatagagctctcatttacagcggggatcacgatatgtgtgttccgtttactggctcggaagcttggacaaaatctcttggatacaaagttattgatgaatggagggcatggatatcaaatgaccaagtcgcggggtatacgcaaggatatgcaaacaatctcacatttttaaccatcaagggtgcaggacatacggttcctgagtacaaaccgcgggaggctttagacttctatagccgatttctagaaggaagcaagatttaagagagctgtctcatcagtttcatattctgtgctgtatttaaaagtgatcatcttatagcaatatagaatcttgattgatttgaataagaaagatatattcttcaactcattattcaacatagtaaaaatcatttacctt

SEQ ID NO: 22390 - protein, 497 aa, Arabidopsis thaliana
  peptide (1)..(497): Ceres Seq. ID no. 13488396
MSIITMVWLMKVFVFVTLLSLVFVITESAPESALITKLPGFEGTFPSKHYSGYVTIDKEHGKNLWYYFIESEKNPSKDPVVLWLNGGPGCSSMDGFVYEHGPFNFELPKKNNSLPLLHLNPYSWSKVSNIIYLDSPVGVGFSYSNNKSDYITGDIKTAVDSHAFLLKWFQMFPEFQSNPFFISGESYAGVYVPTLASEVVIGNKNGVKPALNFKGYLVGNVVADPKFDGNAFVPFAHGMGLISDELFENVTKACKGNFYEIEGLECEEQYTKVNDDTNQLNIYNILEPCYHGTSLSAFDIRSLPSSLLQLGKTEKRLPIRKRMFGRAWPVRAPVHPGIVPSWSQLLADVTVPCIDDRVATAWLNDPEIRKAIHTKEESEIGRWELCSGKLSFYHDAGSMIDFHRNLTLSGYRALIYSGDHDMCVPFTGSEAWTKSLGYKVIDEWRAWISNDQVAGYTQGYANNLTFLTIKGAGHTVPEYKPREALDFYSRFLEGSKI

SEQ ID NO: 22391 - protein, 492 aa, Arabidopsis thaliana
  peptide (1)..(492): Ceres Seq. ID no. 13488397
MVWLMKVFVFVTLLSLVFVITESAPESALITKLPGFEGTFPSKHYSGYVTIDKEHGKNLWYYFIESEKNPSKDPVVLWLNGGPGCSSMDGFVYEHGPFNFELPKKNNSLPLLHLNPYSWSKVSNIIYLDSPVGVGFSYSNNKSDYITGDIKTAVDSHAFLLKWFQMFPEFQSNPFFISGESYAGVYVPTLASEVVIGNKNGVKPALNFKGYLVGNVVADPKFDGNAFVPFAHGMGLISDELFENVTKACKGNFYEIEGLECEEQYTKVNDDTNQLNIYNILEPCYHGTSLSAFDIRSLPSSLLQLGKTEKRLPIRKRMFGRAWPVRAPVHPGIVPSWSQLLADVTVPCIDDRVATAWLNDPEIRKAIHTKEESEIGRWELCSGKLSFYHDAGSMIDFHRNLTLSGYRALIYSGDHDMCVPFTGSEAWTKSLGYKVIDEWRAWISNDQVAGYTQGYANNLTFLTIKGAGHTVPEYKPREALDFYSRFLEGSKI

SEQ ID NO: 22392 - protein, 488 aa, Arabidopsis thaliana
  peptide (1)..(488): Ceres Seq. ID no. 13488398
MKVFVFVTLLSLVFVITESAPESALITKLPGFEGTFPSKHYSGYVTIDKEHGKNLWYYFIESEKNPSKDPVVLWLNGGPGCSSMDGFVYEHGPFNFELPKKNNSLPLLHLNPYSWSKVSNIIYLDSPVGVGFSYSNNKSDYITGDIKTAVDSHAFLLKWFQMFPEFQSNPFFISGESYAGVYVPTLASEVVIGNKNGVKPALNFKGYLVGNVVADPKFDGNAFVPFAHGMGLISDELFENVTKACKGNFYEIEGLECEEQYTKVNDDTNQLNIYNILEPCYHGTSLSAFDIRSLPSSLLQLGKTEKRLPIRKRMFGRAWPVRAPVHPGIVPSWSQLLADVTVPCIDDRVATAWLNDPEIRKAIHTKEESEIGRWELCSGKLSFYHDAGSMIDFHRNLTLSGYRALIYSGDHDMCVPFTGSEAWTKSLGYKVIDEWRAWISNDQVAGYTQGYANNLTFLTIKGAGHTVPEYKPREALDFYSRFLEGSKI

SEQ ID NO: 22393 - DNA, 1166 bp, Arabidopsis thaliana
  misc_feature (1)..(1166): Ceres Seq. ID no. 13487903
  misc_feature (1)..(1166): Ortholog of  Ceres SEQ ID NO 13596436 as cited in SEQ ID NO 68754
  misc_feature (1)..(1166): Ortholog of  Ceres SEQ ID NO 15180160 as cited in SEQ ID NO 0
aaatacaaaaaaaactctcttctcaagtctctccttcttctccgtccttctcaattcttccgttcaaacaaatttctccaaacccaaaccctaatttcctccgtctgtgaaatcaagggttttctctgatctgggttttgatcagaaatcagatctaggtttaattttcgaaatcaaattatgaggaagagagaaagagagaacccttgttcgatttgtgggcattaccataagtacgaggaaggagaagtatgtggagtctgtggtcactgtatgcctgtttcttccgatacggtggcgccgcaacaagtccacgtcagtgcttttccgtcggagattctccctgagtttctttacctcggtagttacgacaacgcttctcgctctgagcttcttaagactcaaggaatctctcgtgttcttaatacggttcctatgtgccagaatctctacaggaattcattcacttatcatggtcttgataatgaaaaagttttacagtttgatgatgctattaagttcttagaccaatgtgagaaggacaaggcacgtgttcttgtgcattgcatgtctgggaaaagtagatcaccagcggttgttgtagcgtacttgatgaaacgaaaagggtggagactcgctgagagtcatcagtgggttaaacaacggagaccaagcactgacataagtccagagttttaccaacaactgcaggagtttgagcaggggatattcggatctgagatgatgtcggcgatgaatattaatgatgctccaacgtttgggtttggtttccctaagattgataatcaagcacaagctcctgtgttcaacaatgctcctacttcttctatattttcatctcctgcttcaagtatccctcctcaggagttcacttttggagcaactccaccaaagccaacaactggtggtgatattgcaatggatggctcttagaaccagataatcatatactcttgcaagaattttcatcaacaaatatactgttgtgagaatgtttctttttcttttttgtacatggagattggtgcattgcttgagagagtttggggtttgagaacatgagattggaagcatctttgtctggtttattcctcactctcccacaattctgtatcgatctttacagcgaaatatactattaaacc

SEQ ID NO: 22394 - protein, 257 aa, Arabidopsis thaliana
  peptide (1)..(257): Ceres Seq. ID no. 13487904
MRKRERENPCSICGHYHKYEEGEVCGVCGHCMPVSSDTVAPQQVHVSAFPSEILPEFLYLGSYDNASRSELLKTQGISRVLNTVPMCQNLYRNSFTYHGLDNEKVLQFDDAIKFLDQCEKDKARVLVHCMSGKSRSPAVVVAYLMKRKGWRLAESHQWVKQRRPSTDISPEFYQQLQEFEQGIFGSEMMSAMNINDAPTFGFGFPKIDNQAQAPVFNNAPTSSIFSSPASSIPPQEFTFGATPPKPTTGGDIAMDGS

SEQ ID NO: 22395 - protein, 226 aa, Arabidopsis thaliana
  peptide (1)..(226): Ceres Seq. ID no. 13487905
MPVSSDTVAPQQVHVSAFPSEILPEFLYLGSYDNASRSELLKTQGISRVLNTVPMCQNLYRNSFTYHGLDNEKVLQFDDAIKFLDQCEKDKARVLVHCMSGKSRSPAVVVAYLMKRKGWRLAESHQWVKQRRPSTDISPEFYQQLQEFEQGIFGSEMMSAMNINDAPTFGFGFPKIDNQAQAPVFNNAPTSSIFSSPASSIPPQEFTFGATPPKPTTGGDIAMDGS

SEQ ID NO: 22396 - protein, 172 aa, Arabidopsis thaliana
  peptide (1)..(172): Ceres Seq. ID no. 13487906
MCQNLYRNSFTYHGLDNEKVLQFDDAIKFLDQCEKDKARVLVHCMSGKSRSPAVVVAYLMKRKGWRLAESHQWVKQRRPSTDISPEFYQQLQEFEQGIFGSEMMSAMNINDAPTFGFGFPKIDNQAQAPVFNNAPTSSIFSSPASSIPPQEFTFGATPPKPTTGGDIAMDGS

SEQ ID NO: 22397 - DNA, 1692 bp, Arabidopsis thaliana
  misc_feature (1)..(1692): Ceres Seq. ID no. 12581370
  misc_feature (1)..(1692): Ortholog of  Ceres SEQ ID NO 12625388 as cited in SEQ ID NO 63299
gttgaatccttgttaatctttttcttcaatctctcgatctgatcgttatcgaaacctcgcgattctaaccaagtccagttaattttgtgctccatagcgattccatggcttctttaatgttatctctcggttccacttctctgttaccgcgcgagattaacaaggataagctaaagcttggaacttctgcttcgaacccgttcctaaaagcaaagtcttttagcagagtgactatgacggttgcagtgaagccttctcgtttcgagggtataactatggctccaccagaccctattcttggagtcagtgaagcattcaaagctgacactaacgggatgaaactcaatcttggtgttggtgcttatcgtactgaggaactccagccttatgtgcttaatgttgttaaaaaggcggagaatttgatgttggagagaggagataacaaagagtatcttccaattgaggggttggcagcattcaacaaggctactgctgagttgctatttggagctggtcatcctgttattaaggaacaaagagtagcaacaattcagggtctttcgggaacaggttcactgcgattagcagcggctcctatagagcgttatttccctggagcaaaagttgtgatctcatcaccaacctggggtaatcacaagaatatcttcaatgatgccaaagttccgtggtccgaataccgctactatgatccaaaaacaattggtttggattttgagggaatgatagcagatataaaggaagctccagaaggatccttcatcttgcttcacggatgtgctcacaacccaactggaattgacccaacaccagaacagtaggtaaaaattgctgatgtcattcaggaaaagaaccatatcccatttttcgatgttgcataccagggctttgctagtggaagccttgatgaagatgcagcatctgtgagattatttgctgagcggggaatggagttttttgttgctcagtcatatagtaaaaatttaggtttgtatgcagaaagaattggggcaatcaatgtcgtgtgctcctcagctgatgctgctacaagggtcaagagccagttgaaaaggattgctcggcctatgtactcgaatccaccagttcatggggcgagaatcgtggccaatgtagtgggtgatgtaactatgttcagtgaatggaaagcagagatggaaatgatggcaggaagaataaagacggttagacaagagctgtatgatagcctcgtttcaaaagacaagagcgggaaggactggtccttcattctgaagcaaattggcatgttctctttcaccggcctaaacaaagctcagagcgataacatgacggacaaatggcatgtgtatatgactaaagacgggaggatatcattggccggattatctctggccaaatgcgagtatcttgctgatgcgatcatcgactcataccataacgtaagctgagcttccatctcagtagatgacaataagaaacagttttatataccctttttagcttcttcttgatctttgattgaaaccagatggctaaattaataagctagcatcacactatgattgctagacaattttcaaggaaacttttgatttgatcgtgtttgacaggccttgttgtattgggagactcccatcgagttatagaagaacttgttacgattgtattttacgt

SEQ ID NO: 22398 - protein, 244 aa, Arabidopsis thaliana
  peptide (1)..(244): Ceres Seq. ID no. 12581371
MASLMLSLGSTSLLPREINKDKLKLGTSASNPFLKAKSFSRVTMTVAVKPSRFEGITMAPPDPILGVSEAFKADTNGMKLNLGVGAYRTEELQPYVLNVVKKAENLMLERGDNKEYLPIEGLAAFNKATAELLFGAGHPVIKEQRVATIQGLSGTGSLRLAAAPIERYFPGAKVVISSPTWGNHKNIFNDAKVPWSEYRYYDPKTIGLDFEGMIADIKEAPEGSFILLHGCAHNPTGIDPTPEQ

SEQ ID NO: 22399 - protein, 240 aa, Arabidopsis thaliana
  peptide (1)..(240): Ceres Seq. ID no. 12581372
MLSLGSTSLLPREINKDKLKLGTSASNPFLKAKSFSRVTMTVAVKPSRFEGITMAPPDPILGVSEAFKADTNGMKLNLGVGAYRTEELQPYVLNVVKKAENLMLERGDNKEYLPIEGLAAFNKATAELLFGAGHPVIKEQRVATIQGLSGTGSLRLAAAPIERYFPGAKVVISSPTWGNHKNIFNDAKVPWSEYRYYDPKTIGLDFEGMIADIKEAPEGSFILLHGCAHNPTGIDPTPEQ

SEQ ID NO: 22400 - protein, 201 aa, Arabidopsis thaliana
  peptide (1)..(201): Ceres Seq. ID no. 12581373
MTVAVKPSRFEGITMAPPDPILGVSEAFKADTNGMKLNLGVGAYRTEELQPYVLNVVKKAENLMLERGDNKEYLPIEGLAAFNKATAELLFGAGHPVIKEQRVATIQGLSGTGSLRLAAAPIERYFPGAKVVISSPTWGNHKNIFNDAKVPWSEYRYYDPKTIGLDFEGMIADIKEAPEGSFILLHGCAHNPTGIDPTPEQ

SEQ ID NO: 22401 - DNA, 1271 bp, Arabidopsis thaliana
  misc_feature (1)..(1271): Ceres Seq. ID no. 12324458
  misc_feature (1)..(1271): Ortholog of  Ceres SEQ ID NO 12598859 as cited in SEQ ID NO 62872
  misc_feature (1)..(1271): Ortholog of  Ceres SEQ ID NO 12617350 as cited in SEQ ID NO 63777
  misc_feature (1)..(1271): Ortholog of  Ceres SEQ ID NO 13598749 as cited in SEQ ID NO 64341
  misc_feature (1)..(1271): Ortholog of  Ceres SEQ ID NO 15176153 as cited in SEQ ID NO 0
  misc_feature (1)..(1271): Ortholog of  Ceres SEQ ID NO 15179157 as cited in SEQ ID NO 0
ttcagacaagtcggtccactaattcaaattttctccattctctcgttccaattattatttacttttttcacccaataaaaaaaaaaccatgcattcacttccggtgaatctcgtcctcaccgtacttacggtgttcctaacatcaccggcgcaagttatcggataccgtccatatccaccaaaaaccaacggctccgatcaaatcttcgacgcttcaaaaaaattcgaaggctcatcgaatctcgtccgcctccgttaccacatgggtccagtcttaaccaacaacatcaccgttcacccaatctggtacggcacgtggcaaaaatcccagaagaaaatcatccgtgagttcattaactcaatctcagccgttggatctaaacacccttcagtctccggttggtggaaaaccgtacagctttacactgaccaaactggatctaacattaccggtacggttcgtctcggtgaagagaaaaacgaccggttttattctcatggtaaatcacttacccggttatcgattcaatccgtgataaaatccgccgtcacttctaggtctcgcccgttgccggttaatcccaaaagcggtttatatcttctcctcaccgccgatgatgtctacgtgcaagatttttgcggccaggtttgtggatttcactatttcacgtttccgtcgattgttggattcacgttaccgtacgcttgggttggaaactcggcgaagctttgtcccggagtttgtgcttatccgttcgccgtaccggcgtttataccgggattaaaaccggttaaatcgcctaacggagatgttggagtagatgggatgataagtgtgatagctcacgagattgctgagctggcgacgaatccgttggttaatgcttggtacgcaggacccgacccggtagctccggttgagatagcggatctttgtgagggtatttatggaacaggaggtggtggttcgtacacaggacagatgttgaacgatcatagtggtgccacgtataatgttaatgggatccgacggcggtatttgatccagtggttatggagccacgttgttagttactgtaccggacccaatgcgcttgattagtgaatgaatggtatggtttgtgtttaaatttgggaagggtaattttgtcttttggaatttgagctcgacattgtggaattattatgatcaagaatgggtttgttgtgtcgatgcataattaaaattagttaatgatagttatgaggaaaggcacgtatgttgcttatcc

SEQ ID NO: 22402 - protein, 337 aa, Arabidopsis thaliana
  peptide (1)..(337): Ceres Seq. ID no. 12324459
MHSLPVNLVLTVLTVFLTSPAQVIGYRPYPPKTNGSDQIFDASKKFEGSSNLVRLRYHMGPVLTNNITVHPIWYGTWQKSQKKIIREFINSISAVGSKHPSVSGWWKTVQLYTDQTGSNITGTVRLGEEKNDRFYSHGKSLTRLSIQSVIKSAVTSRSRPLPVNPKSGLYLLLTADDVYVQDFCGQVCGFHYFTFPSIVGFTLPYAWVGNSAKLCPGVCAYPFAVPAFIPGLKPVKSPNGDVGVDGMISVIAHEIAELATNPLVNAWYAGPDPVAPVEIADLCEGIYGTGGGGSYTGQMLNDHSGATYNVNGIRRRYLIQWLWSHVVSYCTGPNALD

SEQ ID NO: 22403 - protein, 279 aa, Arabidopsis thaliana
  peptide (1)..(279): Ceres Seq. ID no. 12324460
MGPVLTNNITVHPIWYGTWQKSQKKIIREFINSISAVGSKHPSVSGWWKTVQLYTDQTGSNITGTVRLGEEKNDRFYSHGKSLTRLSIQSVIKSAVTSRSRPLPVNPKSGLYLLLTADDVYVQDFCGQVCGFHYFTFPSIVGFTLPYAWVGNSAKLCPGVCAYPFAVPAFIPGLKPVKSPNGDVGVDGMISVIAHEIAELATNPLVNAWYAGPDPVAPVEIADLCEGIYGTGGGGSYTGQMLNDHSGATYNVNGIRRRYLIQWLWSHVVSYCTGPNALD

SEQ ID NO: 22404 - DNA, 1258 bp, Arabidopsis thaliana
  misc_feature (1)..(1258): Ceres Seq. ID no. 13648379
  misc_feature (1)..(1258): Ortholog of  Ceres SEQ ID NO 15175425 as cited in SEQ ID NO 0
aagcaaaacaatcggagaaagttgatggaggagatgttcgttttgtgaacgcttcaatggcataaatttccggccatcacatttcttctactttctctttctctctcccttgttgttgttctctagaattcgattcatcgttgttaacgtcgtccattcttcttctttgatcccttctttgatctctcacatttccgattccaatttagggtttcctctcttttcacatttctagggtttttcttgttccctttgtaccggagatggtgaattgaaaggaaaaataaaacgcttttgagagcttatatttgaggttgtttcctcaagttttgtagatctgaggttgctatttttgaattagagattctttttttttttcaaaattttgtttgttgtgatcatacatagacgtacgtagctccatttctggtggagaaggaagaagaagagaaatgagcgcttcgaggttcataaagtgtgtcaccgttggcgacggagctgttggtaaaacctgtttgctgatttcttacaccagcaacacttttcctacggattatgtaccgactgttttcgataactttagcgcaaatgtggttgttaatggagccactgtgaatcttgggctatgggataccgcagggcaggaggattataacagattaagacctttgagttaccgcggtgctgatgttttcatcttagcattctctcttatcagtaaggctagttatgagaatgtctccaagaagtggatcccagagctgaagcattatgcccctggtgtccctatagttcttgttggaaccaaactagatcttcgggatgacaaacagttcttcattgaccaccctggcgctgtaccaattactactgctcagggagaggaactgaagaaactaattggagctcccgcatacatcgagtgcagttcaaaaacacaagagaacgtgaaaggagtatttgatgcagcgatccgagtggttcttcaacctccaaagcagaagaaaaagaaaagcaaagcacaaaaagcctgctccattttgtaatttctctacgcttctcttacgtatctctctctgtctctctgtctcttccactcttctagtgaaggcttaagaagaaaacacattgggcttaaaaattgttccagagttcgttgtgataagctctcttaatccttaaaaaaacgattatttctgtttattgatgaatagtttccagctttagctgagacctaatattgcacttaccacttctc

SEQ ID NO: 22405 - protein, 197 aa, Arabidopsis thaliana
  peptide (1)..(197): Ceres Seq. ID no. 13648380
MSASRFIKCVTVGDGAVGKTCLLISYTSNTFPTDYVPTVFDNFSANVVVNGATVNLGLWDTAGQEDYNRLRPLSYRGADVFILAFSLISKASYENVSKKWIPELKHYAPGVPIVLVGTKLDLRDDKQFFIDHPGAVPITTAQGEELKKLIGAPAYIECSSKTQENVKGVFDAAIRVVLQPPKQKKKKSKAQKACSIL

SEQ ID NO: 22406 - DNA, 1277 bp, Arabidopsis thaliana
  misc_feature (1)..(1277): Ceres Seq. ID no. 13490586
  misc_feature (1)..(1277): Ortholog of  Ceres SEQ ID NO 15177270 as cited in SEQ ID NO 51703
ctctccactctctcaatctcttaacttaaacaaaaccaacaattatcaatcttcaatgacgcatctcaacaaaaaacagaggttagagaataaccataacaatactgtgaacaaccatttcgaagacttacatgacgatctcatcatctctatcctccgcaaactcgctacctccgcttcttctccttccgatttcctcaccgttctctccacatgcaagagattgaatcggttaggattacatcctctggttttatctaaagccggtactcaaaccctagccgtcacggcggagaaatggtcagattcttctcataaattcctcaaactctgtgttaatgccggaaacatcgacgcttcgtactctctcggaatgatccgattttactgtctacaaaatccagtgagcggcgcgtcattaatggctaaagcggcgattaaatcacacgcgccggcgctttattcgttatcggtgattcagtttaacggaagcggcggttcaaaaaccgataagaatctacgcgccggcgttgctctttgtgcacgctctgcttatttaggccacgtcgatgcgttacgagagcttggtcactgtcttcaagacggttacggtgttcctcgtgacgtctccgaaggtcgtcgtcttttgattcaagctaacgcgcgtgagctcgcgtgttctctacgctcttacctctctctgaaatctggggacgagaacgagaccttaactgatttaagcgtggttccggttcaggagattcatccggttaaccggtttttaaaagagtggtttagttcgggtcgggttgatttagcggaagggttaaggatgtgttcgcatggtggttgtggaaggccggagactcgggctcatgagtttcggcgatgttctgtttgtgggaaggttaattattgctcgcgtggttgtcaggcgttggattggagagcgaagcataaggttgaatgtacgccgttggatttgtgggttgcggcagcggcggagattggcgacgacggtgaagcggtggcggtggagattgatgataatcatggtgagcggtaacggctctaacgctttttttcaaggaaatgactgaaatgccaacagtttctttgactgttgagtttttttttttttttgggttatttaattatgttttaaaaaatttaatgttaatttcttctcttaattaattagttttggctaatggcgtttctgaatcttctgatactaaactggcatgttattttaaataatatagttttttgccgtt

SEQ ID NO: 22407 - protein, 354 aa, Arabidopsis thaliana
  peptide (1)..(354): Ceres Seq. ID no. 13490587
SPLSQSLNLNKTNNYQSSMTHLNKKQRLENNHNNTVNNHFEDLHDDLIISILRKLATSASSPSDFLTVLSTCKRLNRLGLHPLVLSKAGTQTLAVTAEKWSDSSHKFLKLCVNAGNIDASYSLGMIRFYCLQNPVSGASLMAKAAIKSHAPALYSLSVIQFNGSGGSKTDKNLRAGVALCARSAYLGHVDALRELGHCLQDGYGVPRDVSEGRRLLIQANARELACSLRSYLSLKSGDENETLTDLSVVPVQEIHPVNRFLKEWFSSGRVDLAEGLRMCSHGGCGRPETRAHEFRRCSVCGKVNYCSRGCQALDWRAKHKVECTPLDLWVAAAAEIGDDGEAVAVEIDDNHGER

SEQ ID NO: 22408 - protein, 336 aa, Arabidopsis thaliana
  peptide (1)..(336): Ceres Seq. ID no. 13490588
MTHLNKKQRLENNHNNTVNNHFEDLHDDLIISILRKLATSASSPSDFLTVLSTCKRLNRLGLHPLVLSKAGTQTLAVTAEKWSDSSHKFLKLCVNAGNIDASYSLGMIRFYCLQNPVSGASLMAKAAIKSHAPALYSLSVIQFNGSGGSKTDKNLRAGVALCARSAYLGHVDALRELGHCLQDGYGVPRDVSEGRRLLIQANARELACSLRSYLSLKSGDENETLTDLSVVPVQEIHPVNRFLKEWFSSGRVDLAEGLRMCSHGGCGRPETRAHEFRRCSVCGKVNYCSRGCQALDWRAKHKVECTPLDLWVAAAAEIGDDGEAVAVEIDDNHGER

SEQ ID NO: 22409 - protein, 230 aa, Arabidopsis thaliana
  peptide (1)..(230): Ceres Seq. ID no. 13490589
MIRFYCLQNPVSGASLMAKAAIKSHAPALYSLSVIQFNGSGGSKTDKNLRAGVALCARSAYLGHVDALRELGHCLQDGYGVPRDVSEGRRLLIQANARELACSLRSYLSLKSGDENETLTDLSVVPVQEIHPVNRFLKEWFSSGRVDLAEGLRMCSHGGCGRPETRAHEFRRCSVCGKVNYCSRGCQALDWRAKHKVECTPLDLWVAAAAEIGDDGEAVAVEIDDNHGER

SEQ ID NO: 22410 - DNA, 1060 bp, Arabidopsis thaliana
  misc_feature (1)..(1060): Ceres Seq. ID no. 13487931
  misc_feature (1)..(1060): Ortholog of  Ceres SEQ ID NO 14306439 as cited in SEQ ID NO 53628
  misc_feature (1)..(1060): Ortholog of  Ceres SEQ ID NO 12611235 as cited in SEQ ID NO 56101
  misc_feature (1)..(1060): Ortholog of  Ceres SEQ ID NO 15226202 as cited in SEQ ID NO 65001
  misc_feature (1)..(1060): Ortholog of  Ceres SEQ ID NO 15177896 as cited in SEQ ID NO 0
aaaaatttgttcgattctcattcttcttctcacagtcgtaaaccctaaaaaaaaaaacagagaaatcaaatttcaatctcgaaggatctacaaagaagcatgacgaccggagatctcgttaatatccatcctactgagcttaaattcccctttgagttgaagaaacaaagttcgtgttcgatgcaattgaccaacaagacaactactcaatgtgtcgcttttaaggttaaaacaaccaatcctcgcaaatactgtgttcgtcctaacactggtgttgtcttgcccggtgattcctgcaatgttacagtgacgatgcaagcccagaaagaggcaccacttgatatgcaatgcaaagacaagttccttgttcagactgttgttgtctctgatggtactacttccaaagaagtcctcgctgaaatgttcaacaaggaggctggtagagtgattgaggatttcaaactgcgagttgtttacattcctgctaatcctccttcacctgtccctgaaggttctgaagaaggcaactctcctatggcttccctcaacgatattgcctctcaatctgcctcactctttgatgacgtgtcaagaacgtttgaagaaacaagtgagaaatcttcagaggcatggtctatgatttccaaattgacggaggagaagacttctgctactcaacaaagtcagaagctccgtctcgaactggaaatgctgaggaaagaaacaagcaagaagcagtcgggtggtcattccttgctcttgatgctgctggtgggtctgctcggttgcgtgattggctacttattgaaccggatataaacgccatggggttagcttcatcatccttttaatcatcaaatcttgcaaagttcttaagatttttgaccagattttcgtaaaatggaggtggtttttttttaaaagtttcatatttaagctgtaaaatcagtagctgtagcacaggaacaggtgtgattttgtggcaggtttcttgttattgatttaaacacactttcgagtctgtagtaagatctcaagagtcgttcttatgattggaatt

SEQ ID NO: 22411 - protein, 239 aa, Arabidopsis thaliana
  peptide (1)..(239): Ceres Seq. ID no. 13487932
MTTGDLVNIHPTELKFPFELKKQSSCSMQLTNKTTTQCVAFKVKTTNPRKYCVRPNTGVVLPGDSCNVTVTMQAQKEAPLDMQCKDKFLVQTVVVSDGTTSKEVLAEMFNKEAGRVIEDFKLRVVYIPANPPSPVPEGSEEGNSPMASLNDIASQSASLFDDVSRTFEETSEKSSEAWSMISKLTEEKTSATQQSQKLRLELEMLRKETSKKQSGGHSLLLMLLVGLLGCVIGYLLNRI

SEQ ID NO: 22412 - protein, 212 aa, Arabidopsis thaliana
  peptide (1)..(212): Ceres Seq. ID no. 13487933
MQLTNKTTTQCVAFKVKTTNPRKYCVRPNTGVVLPGDSCNVTVTMQAQKEAPLDMQCKDKFLVQTVVVSDGTTSKEVLAEMFNKEAGRVIEDFKLRVVYIPANPPSPVPEGSEEGNSPMASLNDIASQSASLFDDVSRTFEETSEKSSEAWSMISKLTEEKTSATQQSQKLRLELEMLRKETSKKQSGGHSLLLMLLVGLLGCVIGYLLNRI

SEQ ID NO: 22413 - protein, 168 aa, Arabidopsis thaliana
  peptide (1)..(168): Ceres Seq. ID no. 13487934
MQAQKEAPLDMQCKDKFLVQTVVVSDGTTSKEVLAEMFNKEAGRVIEDFKLRVVYIPANPPSPVPEGSEEGNSPMASLNDIASQSASLFDDVSRTFEETSEKSSEAWSMISKLTEEKTSATQQSQKLRLELEMLRKETSKKQSGGHSLLLMLLVGLLGCVIGYLLNRI

SEQ ID NO: 22414 - DNA, 1343 bp, Arabidopsis thaliana
  misc_feature (1)..(1343): Ceres Seq. ID no. 12325220
  misc_feature (1)..(1343): Ortholog of  Ceres SEQ ID NO 15176596 as cited in SEQ ID NO 55168
  misc_feature (1)..(1343): Ortholog of  Ceres SEQ ID NO 14301576 as cited in SEQ ID NO 62362
ctcaaatcatttttttcctctcgattgtgagatcaattattaatattcatctggagaattatcgtctcttttctccattgctatggctctctcaactactccttctcagatgtccgttgcacttccaactagaattgatgggtcgagccgatctatgattaaggttcaaagtataagcttcactgataagtcatggggtcctcctctgctgagactagattcgaaatctagaagcttaggtgtgaaaaaaaggtccacaatatgcatgtcacttcagcaatcaagcaaatccaaagtcttggttactcctctagaacttgaagatcccaaagagactcccttaaacttgtttaggcctaaggagccttatactgcaactattgtttcggttgagagaattgttggtccacaagcacctggagagacttgccacattgttattgatcatgatggtaatgttccttactgggaaggacaaagctatggagtcattcctcctggtgagaatcccaagaaacctggtgcacctcataacgttcgcctttattcgattgcatcaacacggtatggagattcttttgatggcaaaacagctagtctatgtgtccgtcgagctatttactatgatccggagacaggaaaagaagatccttccaaagctggtgtatgcagtaacttcttgtgcaatgccaaacccggcgataaagttaaaatcaccggtccatctggaaaggtaatgcttttacctgaagatgacccgaaagctactcacataatgattgctactggaaccggagttgctccgtacagaggatacctacggcgtatgtttatggagaatgttcccaatttcaagtttgacggacttgcttggctcttccttggtgtggctaactcagacagtcttctctatgatgaagaatttgccgggtaccgcaaggactatccagaaaatttcaggtacgacaaagcgctgagcagagaagagaaaaacaagaaaggagggaaaatgtatgtgcaggacaagattgaagaatacagcgatgaaatcttcaaacttctggacaatggagctcatatttacttttgcggacttaaaggaatgatgcccgggattcaagatacgcttaagagagtcgctgaagagcgaggcgaaagctgggagcagaaacttactcagctcaggaagaacaagcagtggcatgttgaagtgtattgagttaatagtctttctgtggttttcgccatttttgcaactgaataatcgtgtcaattaatggacacagtgtaactcaaccaagaaagtcaatcattagacatgaatctttcctctaatttcaact

SEQ ID NO: 22415 - protein, 378 aa, Arabidopsis thaliana
  peptide (1)..(378): Ceres Seq. ID no. 12325221
MALSTTPSQMSVALPTRIDGSSRSMIKVQSISFTDKSWGPPLLRLDSKSRSLGVKKRSTICMSLQQSSKSKVLVTPLELEDPKETPLNLFRPKEPYTATIVSVERIVGPQAPGETCHIVIDHDGNVPYWEGQSYGVIPPGENPKKPGAPHNVRLYSIASTRYGDSFDGKTASLCVRRAIYYDPETGKEDPSKAGVCSNFLCNAKPGDKVKITGPSGKVMLLPEDDPKATHIMIATGTGVAPYRGYLRRMFMENVPNFKFDGLAWLFLGVANSDSLLYDEEFAGYRKDYPENFRYDKALSREEKNKKGGKMYVQDKIEEYSDEIFKLLDNGAHIYFCGLKGMMPGIQDTLKRVAEERGESWEQKLTQLRKNKQWHVEVY

SEQ ID NO: 22416 - protein, 369 aa, Arabidopsis thaliana
  peptide (1)..(369): Ceres Seq. ID no. 12325222
MSVALPTRIDGSSRSMIKVQSISFTDKSWGPPLLRLDSKSRSLGVKKRSTICMSLQQSSKSKVLVTPLELEDPKETPLNLFRPKEPYTATIVSVERIVGPQAPGETCHIVIDHDGNVPYWEGQSYGVIPPGENPKKPGAPHNVRLYSIASTRYGDSFDGKTASLCVRRAIYYDPETGKEDPSKAGVCSNFLCNAKPGDKVKITGPSGKVMLLPEDDPKATHIMIATGTGVAPYRGYLRRMFMENVPNFKFDGLAWLFLGVANSDSLLYDEEFAGYRKDYPENFRYDKALSREEKNKKGGKMYVQDKIEEYSDEIFKLLDNGAHIYFCGLKGMMPGIQDTLKRVAEERGESWEQKLTQLRKNKQWHVEVY

SEQ ID NO: 22417 - protein, 354 aa, Arabidopsis thaliana
  peptide (1)..(354): Ceres Seq. ID no. 12325223
MIKVQSISFTDKSWGPPLLRLDSKSRSLGVKKRSTICMSLQQSSKSKVLVTPLELEDPKETPLNLFRPKEPYTATIVSVERIVGPQAPGETCHIVIDHDGNVPYWEGQSYGVIPPGENPKKPGAPHNVRLYSIASTRYGDSFDGKTASLCVRRAIYYDPETGKEDPSKAGVCSNFLCNAKPGDKVKITGPSGKVMLLPEDDPKATHIMIATGTGVAPYRGYLRRMFMENVPNFKFDGLAWLFLGVANSDSLLYDEEFAGYRKDYPENFRYDKALSREEKNKKGGKMYVQDKIEEYSDEIFKLLDNGAHIYFCGLKGMMPGIQDTLKRVAEERGESWEQKLTQLRKNKQWHVEVY

SEQ ID NO: 22418 - DNA, 1384 bp, Arabidopsis thaliana
  misc_feature (1)..(1384): Ceres Seq. ID no. 12334636
  misc_feature (1)..(1384): Ortholog of  Ceres SEQ ID NO 14310639 as cited in SEQ ID NO 53858
  misc_feature (1)..(1384): Ortholog of  Ceres SEQ ID NO 14312851 as cited in SEQ ID NO 58364
attgacaagttcatctgtctctcttgtcgtagtgaaagagaaaaagaaacaagtttttttctgttgggtaattttctactcgtcattggtttcatcgacattgaactagaaccagaatggctactgctacgtctcaccaatcagtcgtttcatttgcttctctccggtcttctccttcttctacaatctctcaatgtggattcaagatcgattcttcactgagctttacatcgaaaaagacaaacttttgcaagattaaagcaatggcatcatcagtttcttatgacaacactctcttgtctccttccaagacaatccctgacaattctcaaaagaaatcaaatgaagcagctttgatattgattaggcgtggagaatctttatggaacgagaagaatctttttactggttgtgttgatgtgccattgactgagaaaggtgttgaagaagctattgaagcagggaagaggattagtaacattcctgttgatgttatctttacatcttctttgattcgtgctcagatgactgcaatgcttgctatgattcaacaccgtcgtaagaaggtaccgatcatcttgcacgatgaaagcgaacaggcgaaaacttggagtcaagtttttagtgatgagactaaaaaccaatccattcctgtcatacctgcttggcagctcaatgaaagaatgtatggagaattacaaggtcttaacaagcaagaaacagccgagagatatgggaaagagcaagttcacgaatggcgtaggagttatgatattcctcctcccaaaggagagagtttggagatgtgtgctgagagagcagtagcttattttcaggacaatatcgaaccgaagcttgcagctggaaagaacgtaatgatagctgctcacgggaactcgctgcggtctatcattatgtatcttgacaaattgacttgccaggaggtgataagtctagagctatcgacaggtatacctcttctctacatattcaaagaaggcaaattcatgaagcggggaagcccggttggtccaacagaagctggtgtttatgcttataccaagagattggctcaatacagacagaagctagaggacgatagtgaagtactctgtgcctgaagtaaactagaaaatttggttcttcatctactcaactctcttcccacaagcttaggaccttagaggcgtttacaaagaatacataacttctgattttgttctttttttctggttcttcttcattcatatgtgtcataaccaccactgttacctgaaggataatgttcaaaatgtgaccgtttccgtctttctagtcaaacacttgttgatgttgtgtttgttgttgttaccaaactctttaagcaaacaagtattattctgtg

SEQ ID NO: 22419 - protein, 334 aa, Arabidopsis thaliana
  peptide (1)..(334): Ceres Seq. ID no. 12334637
MATATSHQSVVSFASLRSSPSSTISQCGFKIDSSLSFTSKKTNFCKIKAMASSVSYDNTLLSPSKTIPDNSQKKSNEAALILIRRGESLWNEKNLFTGCVDVPLTEKGVEEAIEAGKRISNIPVDVIFTSSLIRAQMTAMLAMIQHRRKKVPIILHDESEQAKTWSQVFSDETKNQSIPVIPAWQLNERMYGELQGLNKQETAERYGKEQVHEWRRSYDIPPPKGESLEMCAERAVAYFQDNIEPKLAAGKNVMIAAHGNSLRSIIMYLDKLTCQEVISLELSTGIPLLYIFKEGKFMKRGSPVGPTEAGVYAYTKRLAQYRQKLEDDSEVLCA

SEQ ID NO: 22420 - protein, 285 aa, Arabidopsis thaliana
  peptide (1)..(285): Ceres Seq. ID no. 12334638
MASSVSYDNTLLSPSKTIPDNSQKKSNEAALILIRRGESLWNEKNLFTGCVDVPLTEKGVEEAIEAGKRISNIPVDVIFTSSLIRAQMTAMLAMIQHRRKKVPIILHDESEQAKTWSQVFSDETKNQSIPVIPAWQLNERMYGELQGLNKQETAERYGKEQVHEWRRSYDIPPPKGESLEMCAERAVAYFQDNIEPKLAAGKNVMIAAHGNSLRSIIMYLDKLTCQEVISLELSTGIPLLYIFKEGKFMKRGSPVGPTEAGVYAYTKRLAQYRQKLEDDSEVLCA

SEQ ID NO: 22421 - protein, 198 aa, Arabidopsis thaliana
  peptide (1)..(198): Ceres Seq. ID no. 12334639
MTAMLAMIQHRRKKVPIILHDESEQAKTWSQVFSDETKNQSIPVIPAWQLNERMYGELQGLNKQETAERYGKEQVHEWRRSYDIPPPKGESLEMCAERAVAYFQDNIEPKLAAGKNVMIAAHGNSLRSIIMYLDKLTCQEVISLELSTGIPLLYIFKEGKFMKRGSPVGPTEAGVYAYTKRLAQYRQKLEDDSEVLCA

SEQ ID NO: 22422 - DNA, 788 bp, Arabidopsis thaliana
  misc_feature (1)..(788): Ceres Seq. ID no. 13580848
  misc_feature (1)..(788): Ortholog of  Ceres SEQ ID NO 15175519 as cited in SEQ ID NO 1110
  misc_feature (1)..(788): Ortholog of  Ceres SEQ ID NO 13637980 as cited in SEQ ID NO 58973
  misc_feature (1)..(788): Ortholog of  Ceres SEQ ID NO 12624081 as cited in SEQ ID NO 61729
  misc_feature (1)..(788): Ortholog of  Ceres SEQ ID NO 13599435 as cited in SEQ ID NO 0
atagaaaacaagtaaccaaagagagacgaagcaaaaacattcagagagaaaattcagcatttttgatagctcaagcacttgattctttccaaaggggtttcctgagatcacaaaggccaagtaacaatggcgaaaggagttgcagttttgaacagcagtgagggtgttacggggactatctttttcacccaggaaggcgatggtgtgaccactgtgagtggaacagtttctggccttaagcctggtcttcatggtttccatgtccatgctcttggtgacaccactaacggttgcatgtctactggtccacatttcaaccccgatggtaaaacacacggtgcccctgaggatgctaatcgacatgctggtgatctaggaaacatcactgttggagatgatggaactgccaccttcacaatcactgattgccagattcctcttactggaccaaactctattgttggtagggctgttgttgtccatgcagaccctgatgacctcggaaagggaggccatgaactcagcctggctactggaaacgcaggcggccgtgttgcttgcggcatcattggtctccagggctaaagctgctacgtttccaaagaagagattgatgtaataaggaggtccaaccttagacctgggtttggtagttgtgtgtatcttctggtgtgtggctaaaaacctatgagcttagtgtggctcaaagcatttttaattcagacagaaaacagagaaaattccgtacttttattatttcatgaataaaaaagagttgatttactgtt

SEQ ID NO: 22423 - protein, 152 aa, Arabidopsis thaliana
  peptide (1)..(152): Ceres Seq. ID no. 13580849
MAKGVAVLNSSEGVTGTIFFTQEGDGVTTVSGTVSGLKPGLHGFHVHALGDTTNGCMSTGPHFNPDGKTHGAPEDANRHAGDLGNITVGDDGTATFTITDCQIPLTGPNSIVGRAVVVHADPDDLGKGGHELSLATGNAGGRVACGIIGLQG

SEQ ID NO: 22424 - protein, 96 aa, Arabidopsis thaliana
  peptide (1)..(96): Ceres Seq. ID no. 13580850
MSTGPHFNPDGKTHGAPEDANRHAGDLGNITVGDDGTATFTITDCQIPLTGPNSIVGRAVVVHADPDDLGKGGHELSLATGNAGGRVACGIIGLQG

SEQ ID NO: 22425 - DNA, 1812 bp, Arabidopsis thaliana
  misc_feature (1)..(1812): Ceres Seq. ID no. 13497407
  misc_feature (1)..(1812): Ortholog of  Ceres SEQ ID NO 15176223 as cited in SEQ ID NO 51535
  misc_feature (1)..(1812): Ortholog of  Ceres SEQ ID NO 15171193 as cited in SEQ ID NO 59370
  misc_feature (1)..(1812): Ortholog of  Ceres SEQ ID NO 13597198 as cited in SEQ ID NO 63665
ctctttagctatcttttttgtgttaccggttcaaatggccgccgtcgcagattccgttgagaacaacggttccataaacctccctgagaatgaaaaccttataccggcgggattcagtgccgccgcattgcttgacgaaaactctggcgctttccctgaattgaatcagcccgatagcttagctgctgctgagactaccttccccgatacgaacgattccgcggaggagaggtggccaggttggcctggtgattgcgtgtttcgtatgatcgttccggtgactaaagtcggagctattattggacgcaaaggtgactttataaagaagatgtgtgaggagactcgtgctcgtatcaaagtccttgatggtcctgttaatactcccgatcgcatcgtgttaatatctggtaaggaagaaccagaggcctacatgtcaccggcaatggacgcagtgttgagggtgtttagacgtgtttcagggttgcctgataatgatgatgatgatgttcaaaacgctggaagtgtcttctcttcagtgcgtttattagttgcttcaacgcaggcgattaatttgattggaaaacaaggatctttgattaagtctatagtagagaactctggtgcatcagttcgtattttatcagaagaggaaacaccgttttatgctgcacaggatgagaggatagtggatttgcaaggggaagctttaaagattcttaaagcattagaagccattgttggacaccttaggagatttttagttgaccatactgttgtccctctcttcgagaagcaatatctagctagggtctctcaaactcgccaggaagaaccgttagctgaaagcaagtcatctctgcatactatttcgtcaaatctaatggagcctgatttctccctcttagcacggagggaacctttgtttctggagcgcgattctcgggtggactcacgtgttcagccttcgggagtttctatctacagtcaggatcctgtactgtctgccagacactccccaggtcttgctcgggtttcttctgcttttgtgacacaggtatctcaaacgatgcaaataccattctcctatgcagaggatattattggtgtagaaggagctaatatagcctatatccgtcgaagaagcggagctaccataaccattaaagagagtccgcatcctgatcaaatcacagtggaaatcaaaggcacaacttctcaagtacaaactgctgagcaactaattcaagagttcatcatcaatcacaaggaaccagtttcggtatcagggggatatgccagaatcgactctggatatgtacctgcatatcctcctcagctaagtaaccgtcaagagccgctcccgagcacctacatgggcacagagccggtgcagtacagaccaacagcatactctcagctggggggtccttctacctacacaccgaccctgactgggcaaacttatggttcggaatatagaccagcttctgatgttggtggctacagcagttataatctttgaattggttgctgtgtttaagtttatttgcagattaatttctctttagagaaaggctcatttataatataatagagagggaaaaggaacaagttctagagagccaatgtagttgttggaatgtgtaatgtaaatctaggtgcccttttttttttttttttttcatacctcgatatatgtcacactacgtttctggtcaaataagaacatgttttttctttcttttttgtatgaatttgtttatcagaagtcagaatgattcagttttaagaaatttttagttaacgttttac

SEQ ID NO: 22426 - protein, 506 aa, Arabidopsis thaliana
  peptide (1)..(506): Ceres Seq. ID no. 13497408
SLAIFFVLPVQMAAVADSVENNGSINLPENENLIPAGFSAAALLDENSGAFPELNQPDSLAAAETTFPDTNDSAEERWPGWPGDCVFRMIVPVTKVGAIIGRKGDFIKKMCEETRARIKVLDGPVNTPDRIVLISGKEEPEAYMSPAMDAVLRVFRRVSGLPDNDDDDVQNAGSVFSSVRLLVASTQAINLIGKQGSLIKSIVENSGASVRILSEEETPFYAAQDERIVDLQGEALKILKALEAIVGHLRRFLVDHTVVPLFEKQYLARVSQTRQEEPLAESKSSLHTISSNLMEPDFSLLARREPLFLERDSRVDSRVQPSGVSIYSQDPVLSARHSPGLARVSSAFVTQVSQTMQIPFSYAEDIIGVEGANIAYIRRRSGATITIKESPHPDQITVEIKGTTSQVQTAEQLIQEFIINHKEPVSVSGGYARIDSGYVPAYPPQLSNRQEPLPSTYMGTEPVQYRPTAYSQLGGPSTYTPTLTGQTYGSEYRPASDVGGYSSYNL

SEQ ID NO: 22427 - protein, 495 aa, Arabidopsis thaliana
  peptide (1)..(495): Ceres Seq. ID no. 13497409
MAAVADSVENNGSINLPENENLIPAGFSAAALLDENSGAFPELNQPDSLAAAETTFPDTNDSAEERWPGWPGDCVFRMIVPVTKVGAIIGRKGDFIKKMCEETRARIKVLDGPVNTPDRIVLISGKEEPEAYMSPAMDAVLRVFRRVSGLPDNDDDDVQNAGSVFSSVRLLVASTQAINLIGKQGSLIKSIVENSGASVRILSEEETPFYAAQDERIVDLQGEALKILKALEAIVGHLRRFLVDHTVVPLFEKQYLARVSQTRQEEPLAESKSSLHTISSNLMEPDFSLLARREPLFLERDSRVDSRVQPSGVSIYSQDPVLSARHSPGLARVSSAFVTQVSQTMQIPFSYAEDIIGVEGANIAYIRRRSGATITIKESPHPDQITVEIKGTTSQVQTAEQLIQEFIINHKEPVSVSGGYARIDSGYVPAYPPQLSNRQEPLPSTYMGTEPVQYRPTAYSQLGGPSTYTPTLTGQTYGSEYRPASDVGGYSSYNL

SEQ ID NO: 22428 - protein, 418 aa, Arabidopsis thaliana
  peptide (1)..(418): Ceres Seq. ID no. 13497410
MIVPVTKVGAIIGRKGDFIKKMCEETRARIKVLDGPVNTPDRIVLISGKEEPEAYMSPAMDAVLRVFRRVSGLPDNDDDDVQNAGSVFSSVRLLVASTQAINLIGKQGSLIKSIVENSGASVRILSEEETPFYAAQDERIVDLQGEALKILKALEAIVGHLRRFLVDHTVVPLFEKQYLARVSQTRQEEPLAESKSSLHTISSNLMEPDFSLLARREPLFLERDSRVDSRVQPSGVSIYSQDPVLSARHSPGLARVSSAFVTQVSQTMQIPFSYAEDIIGVEGANIAYIRRRSGATITIKESPHPDQITVEIKGTTSQVQTAEQLIQEFIINHKEPVSVSGGYARIDSGYVPAYPPQLSNRQEPLPSTYMGTEPVQYRPTAYSQLGGPSTYTPTLTGQTYGSEYRPASDVGGYSSYNL

SEQ ID NO: 22429 - DNA, 1259 bp, Arabidopsis thaliana
  misc_feature (1)..(1259): Ceres Seq. ID no. 12370993
  misc_feature (1)..(1259): Ortholog of  Ceres SEQ ID NO 13598373 as cited in SEQ ID NO 62185
  misc_feature (1)..(1259): Ortholog of  Ceres SEQ ID NO 12584664 as cited in SEQ ID NO 62232
  misc_feature (1)..(1259): Ortholog of  Ceres SEQ ID NO 15169537 as cited in SEQ ID NO 64197
atttttagggtttcttcgtgccattgatattttgagaggcgaaggaaacaatacgattcagagagagacgagtgaaaatggctgcaaaagaaggtagtaggatttttgtcggtggtttatcgccggaagtgacagatagagaccttgaaagagcttttagccgcttcggagacattctcgattgtcagatcatgctggaaagagatactggtcgttcacgtggattcgggtttatcacttttgctgatcgccgcgctatggatgagtccatcagagagatgcatggaagggactttggtgatcgggtcatctcagtgaacagagctgaaccaaaactggggcgagatgatggagaaagtcatggctctagaggtggcagagacagtggctactcgattgctggaaaaggaagctttggtggaggtggaggtggaggtgggcgtgttggtgaagatgaatgcttcaagtgtggacgggttgggcactgggcccgtgattgtccttctgctggtggtggtcgtggaggacctgtaggtggtttttcttcacgtgctagtgcgtatggaggatctgatggacgtgttgaccgctatgctgaccgtgaccgctatgtggaccgcgaacgatacatagatgatcgatacgacggtgctgcacgctatggtgctagagacaggtttgacagcagagaagcctacataccccgtgatcgatacgccagtgacaggtatgcagccccggctgatcggtttgcaggtggtgatagatacagccgtggatcagaccgttatcctccagggagctatgacaaagctcggtcctttgagagagacatagccccgagtgcaggcagtgacaggtacggtggtggtagagctggtggtcccatccgtggaggaggagaggagggaagagggtttagaagcagagccggtgctccttatgagagaccgagcagaagtggtggtggtggagcttatccgtcgtcgtccacttttgaccgttattaagacacattaatgaaagaaagtgagaatgatgcttggttagagctctatacactcagtcgtgtgtgttgcttgtggtaatgaatatctctgtaagcgttataggtgtaaaagacttgtcttttttatttatatatgattagtttgcggacctgtttagctttgtattttgatcctttattatttttggtttgttttggaccataacatgacttttgagcttcgtcagtcaatgttaaaccttgcacacat

SEQ ID NO: 22430 - protein, 310 aa, Arabidopsis thaliana
  peptide (1)..(310): Ceres Seq. ID no. 12370994
MAAKEGSRIFVGGLSPEVTDRDLERAFSRFGDILDCQIMLERDTGRSRGFGFITFADRRAMDESIREMHGRDFGDRVISVNRAEPKLGRDDGESHGSRGGRDSGYSIAGKGSFGGGGGGGGRVGEDECFKCGRVGHWARDCPSAGGGRGGPVGGFSSRASAYGGSDGRVDRYADRDRYVDRERYIDDRYDGAARYGARDRFDSREAYIPRDRYASDRYAAPADRFAGGDRYSRGSDRYPPGSYDKARSFERDIAPSAGSDRYGGGRAGGPIRGGGEEGRGFRSRAGAPYERPSRSGGGGAYPSSSTFDRY

SEQ ID NO: 22431 - protein, 272 aa, Arabidopsis thaliana
  peptide (1)..(272): Ceres Seq. ID no. 12370995
MLERDTGRSRGFGFITFADRRAMDESIREMHGRDFGDRVISVNRAEPKLGRDDGESHGSRGGRDSGYSIAGKGSFGGGGGGGGRVGEDECFKCGRVGHWARDCPSAGGGRGGPVGGFSSRASAYGGSDGRVDRYADRDRYVDRERYIDDRYDGAARYGARDRFDSREAYIPRDRYASDRYAAPADRFAGGDRYSRGSDRYPPGSYDKARSFERDIAPSAGSDRYGGGRAGGPIRGGGEEGRGFRSRAGAPYERPSRSGGGGAYPSSSTFDRY

SEQ ID NO: 22432 - protein, 250 aa, Arabidopsis thaliana
  peptide (1)..(250): Ceres Seq. ID no. 12370996
MDESIREMHGRDFGDRVISVNRAEPKLGRDDGESHGSRGGRDSGYSIAGKGSFGGGGGGGGRVGEDECFKCGRVGHWARDCPSAGGGRGGPVGGFSSRASAYGGSDGRVDRYADRDRYVDRERYIDDRYDGAARYGARDRFDSREAYIPRDRYASDRYAAPADRFAGGDRYSRGSDRYPPGSYDKARSFERDIAPSAGSDRYGGGRAGGPIRGGGEEGRGFRSRAGAPYERPSRSGGGGAYPSSSTFDRY

SEQ ID NO: 22433 - DNA, 1158 bp, Arabidopsis thaliana
  misc_feature (1)..(1158): Ceres Seq. ID no. 12326444
  misc_feature (1)..(1158): Ortholog of  Ceres SEQ ID NO 12616093 as cited in SEQ ID NO 63331
atttttgtgttctgtctttcttggtggtgtgataaagaataaagagagccagtcgagggtaaaacgaaaggccaccattttcaatctttccacaataatggcggctactagagtgttaactgcagcgacggccgtgacccaaaccacctcctgtttcctcgccaagcaagctttcactcttccggcgaagaaatcctgcggcggatttggtggtctctgcttcagcagaagagctttggtgttgaaatctaagagacctttctcctgcagtgccatttacaatcctcaggttaaggttcaagaagaaggtccggccgaatccctagattatcgagttttcttcctcgatggttctggaaagaaggtttctccatggcatgatataccattgaccttaggcgatggagttttcaactttatagttgaaatacctaaagagtcaaaagcaaaaatggaggttgctactgatgaagatttcactcctattaagcaggatactaagaaggggaagctcagatattatccgtataacattaactggaactatgggttgcttcctcaaacatgggaagatccatctcatgcaaattctgaagttgaaggatgttttggggataatgatccagttgatgttgttgagattggtgaaacacaaaggaagataggcgatattctaaagataaagcctttagctgctttagctatgattgatgaaggtgagctagactggaagattgttgccatttctttggatgacccaaaagctcatcttgtgaatgatgttgaagatgttgagaaacatttcccgggtacactaacagccattagagactggtttagagactacaagatcccagatggaaagcctgctaacagatttggtcttggagacaaaccagcaaacaaagactatgctttgaagatcatccaagaaacaaatgaatcatgggctaaacttgtgaagagatcagttgatgctggagacctttcactttactgaacatattttgcaatgtcgacttatgaggtcgaataatgaatagactcaagattcctatatcattcttgttgtttcctttcaattgagatgtaaacattgggatttggattttgtttttcaccattgatgactgagaagtaataaaatgactttctgcg

SEQ ID NO: 22434 - protein, 332 aa, Arabidopsis thaliana
  peptide (1)..(332): Ceres Seq. ID no. 12326445
FLCSVFLGGVIKNKESQSRVKRKATIFNLSTIMAATRVLTAATAVTQTTSCFLAKQAFTLPAKKSCGGFGGLCFSRRALVLKSKRPFSCSAIYNPQVKVQEEGPAESLDYRVFFLDGSGKKVSPWHDIPLTLGDGVFNFIVEIPKESKAKMEVATDEDFTPIKQDTKKGKLRYYPYNINWNYGLLPQTWEDPSHANSEVEGCFGDNDPVDVVEIGETQRKIGDILKIKPLAALAMIDEGELDWKIVAISLDDPKAHLVNDVEDVEKHFPGTLTAIRDWFRDYKIPDGKPANRFGLGDKPANKDYALKIIQETNESWAKLVKRSVDAGDLSLY

SEQ ID NO: 22435 - protein, 300 aa, Arabidopsis thaliana
  peptide (1)..(300): Ceres Seq. ID no. 12326446
MAATRVLTAATAVTQTTSCFLAKQAFTLPAKKSCGGFGGLCFSRRALVLKSKRPFSCSAIYNPQVKVQEEGPAESLDYRVFFLDGSGKKVSPWHDIPLTLGDGVFNFIVEIPKESKAKMEVATDEDFTPIKQDTKKGKLRYYPYNINWNYGLLPQTWEDPSHANSEVEGCFGDNDPVDVVEIGETQRKIGDILKIKPLAALAMIDEGELDWKIVAISLDDPKAHLVNDVEDVEKHFPGTLTAIRDWFRDYKIPDGKPANRFGLGDKPANKDYALKIIQETNESWAKLVKRSVDAGDLSLY

SEQ ID NO: 22436 - protein, 182 aa, Arabidopsis thaliana
  peptide (1)..(182): Ceres Seq. ID no. 12326447
MEVATDEDFTPIKQDTKKGKLRYYPYNINWNYGLLPQTWEDPSHANSEVEGCFGDNDPVDVVEIGETQRKIGDILKIKPLAALAMIDEGELDWKIVAISLDDPKAHLVNDVEDVEKHFPGTLTAIRDWFRDYKIPDGKPANRFGLGDKPANKDYALKIIQETNESWAKLVKRSVDAGDLSLY

SEQ ID NO: 22437 - DNA, 1336 bp, Arabidopsis thaliana
  misc_feature (1)..(1336): Ceres Seq. ID no. 13575213
  misc_feature (1)..(1336): Ortholog of  Ceres SEQ ID NO 13655338 as cited in SEQ ID NO 68882
agtttctctcttccgcgtctctccttctcgttatcctgcaaattagggtttaagtaagaaaaaaaagctagagaagtatctcgatctcttcttctgttagattctgctttcctttgagatttgctagtgtaatcgtaacctccgaagacccaagatggctcgtaatgaagagaaagcacagtcgatgctcaacagattcatcacccagaaagaatctgagaagaagaagccaaaagagcgtcgaccttacctcgcatcagaatgtagagatctagctgaagcagacaaatggagacagcaaattttgagagagatcggtagcaaagtagctgagattcagaacgaaggattaggagagcacagacttcgagatctaaacgatgagattaacaagcttctcagggagagatatcattgggagcggcgaatcgttgagctaggtggtcacaattactcgaaacattcggcgaagatgacggatctagaaggtaacataatcgatgtacctaaccctagtggtcgtggtcctggttatcgttacttcggagctgctaagaaacttcctggtgttagagagctttttgagaagcctcctgagctgaggaagcgtaaaactaggtatgatatatataaaaggattgatgctagctattatgggtatagagatgatgaagatggtattttggagaagttggagaggaaatctgaaggagggatgaggaaaagatcggtggaggagtggcggagattagatgaggttaggaaggaagctaggaaaggtgctagtgaggttgtgagtgttggagctgcagctgctgcggcgagggaagtgttgtttgaggaggaggaggatgttgttgaggaggagaggatggagagggagaaagaggaggagaaagagagggaatttgtggttcatgttccgttgcctgatgagaaggagattgagaagatggtgttggagaagaagaagatggatctgcttagtaagtatgctagtgaagatttggttgagcagcagactgaggctaaatccatgctcaatattcatagatagaaagatgctctgttttaccaacaaactcagccgcgatggtctcttgcctaaagaagaaacgatgttgggcgtttgaaatatgatttcatggaaacaaatgtgaaagactcaaggagaagatacaatgtcacttggaactgaactagtgtattctattatgtagctcgacttttgtatctttatacttctgaatgtaatgctcattgcctgaggtttatacattgttcctttggctctaactagattggtgctatgcagagacataagttgagaccaacc

SEQ ID NO: 22438 - protein, 300 aa, Arabidopsis thaliana
  peptide (1)..(300): Ceres Seq. ID no. 13575214
MARNEEKAQSMLNRFITQKESEKKKPKERRPYLASECRDLAEADKWRQQILREIGSKVAEIQNEGLGEHRLRDLNDEINKLLRERYHWERRIVELGGHNYSKHSAKMTDLEGNIIDVPNPSGRGPGYRYFGAAKKLPGVRELFEKPPELRKRKTRYDIYKRIDASYYGYRDDEDGILEKLERKSEGGMRKRSVEEWRRLDEVRKEARKGASEVVSVGAAAAAAREVLFEEEEDVVEEERMEREKEEEKEREFVVHVPLPDEKEIEKMVLEKKKMDLLSKYASEDLVEQQTEAKSMLNIHR

SEQ ID NO: 22439 - protein, 290 aa, Arabidopsis thaliana
  peptide (1)..(290): Ceres Seq. ID no. 13575215
MLNRFITQKESEKKKPKERRPYLASECRDLAEADKWRQQILREIGSKVAEIQNEGLGEHRLRDLNDEINKLLRERYHWERRIVELGGHNYSKHSAKMTDLEGNIIDVPNPSGRGPGYRYFGAAKKLPGVRELFEKPPELRKRKTRYDIYKRIDASYYGYRDDEDGILEKLERKSEGGMRKRSVEEWRRLDEVRKEARKGASEVVSVGAAAAAAREVLFEEEEDVVEEERMEREKEEEKEREFVVHVPLPDEKEIEKMVLEKKKMDLLSKYASEDLVEQQTEAKSMLNIHR

SEQ ID NO: 22440 - protein, 194 aa, Arabidopsis thaliana
  peptide (1)..(194): Ceres Seq. ID no. 13575216
MTDLEGNIIDVPNPSGRGPGYRYFGAAKKLPGVRELFEKPPELRKRKTRYDIYKRIDASYYGYRDDEDGILEKLERKSEGGMRKRSVEEWRRLDEVRKEARKGASEVVSVGAAAAAAREVLFEEEEDVVEEERMEREKEEEKEREFVVHVPLPDEKEIEKMVLEKKKMDLLSKYASEDLVEQQTEAKSMLNIHR

SEQ ID NO: 22441 - DNA, 1100 bp, Arabidopsis thaliana
  misc_feature (1)..(1100): Ceres Seq. ID no. 12335074
  misc_feature (1)..(1100): Ortholog of  Ceres SEQ ID NO 14311543 as cited in SEQ ID NO 51619
  misc_feature (1)..(1100): Ortholog of  Ceres SEQ ID NO 14302378 as cited in SEQ ID NO 67409
aaaacacacacaaaacaaaatggtgctacttctccgatatcgatccttaacgataaatctcactcctctaatacccaaatctcaaaaattccacactctccaatcatttcgtaaccctaatttcatctccatcccaaaaatctcagcctccacgaacaatccaacaacaacaacgaatcggtcgatctccgacgcgactaaattcgctaagtcagtgttattcatacctcctggtgtagagattgaggaactaacagatgatatggttcttccgggttcaaatatcgtaatcggaccttttgcgggtcattcacaaatcaaagaagttgaatttgttaaaagtagtgctcgtgctagagattgtcctaaagatgatcgtcctgagattgcgattttgggtcgttctaatgttggcaagtcttcgcttatcaattgtttggttcgtaagaaagaagttgctcttacttctaagaaacctgggaagactcagcttataaatcacttcttggtgaataagagttggtacattgtggatttgcctggttatggatttgctaaagtttcagatgctgcgaaaacagattggtctgcgtttactaaaggttacttcttgaatagagacagtcttgtttgtgttctacttctcatcgatgcaagtgttcctcctcagaagattgatcttgattgtgctaattggcttggtcgcaacaatgtaccgatgactttcgtgtttacgaaatgcgataaaatgaaagcaacgaaagggaaaagacctgatgagaacattaaagctttccaacaaatcattagagagaattttaaagtacatcctccttggattttgacgagtagtgtatctggtttaggcagagacgagcttcttcttcacatgtcgcagctgagaaactactgggatcaataggtagcgcgtaaatttcgtaaacaaatgttcgaaaaggtcggttttgaatcattggttatatcaaattgtagttttgtaatgtaacagtaacttttgtatttaaagataagatcataaagtgttactactacagttctaattctgatgaaacaaattcatgaattgccgaaaaattggc

SEQ ID NO: 22442 - protein, 306 aa, Arabidopsis thaliana
  peptide (1)..(306): Ceres Seq. ID no. 12335075
KHTQNKMVLLLRYRSLTINLTPLIPKSQKFHTLQSFRNPNFISIPKISASTNNPTTTTNRSISDATKFAKSVLFIPPGVEIEELTDDMVLPGSNIVIGPFAGHSQIKEVEFVKSSARARDCPKDDRPEIAILGRSNVGKSSLINCLVRKKEVALTSKKPGKTQLINHFLVNKSWYIVDLPGYGFAKVSDAAKTDWSAFTKGYFLNRDSLVCVLLLIDASVPPQKIDLDCANWLGRNNVPMTFVFTKCDKMKATKGKRPDENIKAFQQIIRENFKVHPPWILTSSVSGLGRDELLLHMSQLRNYWDQ

SEQ ID NO: 22443 - protein, 300 aa, Arabidopsis thaliana
  peptide (1)..(300): Ceres Seq. ID no. 12335076
MVLLLRYRSLTINLTPLIPKSQKFHTLQSFRNPNFISIPKISASTNNPTTTTNRSISDATKFAKSVLFIPPGVEIEELTDDMVLPGSNIVIGPFAGHSQIKEVEFVKSSARARDCPKDDRPEIAILGRSNVGKSSLINCLVRKKEVALTSKKPGKTQLINHFLVNKSWYIVDLPGYGFAKVSDAAKTDWSAFTKGYFLNRDSLVCVLLLIDASVPPQKIDLDCANWLGRNNVPMTFVFTKCDKMKATKGKRPDENIKAFQQIIRENFKVHPPWILTSSVSGLGRDELLLHMSQLRNYWDQ

SEQ ID NO: 22444 - protein, 219 aa, Arabidopsis thaliana
  peptide (1)..(219): Ceres Seq. ID no. 12335077
MVLPGSNIVIGPFAGHSQIKEVEFVKSSARARDCPKDDRPEIAILGRSNVGKSSLINCLVRKKEVALTSKKPGKTQLINHFLVNKSWYIVDLPGYGFAKVSDAAKTDWSAFTKGYFLNRDSLVCVLLLIDASVPPQKIDLDCANWLGRNNVPMTFVFTKCDKMKATKGKRPDENIKAFQQIIRENFKVHPPWILTSSVSGLGRDELLLHMSQLRNYWDQ

SEQ ID NO: 22445 - DNA, 1389 bp, Arabidopsis thaliana
  misc_feature (1)..(1389): Ceres Seq. ID no. 12394789
  misc_feature (1)..(1389): Ortholog of  Ceres SEQ ID NO 13502952 as cited in SEQ ID NO 62271
  misc_feature (1)..(1389): Ortholog of  Ceres SEQ ID NO 13502973 as cited in SEQ ID NO 68052
  misc_feature (1)..(1389): Ortholog of  Ceres SEQ ID NO 13596000 as cited in SEQ ID NO 68188
gtccccaaagtctcctcttccttatctcttggaaaccaagaagcatggatcgtgtggtcttcttcttcctcatcgcagctacgttactagcaggttctctcggatctaccgtcatctccggcgaggttaccgacggtttcgttaacccgatcaggcaagtcgtcccggaggagaacgatgaacaactcctcaacgcagaacatcacttcactctattcaaatccaagtacgagaagacttacgcgactcaggtagagcacgatcatcggttccgtgtcttcaaagctaacctaagacgagctaggcgtaaccagcttctagatccgtctgccgtccacggcgtcacgcagttctcagatcttactccgaaagaattccgccgcaagtttttaggactgaaacgccgagggtttcgtcttcctactgatactcagacggcgcctattcttccgactagcgatcttccgacggagttcgattggcgtgaacaaggagccgtcacacctgttaaaaaccagggtatgtgtggttcatgctggtcatttagtgcgataggagctcttgaaggagcacattttctagccactaaagagcttgttagcctcagtgagcagcagctcgtagattgtgaccatgagtgtgatccagcacaagccaattcatgtgattctggttgcagtggaggactaatgaacaacgcttttgagtacgctcttaaagctggtggtctaatgaaggaagaggactatccttatacaggacgtgaccataccgcttgtaagttcgacaagagcaagattgttgcgagtgtgtctaacttcagcgttgtctcttcggatgaagaccaaatcgctgctaatctagtccagcatggacctctagctattgctatcaatgcgatgtggatgcaaacatacataggaggagtctcgtgcccgtatgtatgttcaaagagccaagaccatggagtgctcttggttggatttggttcatcgggttatgcaccaatccgtcttaaggagaagccttattggattatcaagaactcgtggggagcgatgtggggagagcatggttactacaaaatctgcagagggcctcataatatgtgtggtatggatacaatggtatctactgttgctgctgttcatacctcacccaagtagaattattaggacactacctgtctatctttgtgtatatgtatgtatggttgcataaagatactacgaacttttatcgttagtattgtgtctctgtttcagcttttaatgtaaaatagcttgggggtattatctttgtagcattgaatgcttaagatgataatatgatatgattatcaaattattataagttggaacttggaataatagaaattttatatgtttt

SEQ ID NO: 22446 - protein, 387 aa, Arabidopsis thaliana
  peptide (1)..(387): Ceres Seq. ID no. 12394790
PQSLLFLISWKPRSMDRVVFFFLIAATLLAGSLGSTVISGEVTDGFVNPIRQVVPEENDEQLLNAEHHFTLFKSKYEKTYATQVEHDHRFRVFKANLRRARRNQLLDPSAVHGVTQFSDLTPKEFRRKFLGLKRRGFRLPTDTQTAPILPTSDLPTEFDWREQGAVTPVKNQGMCGSCWSFSAIGALEGAHFLATKELVSLSEQQLVDCDHECDPAQANSCDSGCSGGLMNNAFEYALKAGGLMKEEDYPYTGRDHTACKFDKSKIVASVSNFSVVSSDEDQIAANLVQHGPLAIAINAMWMQTYIGGVSCPYVCSKSQDHGVLLVGFGSSGYAPIRLKEKPYWIIKNSWGAMWGEHGYYKICRGPHNMCGMDTMVSTVAAVHTSPK

SEQ ID NO: 22447 - protein, 373 aa, Arabidopsis thaliana
  peptide (1)..(373): Ceres Seq. ID no. 12394791
MDRVVFFFLIAATLLAGSLGSTVISGEVTDGFVNPIRQVVPEENDEQLLNAEHHFTLFKSKYEKTYATQVEHDHRFRVFKANLRRARRNQLLDPSAVHGVTQFSDLTPKEFRRKFLGLKRRGFRLPTDTQTAPILPTSDLPTEFDWREQGAVTPVKNQGMCGSCWSFSAIGALEGAHFLATKELVSLSEQQLVDCDHECDPAQANSCDSGCSGGLMNNAFEYALKAGGLMKEEDYPYTGRDHTACKFDKSKIVASVSNFSVVSSDEDQIAANLVQHGPLAIAINAMWMQTYIGGVSCPYVCSKSQDHGVLLVGFGSSGYAPIRLKEKPYWIIKNSWGAMWGEHGYYKICRGPHNMCGMDTMVSTVAAVHTSPK

SEQ ID NO: 22448 - protein, 214 aa, Arabidopsis thaliana
  peptide (1)..(214): Ceres Seq. ID no. 12394792
MCGSCWSFSAIGALEGAHFLATKELVSLSEQQLVDCDHECDPAQANSCDSGCSGGLMNNAFEYALKAGGLMKEEDYPYTGRDHTACKFDKSKIVASVSNFSVVSSDEDQIAANLVQHGPLAIAINAMWMQTYIGGVSCPYVCSKSQDHGVLLVGFGSSGYAPIRLKEKPYWIIKNSWGAMWGEHGYYKICRGPHNMCGMDTMVSTVAAVHTSPK

SEQ ID NO: 22449 - DNA, 1517 bp, Arabidopsis thaliana
  misc_feature (1)..(1517): Ceres Seq. ID no. 12325338
  misc_feature (1)..(1517): Ortholog of  Ceres SEQ ID NO 14307404 as cited in SEQ ID NO 54231
  misc_feature (1)..(1517): Ortholog of  Ceres SEQ ID NO 14315052 as cited in SEQ ID NO 56951
aatcttaacgatttagatactcagtgattcggcttggatcatctttgccaatcatcatctccctctatatatcatcatttaatggcttttggttcgtctctgtgaaaaattctgacggcacaatcagaaattctcagtcgcgtttccgttgttgatgcgttttggggactaattggtagtacactttaagcttattagtcagaacaaatatggatgtgactggcactgtgactgtgagagatgcatttgatcgagtttctaaaaaacagaagctgtatcactcagttactcaagatgtcattgatctagtttgtgatggaatccaagatacattgactcgaatccaattaggtaacgacgatggagtagaaccggaatcggttcttaccgagttgagacgcaagcttgatgctcttttaccgattatccagcttcagaaatcacataaggaaactaaatggagtcttagcaagttggtgaaattgcttgaggtttcttaccatcctgatatatctctagcctgctttagcgttgatttcgatatcaacttagtgaataagatacttatccaccattgttaccgagaagggttgttcgacgttggtgattgtctggttaaggaggctggaagagaggaagaaactgaggttagatctcagttcttagagttccaccagatagtggactcattgaagctcagaaacattgagcctgcaatgagatggatctttgcgaaccgcggaaagctgaagcaaaagagttcaaagctggagtttaagctcttaagtttgaagtactgtgatatattaagagaaggaaagagtgatgatgctttggagtatgcaagaacccattttacgcaatatccactccattttaaggagatacaaaagcttatcacttgtttattatggattggaaactttgagaaaagtccttatgcagagatagtttctccatcatgttgggacaaggtaaccaaagagctaatcatggaatatcaccatcttctcgatcagccaattaactccccgttgaaagtcgctttatccgcgggttatgagagcttaccgtcactgttaaagctggttcatctaatggcattgacgaaacaagaatggcaagcaatgaaacagcttccggttcctctggagttagggaatgagtataagttccactcagcttttgtttgtcccgtgagtagagatcaaagcagcgaagaaaacccgccgatgcagttgccttgtggtcatgttattagcaagcagtcaatgatgagactcagcaagaactgcgctttccgcacattcaaatgcccttattgtcctgcagagactttagcttcagcatgcaggcaattatacttttgaaggatttggtaatttagttaatttgattgtttcacctcaataaatcgatgtgaacaaagcatttcatttgttctttcatcatttaaaaactcttgtttactagatcttgatttgatcttgttctctaatatgttgcatttagttgtc

SEQ ID NO: 22450 - protein, 386 aa, Arabidopsis thaliana
  peptide (1)..(386): Ceres Seq. ID no. 12325339
MDVTGTVTVRDAFDRVSKKQKLYHSVTQDVIDLVCDGIQDTLTRIQLGNDDGVEPESVLTELRRKLDALLPIIQLQKSHKETKWSLSKLVKLLEVSYHPDISLACFSVDFDINLVNKILIHHCYREGLFDVGDCLVKEAGREEETEVRSQFLEFHQIVDSLKLRNIEPAMRWIFANRGKLKQKSSKLEFKLLSLKYCDILREGKSDDALEYARTHFTQYPLHFKEIQKLITCLLWIGNFEKSPYAEIVSPSCWDKVTKELIMEYHHLLDQPINSPLKVALSAGYESLPSLLKLVHLMALTKQEWQAMKQLPVPLELGNEYKFHSAFVCPVSRDQSSEENPPMQLPCGHVISKQSMMRLSKNCAFRTFKCPYCPAETLASACRQLYF

SEQ ID NO: 22451 - protein, 217 aa, Arabidopsis thaliana
  peptide (1)..(217): Ceres Seq. ID no. 12325340
MRWIFANRGKLKQKSSKLEFKLLSLKYCDILREGKSDDALEYARTHFTQYPLHFKEIQKLITCLLWIGNFEKSPYAEIVSPSCWDKVTKELIMEYHHLLDQPINSPLKVALSAGYESLPSLLKLVHLMALTKQEWQAMKQLPVPLELGNEYKFHSAFVCPVSRDQSSEENPPMQLPCGHVISKQSMMRLSKNCAFRTFKCPYCPAETLASACRQLYF

SEQ ID NO: 22452 - DNA, 879 bp, Arabidopsis thaliana
  misc_feature (1)..(879): Ceres Seq. ID no. 12384866
  misc_feature (1)..(879): Ortholog of  Ceres SEQ ID NO 12466413 as cited in SEQ ID NO 20470
  misc_feature (1)..(879): Ortholog of  Ceres SEQ ID NO 13661434 as cited in SEQ ID NO 61387
  misc_feature (1)..(879): Ortholog of  Ceres SEQ ID NO 15178869 as cited in SEQ ID NO 0
acagtgctctcttttccactatcgccatgattgctcaaacgtgaattgaatgatctgatccataatctaaaaaattgagctttcatcagtaaccgaagcaatggcacggaggtctggaaattgcatgagatgtctagtgatattctcggtggtttcagcattattagtgtgtggacctgctctttactggaaattgaataagggtttcgttggatctgctcgtagcaccaactccatttgtcctccttgtgtctgcgattttcctcctcctttgtctctcctccagattgctcccgggcttgcaaacctctctattacaggttgtggcagcgatgatccagagctcaaagaggagatggagaagccgtttgtggatcttctcacagaagagctgaagcttcaagaagcagtggcagacgagcatagtcgtcatatgaatgttacacttgccgaagctaaaagagttgcttcacagtaccaaaaggaggctgagaagtgtaacgctgccactgaaatttgcgaatcagctagagagagagctcaagcattgttgctcaaagagcggaagatcacttttttgtgggagcgcagagctcggcaattaggttgggaaggtgagtaagtaattcactgtttagtgacttcttcacagtctactctgacgagtttctcaatggaagcaaactagattttctcttccgtatacaactcgtgagaacatgggaatcgcttaattcgcaaggcaatgtttttgtctcacatgttctctatatatgtagttcttttttgttttgctcttggctctagacactgctaaagaaagggttggccttgtattgacttttttcttcagatatatatttgtcagtcacactggac

SEQ ID NO: 22453 - protein, 173 aa, Arabidopsis thaliana
  peptide (1)..(173): Ceres Seq. ID no. 12384867
MARRSGNCMRCLVIFSVVSALLVCGPALYWKLNKGFVGSARSTNSICPPCVCDFPPPLSLLQIAPGLANLSITGCGSDDPELKEEMEKPFVDLLTEELKLQEAVADEHSRHMNVTLAEAKRVASQYQKEAEKCNAATEICESARERAQALLLKERKITFLWERRARQLGWEGE

SEQ ID NO: 22454 - protein, 165 aa, Arabidopsis thaliana
  peptide (1)..(165): Ceres Seq. ID no. 12384868
MRCLVIFSVVSALLVCGPALYWKLNKGFVGSARSTNSICPPCVCDFPPPLSLLQIAPGLANLSITGCGSDDPELKEEMEKPFVDLLTEELKLQEAVADEHSRHMNVTLAEAKRVASQYQKEAEKCNAATEICESARERAQALLLKERKITFLWERRARQLGWEGE

SEQ ID NO: 22455 - protein, 88 aa, Arabidopsis thaliana
  peptide (1)..(88): Ceres Seq. ID no. 12384869
MEKPFVDLLTEELKLQEAVADEHSRHMNVTLAEAKRVASQYQKEAEKCNAATEICESARERAQALLLKERKITFLWERRARQLGWEGE

SEQ ID NO: 22456 - DNA, 1364 bp, Arabidopsis thaliana
  misc_feature (1)..(1364): Ceres Seq. ID no. 12396109
  misc_feature (1)..(1364): Ortholog of  Ceres SEQ ID NO 14301572 as cited in SEQ ID NO 66173
gtctccaagcaaaaaacaaaaacctaaaacctccatcaacgccggaggaagaaattttgtgtcatctacaacgaattcgttaatcgccatgaaggaagacgaagtaaatcgatgccagattcagaattggtatccgagattcaaatccttaaccatcaaaaccaaatttcacaaacttccagaatcattcatcaactatctcatcgacgattctggtccgtttcttctccctcattccgtaacaaacgaagacgcaatgcctaacagagtccacaatttcgaagaagaagatgatttccaagtccccgaagaagcttcagatgacgaaccattgaatcgtccttcttttccagaactcgaaatcgagatcagagaatcaatcgaaaccctaggcggcacaattatcccgaagctgaattggagttcaccaaaagacgcagcttggattagtccatcacagaatctaagctacacttgtttcaatgagattgctctcttgtttcgttcctctgattcgttaacccatgatctcttcaatgcttatgattcatgtagtgacaaagtctcttcaaggccagaaagtttctaccttgcgttgagaaaatggtacccttcgttgaagcctgagatggaatttagatgctttgtgaaatctaacgagcttgttgggatttgtcagcgtgaggtaactacattttaccctgttcttctcaatgagaaggatttgctcaaggttttgatagaagagttcttagatgataagattaggtttgaatttgaatcagagaattacacttttgatgtttatgtgacgaaagagagaagagttaagctaatagatttcaatacttggtgtggttctactttgccattgatgtatacatgggaagaacttgagaagattcatggagaatgtgatgaattggaattgaggattgttgagagccgtctcagtgtgcttcctggtttgaaaacagctgttccttatgattatcttgacgtgagtgctggtagtggttgggctcaggttcttaagatagtggaagaggagtttcagaaagacgatcagagttctgatgaagttgcttgaagacttagattcttggttattggaagactagacaatatttttttgaactatcatagttgtgtgcctaccaataagtgtcgtgttccattgttgttctgaaacggtttagatcacgatgttggaactttgatggtgtctttttcttataagattttctcttctagactgcttttgtatttgtcttgttattcttctgcaaagaattgtgttgagtggcaaattgttcctgattggtttctcattaccaaatttgtacatggatgttggattagtt

SEQ ID NO: 22457 - protein, 362 aa, Arabidopsis thaliana
  peptide (1)..(362): Ceres Seq. ID no. 12396110
SPSKKQKPKTSINAGGRNFVSSTTNSLIAMKEDEVNRCQIQNWYPRFKSLTIKTKFHKLPESFINYLIDDSGPFLLPHSVTNEDAMPNRVHNFEEEDDFQVPEEASDDEPLNRPSFPELEIEIRESIETLGGTIIPKLNWSSPKDAAWISPSQNLSYTCFNEIALLFRSSDSLTHDLFNAYDSCSDKVSSRPESFYLALRKWYPSLKPEMEFRCFVKSNELVGICQREVTTFYPVLLNEKDLLKVLIEEFLDDKIRFEFESENYTFDVYVTKERRVKLIDFNTWCGSTLPLMYTWEELEKIHGECDELELRIVESRLSVLPGLKTAVPYDYLDVSAGSGWAQVLKIVEEEFQKDDQSSDEVA

SEQ ID NO: 22458 - protein, 333 aa, Arabidopsis thaliana
  peptide (1)..(333): Ceres Seq. ID no. 12396111
MKEDEVNRCQIQNWYPRFKSLTIKTKFHKLPESFINYLIDDSGPFLLPHSVTNEDAMPNRVHNFEEEDDFQVPEEASDDEPLNRPSFPELEIEIRESIETLGGTIIPKLNWSSPKDAAWISPSQNLSYTCFNEIALLFRSSDSLTHDLFNAYDSCSDKVSSRPESFYLALRKWYPSLKPEMEFRCFVKSNELVGICQREVTTFYPVLLNEKDLLKVLIEEFLDDKIRFEFESENYTFDVYVTKERRVKLIDFNTWCGSTLPLMYTWEELEKIHGECDELELRIVESRLSVLPGLKTAVPYDYLDVSAGSGWAQVLKIVEEEFQKDDQSSDEVA

SEQ ID NO: 22459 - protein, 277 aa, Arabidopsis thaliana
  peptide (1)..(277): Ceres Seq. ID no. 12396112
MPNRVHNFEEEDDFQVPEEASDDEPLNRPSFPELEIEIRESIETLGGTIIPKLNWSSPKDAAWISPSQNLSYTCFNEIALLFRSSDSLTHDLFNAYDSCSDKVSSRPESFYLALRKWYPSLKPEMEFRCFVKSNELVGICQREVTTFYPVLLNEKDLLKVLIEEFLDDKIRFEFESENYTFDVYVTKERRVKLIDFNTWCGSTLPLMYTWEELEKIHGECDELELRIVESRLSVLPGLKTAVPYDYLDVSAGSGWAQVLKIVEEEFQKDDQSSDEVA

SEQ ID NO: 22460 - DNA, 1287 bp, Arabidopsis thaliana
  misc_feature (1)..(1287): Ceres Seq. ID no. 12334830
  misc_feature (1)..(1287): Ortholog of  Ceres SEQ ID NO 15172792 as cited in SEQ ID NO 52134
  misc_feature (1)..(1287): Ortholog of  Ceres SEQ ID NO 13502622 as cited in SEQ ID NO 56443
  misc_feature (1)..(1287): Ortholog of  Ceres SEQ ID NO 12624901 as cited in SEQ ID NO 62597
atttttgttctttctcagagatctaaaccatcatggctacttccttcttccggcgactcgctaggtcagctccgattacattccctgtcgcatttggatctcaaagcaaatctggttctggcgctttccgattctccaccggtgcaatcgcggcactttccggtggattctcctattactacttgacatccggcaacaatctggtttatctggatcaagctaaggaagagacaggaccaaaaaccgctctaaaccctgataaatggctcgagttcaagcttcaagacactgctagagttagccacaacactcagttgttcaggttctcatttgacccctcagctgagttgggtctacatgttgcttcttgtctcctgacaagggctcctttaggctataatgctgaagggaaaacgaaatatgtcattagaccttacactcctatatcagatccagaggctaagggctattttgatttactgattaaggtatatcctgacggaaaaatgagtcagcattttgccagcttaaaaccgggggatgtgttggaagtaaaaggacccgttgaaaagttcaaatactcgccgaatatgaagaaacatattggcatgattgccggtggaagtgggattactccaatgcttcaggtgattgatgccattgtgaagaatcctgaggacaacacgcagatatcattgctttatgccaatgtgtctccagatgatatactcctgaagcagaagcttgatgtacttcaggctaaccacccaaatttgaagatattctatactgttgacaaccctactaaaaactggaaaggaggagtaggttacatttcaaaggatatggctctgaaaggcttacctcttcctaccgacgatactcttatccttgtatgcggtcctcctgggatgatggagcatatatctggaggcaaagctccagactggtcacaaggagaggtcaaggggattctcaaggaactcggatacacagaggaaatggtgttcaaattctgagtggactagagaatcagaatacgatctcaaggaggtttcctttcatgtaataaaatggccccaagcaaacattaattgatgcagagtgagcttgacaatcgagctaccgagctttgaaaataaacaaagcaaaacggatcagttagtcatttgtctctgcaggtaatagcggaacttgattttgatggtaaatttctatgcaaccaagatattgaatatggttcgaaagatgataattgtgcgtttaaaattcgcgtctgtgttttgg

SEQ ID NO: 22461 - protein, 328 aa, Arabidopsis thaliana
  peptide (1)..(328): Ceres Seq. ID no. 12334831
MATSFFRRLARSAPITFPVAFGSQSKSGSGAFRFSTGAIAALSGGFSYYYLTSGNNLVYLDQAKEETGPKTALNPDKWLEFKLQDTARVSHNTQLFRFSFDPSAELGLHVASCLLTRAPLGYNAEGKTKYVIRPYTPISDPEAKGYFDLLIKVYPDGKMSQHFASLKPGDVLEVKGPVEKFKYSPNMKKHIGMIAGGSGITPMLQVIDAIVKNPEDNTQISLLYANVSPDDILLKQKLDVLQANHPNLKIFYTVDNPTKNWKGGVGYISKDMALKGLPLPTDDTLILVCGPPGMMEHISGGKAPDWSQGEVKGILKELGYTEEMVFKF

SEQ ID NO: 22462 - protein, 170 aa, Arabidopsis thaliana
  peptide (1)..(170): Ceres Seq. ID no. 12334832
MSQHFASLKPGDVLEVKGPVEKFKYSPNMKKHIGMIAGGSGITPMLQVIDAIVKNPEDNTQISLLYANVSPDDILLKQKLDVLQANHPNLKIFYTVDNPTKNWKGGVGYISKDMALKGLPLPTDDTLILVCGPPGMMEHISGGKAPDWSQGEVKGILKELGYTEEMVFKF

SEQ ID NO: 22463 - DNA, 1064 bp, Arabidopsis thaliana
  misc_feature (1)..(1064): Ceres Seq. ID no. 12334652
  misc_feature (1)..(1064): Ortholog of  Ceres SEQ ID NO 14304791 as cited in SEQ ID NO 53562
  misc_feature (1)..(1064): Ortholog of  Ceres SEQ ID NO 13594298 as cited in SEQ ID NO 57803
  misc_feature (1)..(1064): Ortholog of  Ceres SEQ ID NO 14301894 as cited in SEQ ID NO 61677
  misc_feature (1)..(1064): Ortholog of  Ceres SEQ ID NO 13503476 as cited in SEQ ID NO 61978
  misc_feature (1)..(1064): Ortholog of  Ceres SEQ ID NO 12578438 as cited in SEQ ID NO 62201
  misc_feature (1)..(1064): Ortholog of  Ceres SEQ ID NO 12617675 as cited in SEQ ID NO 64656
atctcacaccaaaacacaaagctctcatcttcttttagtttccaaactcacccccacaactttcatttctatcaaccaaacccaaatgggtccaagttcgagcctcaccaccatcgtggcgactgttcttcttgtgacattgttcggttcggcctacgcaagcaacttcttcgacgagtttgacctcacttggggtgaccacagaggcaaaatcttcaacggaggaaatatgctgtctttgtcgctggaccaggtttccgggtcaggtttcaaatccaaaaaagagtatttgttcggtcggatcgatatgcagctcaaacttgtcgccggaaactcggccggcaccgtcactgcttactacttgtcttcacaaggagcaacacatgacgagatagactttgagtttctaggtaacgagacagggaagccttatgttcttcacaccaatgtctttgctcaagggaaaggagacagagagcaacagttttatctctggttcgacccaaccaagaacttccacacttactccattgtctggagaccccaacacatcatattcttggtggacaatttacccattagagtgttcaacaatgcagagaagctcggcgttcctttcccaaagagtcaacccatgaggatctactctagcctgtggaatgcagacgattgggccacgagaggtggtctagtcaagactgactggtccaaggctcctttcacagcttactacagaggattcaacgctgcggcttgcacagcctcttcaggatgtgaccctaaattcaagagttcttttggtgatggtaaattgcaagtggcaaccgagctcaatgcttatggcaggaggagactcagatgggttcagaaatacttcatgatctataattattgctctgatctcaaaaggttccctcgtggattccctccagaatgcaagaagtccagagtctgatgaacacatattacctcatatttctctgcttgtttgatgcaattcttaaattcctctgttattccattgtacattgtcaagatcaataaagcattcctggtttcaaaat

SEQ ID NO: 22464 - protein, 317 aa, Arabidopsis thaliana
  peptide (1)..(317): Ceres Seq. ID no. 12334653
SHTKTQSSHLLLVSKLTPTTFISINQTQMGPSSSLTTIVATVLLVTLFGSAYASNFFDEFDLTWGDHRGKIFNGGNMLSLSLDQVSGSGFKSKKEYLFGRIDMQLKLVAGNSAGTVTAYYLSSQGATHDEIDFEFLGNETGKPYVLHTNVFAQGKGDREQQFYLWFDPTKNFHTYSIVWRPQHIIFLVDNLPIRVFNNAEKLGVPFPKSQPMRIYSSLWNADDWATRGGLVKTDWSKAPFTAYYRGFNAAACTASSGCDPKFKSSFGDGKLQVATELNAYGRRRLRWVQKYFMIYNYCSDLKRFPRGFPPECKKSRV

SEQ ID NO: 22465 - protein, 289 aa, Arabidopsis thaliana
  peptide (1)..(289): Ceres Seq. ID no. 12334654
MGPSSSLTTIVATVLLVTLFGSAYASNFFDEFDLTWGDHRGKIFNGGNMLSLSLDQVSGSGFKSKKEYLFGRIDMQLKLVAGNSAGTVTAYYLSSQGATHDEIDFEFLGNETGKPYVLHTNVFAQGKGDREQQFYLWFDPTKNFHTYSIVWRPQHIIFLVDNLPIRVFNNAEKLGVPFPKSQPMRIYSSLWNADDWATRGGLVKTDWSKAPFTAYYRGFNAAACTASSGCDPKFKSSFGDGKLQVATELNAYGRRRLRWVQKYFMIYNYCSDLKRFPRGFPPECKKSRV

SEQ ID NO: 22466 - protein, 241 aa, Arabidopsis thaliana
  peptide (1)..(241): Ceres Seq. ID no. 12334655
MLSLSLDQVSGSGFKSKKEYLFGRIDMQLKLVAGNSAGTVTAYYLSSQGATHDEIDFEFLGNETGKPYVLHTNVFAQGKGDREQQFYLWFDPTKNFHTYSIVWRPQHIIFLVDNLPIRVFNNAEKLGVPFPKSQPMRIYSSLWNADDWATRGGLVKTDWSKAPFTAYYRGFNAAACTASSGCDPKFKSSFGDGKLQVATELNAYGRRRLRWVQKYFMIYNYCSDLKRFPRGFPPECKKSRV

SEQ ID NO: 22467 - DNA, 1242 bp, Arabidopsis thaliana
  misc_feature (1)..(1242): Ceres Seq. ID no. 5678705
  misc_feature (1)..(1242): Ortholog of  Ceres SEQ ID NO 15177654 as cited in SEQ ID NO 59933
gactacgaaatagaatcaagttgtgttctctgtgatggacattgtgttagtggtaatcaaatccggtgaaaatggagcggagccgagtgaccagagaagcaccgaccggaaccaggatcctgcttgcttcactctctgcgatggttgcagagtcagttacgtttccgattgatctcacaaagactagaatgcagctccatggttcgggatccgcttctggtgcgcatcggattggcgctttcggagtcgtatcggagattgcgagaaaggaaggagtgattggtctctacaaaggtctatctccggcgattatcagacacctgttctacacgcctatcagaatcattggatacgagaatttgaaaggactcatcgtcagatctgaaactaacaatagcgagtctcttcctctcgccacaaaggctctcgtcggaggattttctggtgttatagctcagaaatgcaggtagtggctagtccagctgatttggtcaaagtgagaatgcaagcagatggtagattggtgagccaaggcctgaaaccgaggtactcgggaccaatcgaggcttttaccaaaatcctacaatcagaaggagtaaaagggttatggaaaggtgttcttccaaacatccagagagcatttctagtgaatatgggagaactagcttgctatgatcacgccaaacactttgtcatcgataagaagattgctgaggataacatttttgcgcacactcttgcttctataatgtcgggtcttgcttcgacaagtttgagttgtccagctgatgtggtgaagacgaggatgatgaaccagggtgaaaatgctgtgtacagaaattcttacgactgtttggtgaagacggttaagtttgaaggaataagagctttgtggaaaggtttcttcccgacatgggcaaggcttggaccgtggcagttcgtgttttgggtctcctatgagaagtttagactgctggcaggaatctcttccttctagacctgagaaactggaaaagcaaatttgagatttgtgttctttagttcttacttgttagttgttacacattttgtaagaaccttgagaagtagcatcagtttctgattaacgcgagaagagttatataaatttgggcccaaaagtgtaggcccatagatttatcattttttttttgttgattaaattagattggacatcctaagcaaaaaaatattttaaaaagtaagagattaataaaatattcc

SEQ ID NO: 22468 - protein, 164 aa, Arabidopsis thaliana
  peptide (1)..(164): Ceres Seq. ID no. 5678706
MQADGRLVSQGLKPRYSGPIEAFTKILQSEGVKGLWKGVLPNIQRAFLVNMGELACYDHAKHFVIDKKIAEDNIFAHTLASIMSGLASTSLSCPADVVKTRMMNQGENAVYRNSYDCLVKTVKFEGIRALWKGFFPTWARLGPWQFVFWVSYEKFRLLAGISSF

SEQ ID NO: 22469 - protein, 132 aa, Arabidopsis thaliana
  peptide (1)..(132): Ceres Seq. ID no. 5678707
MERSRVTREAPTGTRILLASLSAMVAESVTFPIDLTKTRMQLHGSGSASGAHRIGAFGVVSEIARKEGVIGLYKGLSPAIIRHLFYTPIRIIGYENLKGLIVRSETNNSESLPLATKALVGGFSGVIAQKCR

SEQ ID NO: 22470 - protein, 178 aa, Arabidopsis thaliana
  peptide (1)..(178): Ceres Seq. ID no. 5678708
MQVVASPADLVKVRMQADGRLVSQGLKPRYSGPIEAFTKILQSEGVKGLWKGVLPNIQRAFLVNMGELACYDHAKHFVIDKKIAEDNIFAHTLASIMSGLASTSLSCPADVVKTRMMNQGENAVYRNSYDCLVKTVKFEGIRALWKGFFPTWARLGPWQFVFWVSYEKFRLLAGISSF

SEQ ID NO: 22471 - DNA, 1792 bp, Arabidopsis thaliana
  misc_feature (1)..(1792): Ceres Seq. ID no. 13490532
  misc_feature (1)..(1792): Ortholog of  Ceres SEQ ID NO 13600220 as cited in SEQ ID NO 0
accatcctaaacattttttcttgaataaaatcagaattacaaacaaaaatggttttgcaaaagcttcctctcattgggctgcttttgctcctgaccatcgtcgcctctccagcaaatgcagatggacctgtttgcccgccgtcgaacaaactaagccgggcaagtttccctgaaggttttttatttggcacggctactgcggcataccaggtcgaaggtgcgattaatgaaacttgtcgtggaccagccttatgggacatctactgtagaagatatccagagaggtgcaataacgataacggcgatgtggccgttgatttcttccatcgttataaggaagatatccaactaatgaagaatctaaacacagacgcctttagaatgtctatcgcatggccaagaatatttcctcatgggagaaaggagaaaggagtgagtcaagctggtgtgcaattctaccacgacctcatcgacgagctcataaaaaatggtataactccattcgttactgtttttcactgggacactccacaagatttagaagatgaatatggcggctttttaagcgaaaggattgtgaaggatttccgagagtatgcagattttgttttccaagaatacggtggaaaagtgaaacattggatcactttcaatgagccatgggttttctcgcacgctggctatgacgtaggcaaaaaggcacctggtcgttgctcttcttacgtcaatgctaaatgccaagacggacgatcaggatacgaggcttaccttgtcactcacaatctccttatctctcacgcagaagcagttgaagcttaccggaaatgcgaaaagtgtaaaggtgggaagatcggaattgcacatagtcctgcttggttcgaagcacatgaccttgctgattcacaagacggtgcgtccatcgaccgtgcacttgactttattttgggatggcatctagacacaactacatttggagattatccacagatcatgaaagacattgttggacatagattgcctaaatttacaactgagcagaaagcaaaactgaaagcttctaccgatttcgttgggctcaactactatacttcagtgttttcaaaccatttggagaaacctgatccttcaaaaccaagatggatgcaagattctcttattacatgggagtctaagaatgcgcaaaattacgccattggtagcaagcctttgaccgctgcattgaacgtttactcgagaggttttagaagtctgttgaagtacattaaggacaaatacgcaaatccggaaattatgatcatggaaaacggatatggagaagaactaggggcctcagattctgttgctgttggtaccgctgatcataacaggaaatattatcttcagaggcatcttttgagtatgcaagaagctgtttgcatcgacaaagtgaatgttacaggatactttgtatggtcattgttggataacttcgagtggcaagatggttacaaaaacagatttggactctactacgttgatttcaaaaataacctcacacgttacgagaaagaatccggcaagtattacaaggatttcctcagtcaaggtgttcgtccatccgcgctcaagaaggatgagctttaagctatttctgtttcaatgtgtttttcctatgttttactttgtgagtgaccaagattcatgaggtcttggttctaataaaaagagtttatttttcttctcatttttcattgtctacatgatttgccagatctacaaggctctggttataataaaatgatcctttgtgcct

SEQ ID NO: 22472 - protein, 524 aa, Arabidopsis thaliana
  peptide (1)..(524): Ceres Seq. ID no. 13490533
MVLQKLPLIGLLLLLTIVASPANADGPVCPPSNKLSRASFPEGFLFGTATAAYQVEGAINETCRGPALWDIYCRRYPERCNNDNGDVAVDFFHRYKEDIQLMKNLNTDAFRMSIAWPRIFPHGRKEKGVSQAGVQFYHDLIDELIKNGITPFVTVFHWDTPQDLEDEYGGFLSERIVKDFREYADFVFQEYGGKVKHWITFNEPWVFSHAGYDVGKKAPGRCSSYVNAKCQDGRSGYEAYLVTHNLLISHAEAVEAYRKCEKCKGGKIGIAHSPAWFEAHDLADSQDGASIDRALDFILGWHLDTTTFGDYPQIMKDIVGHRLPKFTTEQKAKLKASTDFVGLNYYTSVFSNHLEKPDPSKPRWMQDSLITWESKNAQNYAIGSKPLTAALNVYSRGFRSLLKYIKDKYANPEIMIMENGYGEELGASDSVAVGTADHNRKYYLQRHLLSMQEAVCIDKVNVTGYFVWSLLDNFEWQDGYKNRFGLYYVDFKNNLTRYEKESGKYYKDFLSQGVRPSALKKDEL

SEQ ID NO: 22473 - protein, 423 aa, Arabidopsis thaliana
  peptide (1)..(423): Ceres Seq. ID no. 13490534
MKNLNTDAFRMSIAWPRIFPHGRKEKGVSQAGVQFYHDLIDELIKNGITPFVTVFHWDTPQDLEDEYGGFLSERIVKDFREYADFVFQEYGGKVKHWITFNEPWVFSHAGYDVGKKAPGRCSSYVNAKCQDGRSGYEAYLVTHNLLISHAEAVEAYRKCEKCKGGKIGIAHSPAWFEAHDLADSQDGASIDRALDFILGWHLDTTTFGDYPQIMKDIVGHRLPKFTTEQKAKLKASTDFVGLNYYTSVFSNHLEKPDPSKPRWMQDSLITWESKNAQNYAIGSKPLTAALNVYSRGFRSLLKYIKDKYANPEIMIMENGYGEELGASDSVAVGTADHNRKYYLQRHLLSMQEAVCIDKVNVTGYFVWSLLDNFEWQDGYKNRFGLYYVDFKNNLTRYEKESGKYYKDFLSQGVRPSALKKDEL

SEQ ID NO: 22474 - protein, 413 aa, Arabidopsis thaliana
  peptide (1)..(413): Ceres Seq. ID no. 13490535
MSIAWPRIFPHGRKEKGVSQAGVQFYHDLIDELIKNGITPFVTVFHWDTPQDLEDEYGGFLSERIVKDFREYADFVFQEYGGKVKHWITFNEPWVFSHAGYDVGKKAPGRCSSYVNAKCQDGRSGYEAYLVTHNLLISHAEAVEAYRKCEKCKGGKIGIAHSPAWFEAHDLADSQDGASIDRALDFILGWHLDTTTFGDYPQIMKDIVGHRLPKFTTEQKAKLKASTDFVGLNYYTSVFSNHLEKPDPSKPRWMQDSLITWESKNAQNYAIGSKPLTAALNVYSRGFRSLLKYIKDKYANPEIMIMENGYGEELGASDSVAVGTADHNRKYYLQRHLLSMQEAVCIDKVNVTGYFVWSLLDNFEWQDGYKNRFGLYYVDFKNNLTRYEKESGKYYKDFLSQGVRPSALKKDEL

SEQ ID NO: 22475 - DNA, 1382 bp, Arabidopsis thaliana
  misc_feature (1)..(1382): Ceres Seq. ID no. 13592682
  misc_feature (1)..(1382): Ortholog of  Ceres SEQ ID NO 14301830 as cited in SEQ ID NO 62310
  misc_feature (1)..(1382): Ortholog of  Ceres SEQ ID NO 15179524 as cited in SEQ ID NO 0
cgaatcacctccgatctcaaatctcacaatcttttctctccaaattctcttctctctgaatcaatccaatcatggttgagccggcgaacaccgttggaattccggtgaaccacatcccattgttgaaggatgagctcgatatcgtgatccccacgatccgtaacctcgatttcctggagatgtggaggccttttcttcagccttaccatctgattatcgtccaagatggagatccatcgaagaccattgctgtccctgaagggttcgattacgaactctacaacaggaacgacatcaaccgtatccttggtcctaaagcttcctgcatttccttcaaggactctgcttgtcgttgcttcggctacatggtctccaagaagaagtacatcttcactattgatgacgattgcttcgttgctaaggatccatctggaaaagctgtgaacgctcttgagcaacacatcaagaaccttctctgcccatcaactccatttttcttcaacaccttgtacgacccataccgtgaaggtgctgacttcgtccgtggataccctttcagtctccgtgagggtgtttccaccgctgtttcccacggtctgtggctcaacatccctgattacgatgcccctacccaacttgtgaagcctaaggaaaggaacacaaggtatgtggatgctgtcatgaccatcccaaagggaactcttttccctatgtgtggtatgaacttggcctttgaccgtgagctcattggtccggctatgtactttggtctcatgggtgatggtcagcctattggtcgctacgacgatatgtgggctggatggtgtatcaaggtgatctgtgaccatttgggattgggagtgaagacaggtttgccctacatttaccacagcaaagccagcaacccgtttgtgaacttgaagaaggagtacaagggaatcttctggcaggaggatatcattcctttcttccagagcgcaaagctcacgaaagaagctgtgacagttcaacaatgctacatggagctgtccaagttggtgaaggagaagctaagccccattgatccttactttgacaagcttgcagatgctatggtcacttggattgaagcttgggatgagcttaacccacccactaaagcttgagcagcaaaaaaaccaccaccgcagttttggttattagctcaacatatcatctatcttctccgttttgtttttgttttgtcttttctcaaattttccggcgattcttcagttcgtttttaagttgccggagtttatttaaatagtgaatggtgtagttctatttatgaccgagacaatctctcttttgaggtttttcgtttttgtttcaataataaaaaatcataagagagaactagt

SEQ ID NO: 22476 - protein, 357 aa, Arabidopsis thaliana
  peptide (1)..(357): Ceres Seq. ID no. 13592683
MVEPANTVGIPVNHIPLLKDELDIVIPTIRNLDFLEMWRPFLQPYHLIIVQDGDPSKTIAVPEGFDYELYNRNDINRILGPKASCISFKDSACRCFGYMVSKKKYIFTIDDDCFVAKDPSGKAVNALEQHIKNLLCPSTPFFFNTLYDPYREGADFVRGYPFSLREGVSTAVSHGLWLNIPDYDAPTQLVKPKERNTRYVDAVMTIPKGTLFPMCGMNLAFDRELIGPAMYFGLMGDGQPIGRYDDMWAGWCIKVICDHLGLGVKTGLPYIYHSKASNPFVNLKKEYKGIFWQEDIIPFFQSAKLTKEAVTVQQCYMELSKLVKEKLSPIDPYFDKLADAMVTWIEAWDELNPPTKA

SEQ ID NO: 22477 - protein, 321 aa, Arabidopsis thaliana
  peptide (1)..(321): Ceres Seq. ID no. 13592684
MWRPFLQPYHLIIVQDGDPSKTIAVPEGFDYELYNRNDINRILGPKASCISFKDSACRCFGYMVSKKKYIFTIDDDCFVAKDPSGKAVNALEQHIKNLLCPSTPFFFNTLYDPYREGADFVRGYPFSLREGVSTAVSHGLWLNIPDYDAPTQLVKPKERNTRYVDAVMTIPKGTLFPMCGMNLAFDRELIGPAMYFGLMGDGQPIGRYDDMWAGWCIKVICDHLGLGVKTGLPYIYHSKASNPFVNLKKEYKGIFWQEDIIPFFQSAKLTKEAVTVQQCYMELSKLVKEKLSPIDPYFDKLADAMVTWIEAWDELNPPTKA

SEQ ID NO: 22478 - protein, 259 aa, Arabidopsis thaliana
  peptide (1)..(259): Ceres Seq. ID no. 13592685
MVSKKKYIFTIDDDCFVAKDPSGKAVNALEQHIKNLLCPSTPFFFNTLYDPYREGADFVRGYPFSLREGVSTAVSHGLWLNIPDYDAPTQLVKPKERNTRYVDAVMTIPKGTLFPMCGMNLAFDRELIGPAMYFGLMGDGQPIGRYDDMWAGWCIKVICDHLGLGVKTGLPYIYHSKASNPFVNLKKEYKGIFWQEDIIPFFQSAKLTKEAVTVQQCYMELSKLVKEKLSPIDPYFDKLADAMVTWIEAWDELNPPTKA

SEQ ID NO: 22479 - DNA, 873 bp, Arabidopsis thaliana
  misc_feature (1)..(873): Ceres Seq. ID no. 13493860
  misc_feature (1)..(873): Ortholog of  Ceres SEQ ID NO 14301396 as cited in SEQ ID NO 51789
  misc_feature (1)..(873): Ortholog of  Ceres SEQ ID NO 12610031 as cited in SEQ ID NO 55811
  misc_feature (1)..(873): Ortholog of  Ceres SEQ ID NO 12610896 as cited in SEQ ID NO 55861
  misc_feature (1)..(873): Ortholog of  Ceres SEQ ID NO 12619664 as cited in SEQ ID NO 66048
  misc_feature (1)..(873): Ortholog of  Ceres SEQ ID NO 12635952 as cited in SEQ ID NO 0
agaaagaaactgatagtagaaaaaaaaagagagaagaaaaatggtgttgacaatctatgctcctttattcgcttcttcaaagagagctgttgtgacattggtggagaagggagtatcattcgaaactgtcaatgtcgatctcatgaaaggagaacagagacagcctgagtatctcgcgattcagcctttcggtaaaatcccagtcctcgtcgacggagactacaaaatcttcgagtcgcgtgcgatcatgaggtatatagcagagaagtatagatcacaaggacctgatcttttggggaagactattgaagagagaggacaagtagagcaatggttagacgttgaggctacaagttaccatccaccactattggctttaacgctcaacattgtctttgcaccacttatgggtttccctgctgatgagaaagttattaaggagagtgaagagaagcttgcagaagtgcttgatgtctatgaagctcagctttctaagaacgaatacttggctggtgattttgtgagtctagctgatttggctcaccttcctttcaccgagtatcttgttggtcctattgggaaggctcatttgatcaaagataggaagcatgttagcgcttggtgggataagattagtagccgtgctgcgtggaaggaggtttccgctaagtactcactacctgtttaaacaaggagatgttgacttggggggtttgtgtgagctttgtgttctttgagggagttcgttttcgggtcgattgtcttgttgtttcaataagaaacggaactctgtctcatttgttgtctctggtttcttgtattctgtaacttttcaagcttttcaataagagtttaaaatcagagtgactcaat

SEQ ID NO: 22480 - protein, 215 aa, Arabidopsis thaliana
  peptide (1)..(215): Ceres Seq. ID no. 13493861
MVLTIYAPLFASSKRAVVTLVEKGVSFETVNVDLMKGEQRQPEYLAIQPFGKIPVLVDGDYKIFESRAIMRYIAEKYRSQGPDLLGKTIEERGQVEQWLDVEATSYHPPLLALTLNIVFAPLMGFPADEKVIKESEEKLAEVLDVYEAQLSKNEYLAGDFVSLADLAHLPFTEYLVGPIGKAHLIKDRKHVSAWWDKISSRAAWKEVSAKYSLPV

SEQ ID NO: 22481 - protein, 181 aa, Arabidopsis thaliana
  peptide (1)..(181): Ceres Seq. ID no. 13493862
MKGEQRQPEYLAIQPFGKIPVLVDGDYKIFESRAIMRYIAEKYRSQGPDLLGKTIEERGQVEQWLDVEATSYHPPLLALTLNIVFAPLMGFPADEKVIKESEEKLAEVLDVYEAQLSKNEYLAGDFVSLADLAHLPFTEYLVGPIGKAHLIKDRKHVSAWWDKISSRAAWKEVSAKYSLPV

SEQ ID NO: 22482 - protein, 146 aa, Arabidopsis thaliana
  peptide (1)..(146): Ceres Seq. ID no. 13493863
MRYIAEKYRSQGPDLLGKTIEERGQVEQWLDVEATSYHPPLLALTLNIVFAPLMGFPADEKVIKESEEKLAEVLDVYEAQLSKNEYLAGDFVSLADLAHLPFTEYLVGPIGKAHLIKDRKHVSAWWDKISSRAAWKEVSAKYSLPV

SEQ ID NO: 22483 - DNA, 1094 bp, Arabidopsis thaliana
  misc_feature (1)..(1094): Ceres Seq. ID no. 12322609
  misc_feature (1)..(1094): Ortholog of  Ceres SEQ ID NO 13639109 as cited in SEQ ID NO 51131
  misc_feature (1)..(1094): Ortholog of  Ceres SEQ ID NO 13596346 as cited in SEQ ID NO 60879
  misc_feature (1)..(1094): Ortholog of  Ceres SEQ ID NO 15178104 as cited in SEQ ID NO 0
actctttcttcttcttctcgtcgtcgtttgtcactttagagctacttcttcttcttctctgctaagcctttcctctcgacttgatacttttctccagtaagggtttgcaaagatgaagcttgatactagtgggttcgagacttccatgcctatgattggatttggctcgagcagtgatatgcttgatgagctttcttctgtaccctcgtttgatctaccccgtactaaagagtttgatggatttcagaaaaaagctaaagacatgttgaagcatgcaaaaggaacaaccactctcgcttttatcttcaaaggtggtgttatggtcgctgctgattctcgggctagcatgggaggatatatctcctcacaatctgtgaagaagattattgaaatcaatccttatatgctcggtacaatggctggaggagctgctgattgccaattctggcacagaaatcttggaattaagtgccgtctacatgagctggcaaacaagaggagaatctctgtttccggagcttcgaaacttcttgccaacatgctctattcataccgtggaatgggactttctgttggtacaatgattgctggatgggacgaaactggtcccggactatactatgtcgacaacgaaggaggacggctcaagggagacaggttttcagtcggttctggttcaccatatgcttacggtgtgctggacagcgggtacaaatatgatatgtcagttgaagaagcttccgagttagcgaggagatcaatctaccatgcgacattccgtgatggagccagtggtggagttgctagcgtgtaccacgttggtcccgaaggatggacgaaactatcaggagatgatgttggggagctacactaccattactaccccgtggcaccagctaccgcagaacaagtcatggaggaagcaacagccgaataaaaatcctgtttagttttctaatcgttcactccctttcttgttgttgcattttgtggtagtatatactgagttgtctctagctgaagctttggtattctattttactgatctgaaatgttgctcgcggattattctctataagattctctttttctgc

SEQ ID NO: 22484 - protein, 274 aa, Arabidopsis thaliana
  peptide (1)..(274): Ceres Seq. ID no. 12322610
MKLDTSGFETSMPMIGFGSSSDMLDELSSVPSFDLPRTKEFDGFQKKAKDMLKHAKGTTTLAFIFKGGVMVAADSRASMGGYISSQSVKKIIEINPYMLGTMAGGAADCQFWHRNLGIKCRLHELANKRRISVSGASKLLANMLYSYRGMGLSVGTMIAGWDETGPGLYYVDNEGGRLKGDRFSVGSGSPYAYGVLDSGYKYDMSVEEASELARRSIYHATFRDGASGGVASVYHVGPEGWTKLSGDDVGELHYHYYPVAPATAEQVMEEATAE

SEQ ID NO: 22485 - protein, 263 aa, Arabidopsis thaliana
  peptide (1)..(263): Ceres Seq. ID no. 12322611
MPMIGFGSSSDMLDELSSVPSFDLPRTKEFDGFQKKAKDMLKHAKGTTTLAFIFKGGVMVAADSRASMGGYISSQSVKKIIEINPYMLGTMAGGAADCQFWHRNLGIKCRLHELANKRRISVSGASKLLANMLYSYRGMGLSVGTMIAGWDETGPGLYYVDNEGGRLKGDRFSVGSGSPYAYGVLDSGYKYDMSVEEASELARRSIYHATFRDGASGGVASVYHVGPEGWTKLSGDDVGELHYHYYPVAPATAEQVMEEATAE

SEQ ID NO: 22486 - protein, 261 aa, Arabidopsis thaliana
  peptide (1)..(261): Ceres Seq. ID no. 12322612
MIGFGSSSDMLDELSSVPSFDLPRTKEFDGFQKKAKDMLKHAKGTTTLAFIFKGGVMVAADSRASMGGYISSQSVKKIIEINPYMLGTMAGGAADCQFWHRNLGIKCRLHELANKRRISVSGASKLLANMLYSYRGMGLSVGTMIAGWDETGPGLYYVDNEGGRLKGDRFSVGSGSPYAYGVLDSGYKYDMSVEEASELARRSIYHATFRDGASGGVASVYHVGPEGWTKLSGDDVGELHYHYYPVAPATAEQVMEEATAE

SEQ ID NO: 22487 - DNA, 775 bp, Arabidopsis thaliana; identical to SEQ ID NO: 21631
  misc_feature (1)..(775): Ceres Seq. ID no. 12332713
  misc_feature (1)..(775): Ortholog of  Ceres SEQ ID NO 14302588 as cited in SEQ ID NO 0

SEQ ID NO: 22488 - protein, 213 aa, Arabidopsis thaliana; identical to SEQ ID NO: 21632
  peptide (1)..(213): Ceres Seq. ID no. 12332714

SEQ ID NO: 22489 - protein, 184 aa, Arabidopsis thaliana; identical to SEQ ID NO: 21633
  peptide (1)..(184): Ceres Seq. ID no. 12332715

SEQ ID NO: 22490 - DNA, 1047 bp, Arabidopsis thaliana
  misc_feature (1)..(1047): Ceres Seq. ID no. 12332404
  misc_feature (1)..(1047): Ortholog of  Ceres SEQ ID NO 14307442 as cited in SEQ ID NO 54239
  misc_feature (1)..(1047): Ortholog of  Ceres SEQ ID NO 15227214 as cited in SEQ ID NO 55368
  misc_feature (1)..(1047): Ortholog of  Ceres SEQ ID NO 13638897 as cited in SEQ ID NO 55839
  misc_feature (1)..(1047): Ortholog of  Ceres SEQ ID NO 14302561 as cited in SEQ ID NO 56543
  misc_feature (1)..(1047): Ortholog of  Ceres SEQ ID NO 15177710 as cited in SEQ ID NO 59217
  misc_feature (1)..(1047): Ortholog of  Ceres SEQ ID NO 13596958 as cited in SEQ ID NO 63319
  misc_feature (1)..(1047): Ortholog of  Ceres SEQ ID NO 12614573 as cited in SEQ ID NO 68344
  misc_feature (1)..(1047): Ortholog of  Ceres SEQ ID NO 12614814 as cited in SEQ ID NO 68816
agacagagatataatacagactcatctcactttgtattatttgagtgtttttataaaaccatttttccatcttcctcatcaccttcccaagaagaagaacaccaaagaagaagaaaggttaataatgatgggcagtgtcgagctgaatctgagggagactgagctgtgtcttggtcttcccggtggagatacagtggctccggtaaccggaaacaagagagggttctcagagacggttgatctgaagctaaatctgaataatgagcctgcaaacaaggaaggatctacgactcatgacgtcgtgacttttgattccaaggagaagagtgcttgtcctaaagatccagccaaacctccggccaaggcacaagttgtgggatggccaccggtgagatcataccggaagaacgtgatggtttcctgccaaaaatcaagcggtggcccggaggcggcggcgttcgtgaaggtatcaatggacggagcaccgtacttgaggaaaatcgatttgaggatgtataaaagctacgatgagctttctaatgctttgtccaacatgttcagctcttttaccatgggcaaacatggaggagaagaaggaatgatagacttcatgaatgagaggaaattgatggatttggtgaatagctgggactatgttccctcttatgaagacaaagacggtgattggatgctcgtcggcgacgttccttggccaatgttcgtcgatacatgcaagcgtttacgtctcatgaaaggatcggatgccattggtctcgctccgagggcgatggagaagtgcaagagcagagcttgaagtcaaattaaaaggataagtggtatcgattatatatttgattaacacattgattggtgttaattgctcttttttttcttacgatgaaatacattgttcagtttcttttgattgtctgtgttttgatctggatttggtatgtagatatagtttgtatgctattatgtgtaatgaacttaagttaaatatttgagacatttgtaatggaaaatgtgtaataatttgaacatcct

SEQ ID NO: 22491 - protein, 270 aa, Arabidopsis thaliana
  peptide (1)..(270): Ceres Seq. ID no. 12332405
DRDIIQTHLTLYYLSVFIKPFFHLPHHLPKKKNTKEEERLIMMGSVELNLRETELCLGLPGGDTVAPVTGNKRGFSETVDLKLNLNNEPANKEGSTTHDVVTFDSKEKSACPKDPAKPPAKAQVVGWPPVRSYRKNVMVSCQKSSGGPEAAAFVKVSMDGAPYLRKIDLRMYKSYDELSNALSNMFSSFTMGKHGGEEGMIDFMNERKLMDLVNSWDYVPSYEDKDGDWMLVGDVPWPMFVDTCKRLRLMKGSDAIGLAPRAMEKCKSRA

SEQ ID NO: 22492 - protein, 229 aa, Arabidopsis thaliana
  peptide (1)..(229): Ceres Seq. ID no. 12332406
MMGSVELNLRETELCLGLPGGDTVAPVTGNKRGFSETVDLKLNLNNEPANKEGSTTHDVVTFDSKEKSACPKDPAKPPAKAQVVGWPPVRSYRKNVMVSCQKSSGGPEAAAFVKVSMDGAPYLRKIDLRMYKSYDELSNALSNMFSSFTMGKHGGEEGMIDFMNERKLMDLVNSWDYVPSYEDKDGDWMLVGDVPWPMFVDTCKRLRLMKGSDAIGLAPRAMEKCKSRA

SEQ ID NO: 22493 - protein, 228 aa, Arabidopsis thaliana
  peptide (1)..(228): Ceres Seq. ID no. 12332407
MGSVELNLRETELCLGLPGGDTVAPVTGNKRGFSETVDLKLNLNNEPANKEGSTTHDVVTFDSKEKSACPKDPAKPPAKAQVVGWPPVRSYRKNVMVSCQKSSGGPEAAAFVKVSMDGAPYLRKIDLRMYKSYDELSNALSNMFSSFTMGKHGGEEGMIDFMNERKLMDLVNSWDYVPSYEDKDGDWMLVGDVPWPMFVDTCKRLRLMKGSDAIGLAPRAMEKCKSRA

SEQ ID NO: 22494 - DNA, 1192 bp, Arabidopsis thaliana
  misc_feature (1)..(1192): Ceres Seq. ID no. 12422597
  misc_feature (1)..(1192): Ortholog of  Ceres SEQ ID NO 14309755 as cited in SEQ ID NO 20741
  misc_feature (1)..(1192): Ortholog of  Ceres SEQ ID NO 13638746 as cited in SEQ ID NO 59296
  misc_feature (1)..(1192): Ortholog of  Ceres SEQ ID NO 13596474 as cited in SEQ ID NO 62169
  misc_feature (1)..(1192): Ortholog of  Ceres SEQ ID NO 13598714 as cited in SEQ ID NO 62656
  misc_feature (1)..(1192): Ortholog of  Ceres SEQ ID NO 13596969 as cited in SEQ ID NO 63375
  misc_feature (1)..(1192): Ortholog of  Ceres SEQ ID NO 15225685 as cited in SEQ ID NO 63616
  misc_feature (1)..(1192): Ortholog of  Ceres SEQ ID NO 13597519 as cited in SEQ ID NO 64759
  misc_feature (1)..(1192): Ortholog of  Ceres SEQ ID NO 13587054 as cited in SEQ ID NO 0
atcttctcaaactaaatcaactaaagaggtttcttcttatagaaatgaatttctcttattcttccttgtcaacttggacaaccctaatgacattgggttgtcttctgcttcatttatccatttccagtgctcagctaaccccaactttctatgacaatacatgtccaagcgtctttaccatcgtacgggataccatagtaaacgagctaagatcggatcctcgtatcgctgcaagcatccttcgtcttcacttccacgactgtttcgtcaatggctgtgatgcatcgatcctgttagacaacacaacatcctttcgaacagagaaagatgcggctccaaacgcaaactcggctcgaggatttccagtgattgatagaatgaaagcagcagtagagacagcatgtccaaggactgtttcatgcgcagatatacttaccatcgcagctcaacaagctgtaaatttggcaggaggtccttcttggagggttcctttggggagaagagacagcttacaagcattctttgctctcgctaatacaaatcttcccgctccattcttcactctcccacaacttaaggccagttttcaaaatgttggacttgaccgtccctctgatctcgttgcactctctggtggtcacacatttggtaaaaaccagtgccaatttattatggatagactatacaactttagcaacactggtttacccgaccctactcttaatactacatacctccagacacttcgtggacaatgtccccgcaatggtaaccagaccgtcttagttgatttcgatctacgcacaccgacggtttttgacaataaatactatgtgaatctgaaagagctaaagggacttatccagacggatcaagagttgttttccagccctaatgccactgacacaatccccttggtgagagaatacgctgatggcactcaaaaattcttcaatgcttttgtggaagcaatgaatagaatgggaaacattacacctctcactggaactcaaggacaaatcagacagaattgtagggtggttaactccaactcgctgctacatgatgtggtcgaaatcgttgactttgtcagctctatgtaacataacgttgtctcgatatatgtggcaaccaaaaatatgttttatgaaataaagtgttctcaaaatgtttatgaagaacatttcgtctt

SEQ ID NO: 22495 - protein, 366 aa, Arabidopsis thaliana
  peptide (1)..(366): Ceres Seq. ID no. 12422598
LLKLNQLKRFLLIEMNFSYSSLSTWTTLMTLGCLLLHLSISSAQLTPTFYDNTCPSVFTIVRDTIVNELRSDPRIAASILRLHFHDCFVNGCDASILLDNTTSFRTEKDAAPNANSARGFPVIDRMKAAVETACPRTVSCADILTIAAQQAVNLAGGPSWRVPLGRRDSLQAFFALANTNLPAPFFTLPQLKASFQNVGLDRPSDLVALSGGHTFGKNQCQFIMDRLYNFSNTGLPDPTLNTTYLQTLRGQCPRNGNQTVLVDFDLRTPTVFDNKYYVNLKELKGLIQTDQELFSSPNATDTIPLVREYADGTQKFFNAFVEAMNRMGNITPLTGTQGQIRQNCRVVNSNSLLHDVVEIVDFVSSM

SEQ ID NO: 22496 - protein, 352 aa, Arabidopsis thaliana
  peptide (1)..(352): Ceres Seq. ID no. 12422599
MNFSYSSLSTWTTLMTLGCLLLHLSISSAQLTPTFYDNTCPSVFTIVRDTIVNELRSDPRIAASILRLHFHDCFVNGCDASILLDNTTSFRTEKDAAPNANSARGFPVIDRMKAAVETACPRTVSCADILTIAAQQAVNLAGGPSWRVPLGRRDSLQAFFALANTNLPAPFFTLPQLKASFQNVGLDRPSDLVALSGGHTFGKNQCQFIMDRLYNFSNTGLPDPTLNTTYLQTLRGQCPRNGNQTVLVDFDLRTPTVFDNKYYVNLKELKGLIQTDQELFSSPNATDTIPLVREYADGTQKFFNAFVEAMNRMGNITPLTGTQGQIRQNCRVVNSNSLLHDVVEIVDFVSSM

SEQ ID NO: 22497 - protein, 338 aa, Arabidopsis thaliana
  peptide (1)..(338): Ceres Seq. ID no. 12422600
MTLGCLLLHLSISSAQLTPTFYDNTCPSVFTIVRDTIVNELRSDPRIAASILRLHFHDCFVNGCDASILLDNTTSFRTEKDAAPNANSARGFPVIDRMKAAVETACPRTVSCADILTIAAQQAVNLAGGPSWRVPLGRRDSLQAFFALANTNLPAPFFTLPQLKASFQNVGLDRPSDLVALSGGHTFGKNQCQFIMDRLYNFSNTGLPDPTLNTTYLQTLRGQCPRNGNQTVLVDFDLRTPTVFDNKYYVNLKELKGLIQTDQELFSSPNATDTIPLVREYADGTQKFFNAFVEAMNRMGNITPLTGTQGQIRQNCRVVNSNSLLHDVVEIVDFVSSM

SEQ ID NO: 22498 - DNA, 1659 bp, Arabidopsis thaliana
  misc_feature (1)..(1659): Ceres Seq. ID no. 13490538
  misc_feature (1)..(1659): Ortholog of  Ceres SEQ ID NO 14302251 as cited in SEQ ID NO 62093
cacgcgtccgggactcattgctcatatcttcttctcaattccaattttgtaatccttatctcaaattaatttctatttttataactacttaatctcaattagaagaagcctgctctctaataacaaaaaaaaaaaagccgtttgggatttcttttacacgaacacattcttccgatctttcttgtttttaacttaccggtaataacgaagatatgcagaggtttttctccgccagatcgattctcggttacgccgtcaagacgcggaggaggtctttctcttctcgttcttcgtctctcctattcgacgacactcagttacagtttaaagaaagtgtatccaagtttgcgcaagatattatcgctcctcatgcagaacgaattgataaaactaattcatttccaaaggatgtaaacttatggaagctaatgggtgagtttaatctccatggaatcactgcgccagaggaatatggagggctaggtcttggttacttgtatcattgtattgcaatggaggaaatcagtcgggcctcgggttcagttgctttgtcttatggtgctcattccaacctttgcatcaatcaattggtgaggaatggaactgcagcccaaaaggaaaagtatttgccaaagcttatcagtggagagcatgttggtgctcttgcaatgagtgaacctaatgctggttcagatgttgttggcatgaaatgcaaggctgagaaggtagatggtggttatatactaaatggcaacaagatgtggtgcactaatggtccatctgctgaaacactggttgtttacgcgaaaactgatacaaaagcaggttccaaaggaatcacggctttcatcatagagaaaggaatgaccggattcagtactgctcagaaattggacaaactaggaatgcggggaagcgatacgtgtgagcttgtttttgagaattgcttcgttccagaggaaaatattctagacaaggaaggaaaaggagtgtatgttctgatgtcaggtctggatttggagagacttgttttagcagctgggcccttagggatcatgcaggcatgcctcgacaatgtacttccctatattcgccagagagaacaatttggtcgtccagttggggaatttcagtttatacagggtaaagttgctgatatgtacactgcattacaatcttcaaggtcatacgtttactctgttgcgagggactgtgacaatgggaaagttgacccaaaggactgcgccggaactattctttgtgcggccgagagagcaacgcaggtcgctttacaggcgatacaatgtttaggcggaaatggatacataaacgaatatgcaacaggacgccttctaagagatgcaaagctatatgaaatcggtgcagggacaagcgagatcagaaggattgtcatcggtcgcgagcttttcaaagaagaatagagataagtctgttttctgcattgccaatgcgacattttcattctgtacacgtatatataattcacagtgtccttaataacctcacaataagaaaaatagcttcaagcaatcctctagaaaccatatcaattattagtcacattatgtgtgacatgttatcacgataccagcatgccaatctaacactgacacttctggttaaacttactattttgtc

SEQ ID NO: 22499 - protein, 409 aa, Arabidopsis thaliana
  peptide (1)..(409): Ceres Seq. ID no. 13490539
MQRFFSARSILGYAVKTRRRSFSSRSSSLLFDDTQLQFKESVSKFAQDIIAPHAERIDKTNSFPKDVNLWKLMGEFNLHGITAPEEYGGLGLGYLYHCIAMEEISRASGSVALSYGAHSNLCINQLVRNGTAAQKEKYLPKLISGEHVGALAMSEPNAGSDVVGMKCKAEKVDGGYILNGNKMWCTNGPSAETLVVYAKTDTKAGSKGITAFIIEKGMTGFSTAQKLDKLGMRGSDTCELVFENCFVPEENILDKEGKGVYVLMSGLDLERLVLAAGPLGIMQACLDNVLPYIRQREQFGRPVGEFQFIQGKVADMYTALQSSRSYVYSVARDCDNGKVDPKDCAGTILCAAERATQVALQAIQCLGGNGYINEYATGRLLRDAKLYEIGAGTSEIRRIVIGRELFKEE

SEQ ID NO: 22500 - protein, 337 aa, Arabidopsis thaliana
  peptide (1)..(337): Ceres Seq. ID no. 13490540
MGEFNLHGITAPEEYGGLGLGYLYHCIAMEEISRASGSVALSYGAHSNLCINQLVRNGTAAQKEKYLPKLISGEHVGALAMSEPNAGSDVVGMKCKAEKVDGGYILNGNKMWCTNGPSAETLVVYAKTDTKAGSKGITAFIIEKGMTGFSTAQKLDKLGMRGSDTCELVFENCFVPEENILDKEGKGVYVLMSGLDLERLVLAAGPLGIMQACLDNVLPYIRQREQFGRPVGEFQFIQGKVADMYTALQSSRSYVYSVARDCDNGKVDPKDCAGTILCAAERATQVALQAIQCLGGNGYINEYATGRLLRDAKLYEIGAGTSEIRRIVIGRELFKEE

SEQ ID NO: 22501 - protein, 309 aa, Arabidopsis thaliana
  peptide (1)..(309): Ceres Seq. ID no. 13490541
MEEISRASGSVALSYGAHSNLCINQLVRNGTAAQKEKYLPKLISGEHVGALAMSEPNAGSDVVGMKCKAEKVDGGYILNGNKMWCTNGPSAETLVVYAKTDTKAGSKGITAFIIEKGMTGFSTAQKLDKLGMRGSDTCELVFENCFVPEENILDKEGKGVYVLMSGLDLERLVLAAGPLGIMQACLDNVLPYIRQREQFGRPVGEFQFIQGKVADMYTALQSSRSYVYSVARDCDNGKVDPKDCAGTILCAAERATQVALQAIQCLGGNGYINEYATGRLLRDAKLYEIGAGTSEIRRIVIGRELFKEE

SEQ ID NO: 22502 - DNA, 775 bp, Arabidopsis thaliana
  misc_feature (1)..(775): Ceres Seq. ID no. 12483422
  misc_feature (1)..(775): Ortholog of  Ceres SEQ ID NO 12610334 as cited in SEQ ID NO 56235
  misc_feature (1)..(775): Ortholog of  Ceres SEQ ID NO 13654825 as cited in SEQ ID NO 62409
acacacaatccaatcaaaacacacagagagaagaaaaactcagaagaaaagccaaagagtgaaacaaaaatggcgtcgacgactctctcaatcgcaacaacaatccgttcctcatcttatcctactctcgcttccatcaatcacttcccttcccgaaccaccaccatcgaattcccctctcgcttcggtggtggttcatcatccacattgacccaccgtgcaacccatctccgtccaatcgccgccgtcgaagctccggagaaaatcgagaagatcggatccgaaatctcatccctaaccctcgaagaagctcgtatcctctcgactatctccaagacaaattcggtgtctccccactctctttagcccccgcagcagcggcggttgctgctccagccgaacggtggcgcggcggctgtagtggaagagcaaacagagttcgatgtggttatcaatgaagttcccagcagttcccgtattgcagtgattaaagctgttagggctttaactagcttggcgttgaaggaagctaaggagctaatcgaaggattaccaaagaagtttaaagaaggtatcactaaagatgaagctgaagaagctaagaagactcttgaagaagctggtgctaaagtctccattgcttaaggtttttattaaaaaaaaaaaagaagttgttatcttttctggaatttgattggtcttttgtgttgtttagtatagtttgcgtctggaattgttgagaaattgttgtaatttgaatcacatttggtttccc

SEQ ID NO: 22503 - protein, 121 aa, Arabidopsis thaliana
  peptide (1)..(121): Ceres Seq. ID no. 12483423
THNPIKTHREKKNSEEKPKSETKMASTTLSIATTIRSSSYPTLASINHFPSRTTTIEFPSRFGGGSSSTLTHRATHLRPIAAVEAPEKIEKIGSEISSLTLEEARILSTISKTNSVSPHSL

SEQ ID NO: 22504 - protein, 98 aa, Arabidopsis thaliana
  peptide (1)..(98): Ceres Seq. ID no. 12483424
MASTTLSIATTIRSSSYPTLASINHFPSRTTTIEFPSRFGGGSSSTLTHRATHLRPIAAVEAPEKIEKIGSEISSLTLEEARILSTISKTNSVSPHSL

SEQ ID NO: 22505 - protein, 69 aa, Arabidopsis thaliana
  peptide (1)..(69): Ceres Seq. ID no. 12483425
HTIQSKHTERRKTQKKSQRVKQKWRRRLSQSQQQSVPHLILLSLPSITSLPEPPPSNSPLASVVVHHPH

SEQ ID NO: 22506 - DNA, 1407 bp, Arabidopsis thaliana
  misc_feature (1)..(1407): Ceres Seq. ID no. 12371114
  misc_feature (1)..(1407): Ortholog of  Ceres SEQ ID NO 14304654 as cited in SEQ ID NO 53301
  misc_feature (1)..(1407): Ortholog of  Ceres SEQ ID NO 15172291 as cited in SEQ ID NO 55046
  misc_feature (1)..(1407): Ortholog of  Ceres SEQ ID NO 13658153 as cited in SEQ ID NO 66326
  misc_feature (1)..(1407): Ortholog of  Ceres SEQ ID NO 14303011 as cited in SEQ ID NO 67226
ataaattgaagtgtgtgagatgcatcatccatacacaacatcttccatcttccgataattctcctttagtcttataatcactaataagtacgataactgaaatggatccaagattcatcaacaccattccttccttgaggtatgatgatgataagtgtgatgatgaatatgcgtttgtgaaagctctatgtatgagtggtggagatggtgccaacagttactccgccaattctcgccttcagaaaaaagttttatcaatggccaaaccagtcttggtaagaaacacagaagaaatgatgatgaacttagactttcctacgtacatcaaagttgctgaattgggttgttcttcgggacaaaactcttttttggctatctttgagatcatcaacaccattaatgtgttgtgccaacatgtgaacaaaaactcaccagagatcgattgttgtctaaacgatctcccggaaaatgatttcaacacgacctttaagttcgtacctttcttcaacaaggagctcatgatcacaaacaaatcatcatgtttcgtctatggagctccaggttccttctattccaggctcttctctcgcaatagcctccatttaatacattcctcttatgcactccattggctctctaaggttcccgagaaacttgagaataataaggggaatctgtacataacaagttcaagtcctcaaagtgcatacaaggcctacttgaatcaattccaaaaagacttcaccatgtttctaaggttacgttctgaagaaattgtctctaatggacgtatggttctcaccttcatcggaagaaacactcttaacgatccattgtatagagattgttgtcacttttggacattgctatcaaactctctccgtgacctagtctttgagggtcttgtgagtgagtcaaagctggacgcattcaacatgccgttttatgatccgaacgtacaagaactcaaagaagtgatacaaaaagagggctcttttgaaatcaatgaattggagtcacatggatttgatcttggtcactactacgaagaagatgactttgaagcaggacgcaatgaagctaatggcataagagctgttagtgaaccaatgctcattgctcattttggagaagaaattatcgataccttgttcgataagtatgcataccatgtgactcaacatgccaactgcaggaacaaaacgactgtcagtcttgtcgtttccttgactaagaagtaatcaacttctgtcatgttgctctatttgtatttatttactactgttattttgtttccttgaataaatttcaacacctgccactcaatgtgatgatgtggagctagtattggaaaaaagtgtgactgtaatatattatggtaaatttggtaaatgatttatttcctgc

SEQ ID NO: 22507 - protein, 379 aa, Arabidopsis thaliana
  peptide (1)..(379): Ceres Seq. ID no. 12371115
MDPRFINTIPSLRYDDDKCDDEYAFVKALCMSGGDGANSYSANSRLQKKVLSMAKPVLVRNTEEMMMNLDFPTYIKVAELGCSSGQNSFLAIFEIINTINVLCQHVNKNSPEIDCCLNDLPENDFNTTFKFVPFFNKELMITNKSSCFVYGAPGSFYSRLFSRNSLHLIHSSYALHWLSKVPEKLENNKGNLYITSSSPQSAYKAYLNQFQKDFTMFLRLRSEEIVSNGRMVLTFIGRNTLNDPLYRDCCHFWTLLSNSLRDLVFEGLVSESKLDAFNMPFYDPNVQELKEVIQKEGSFEINELESHGFDLGHYYEEDDFEAGRNEANGIRAVSEPMLIAHFGEEIIDTLFDKYAYHVTQHANCRNKTTVSLVVSLTKK

SEQ ID NO: 22508 - protein, 349 aa, Arabidopsis thaliana
  peptide (1)..(349): Ceres Seq. ID no. 12371116
MSGGDGANSYSANSRLQKKVLSMAKPVLVRNTEEMMMNLDFPTYIKVAELGCSSGQNSFLAIFEIINTINVLCQHVNKNSPEIDCCLNDLPENDFNTTFKFVPFFNKELMITNKSSCFVYGAPGSFYSRLFSRNSLHLIHSSYALHWLSKVPEKLENNKGNLYITSSSPQSAYKAYLNQFQKDFTMFLRLRSEEIVSNGRMVLTFIGRNTLNDPLYRDCCHFWTLLSNSLRDLVFEGLVSESKLDAFNMPFYDPNVQELKEVIQKEGSFEINELESHGFDLGHYYEEDDFEAGRNEANGIRAVSEPMLIAHFGEEIIDTLFDKYAYHVTQHANCRNKTTVSLVVSLTKK

SEQ ID NO: 22509 - protein, 327 aa, Arabidopsis thaliana
  peptide (1)..(327): Ceres Seq. ID no. 12371117
MAKPVLVRNTEEMMMNLDFPTYIKVAELGCSSGQNSFLAIFEIINTINVLCQHVNKNSPEIDCCLNDLPENDFNTTFKFVPFFNKELMITNKSSCFVYGAPGSFYSRLFSRNSLHLIHSSYALHWLSKVPEKLENNKGNLYITSSSPQSAYKAYLNQFQKDFTMFLRLRSEEIVSNGRMVLTFIGRNTLNDPLYRDCCHFWTLLSNSLRDLVFEGLVSESKLDAFNMPFYDPNVQELKEVIQKEGSFEINELESHGFDLGHYYEEDDFEAGRNEANGIRAVSEPMLIAHFGEEIIDTLFDKYAYHVTQHANCRNKTTVSLVVSLTKK

SEQ ID NO: 22510 - DNA, 1521 bp, Arabidopsis thaliana
  misc_feature (1)..(1521): Ceres Seq. ID no. 12394809
  misc_feature (1)..(1521): Ortholog of  Ceres SEQ ID NO 14310864 as cited in SEQ ID NO 53602
  misc_feature (1)..(1521): Ortholog of  Ceres SEQ ID NO 12597180 as cited in SEQ ID NO 59415
agctcctttctactaaaacccttttactataaattctacgtacacgtaccacttcttctcctcaaattcatcaaacccatttctattccaactcccaaaaatggcgattcgtcttcctctgatctgtcttcttggttcattcatggtagtggcgattgcggctgatttaacaccggagcgttattggagcactgctttaccaaacactcccattcccaactctctccataatcttttgactttcgattttaccgacgagaaaagtaccaacgtccaagtaggtaaaggcggagtaaacgttaacacccataaaggtaaaaccggtagcggaaccgccgtgaacgttggaaagggaggtgtacgcgtggacacaggcaagggcaagcccggaggagggacacacgtgagcgttggcagcggaaaaggtcacggaggtggcgtcgcagtccacacgggtaaacccggtaaaagaaccgacgtaggagtcggtaaaggcggtgtgacggtgcacacgcgccacaagggaagaccgatttacgttggtgtgaaaccaggagcaaaccctttcgtgtataactatgcagcgaaggagactcagctccacgacgatcctaacgcggctctcttcttcttggagaaggacttggttcgcgggaaagaaatgaatgtccggtttaacgctgaggatggttacggaggcaaaactgcgttcttgccacgtggagaggctgaaacggtgccttttggatcggagaagttttcggagacgttgaaacgtttctcggtggaagctggttcggaagaagcggagatgatgaagaagaccattgaggagtgtgaagccagaaaagttagtggagaggagaagtattgtgcgacgtctttggagtcgatggtcgactttagtgtttcgaaacttggtaaatatcacgtcagggctgtttccactgaggtggctaagaagaacgcaccgatgcagaagtacaaaatcgcggcggctggggtaaagaagttgtctgacgataaatctgtggtgtgtcacaaacagaagtacccattcgcggtgttctactgccacaaggcgatgatgacgaccgtctacgcggttccgctcgagggagagaacgggatgcgagctaaagcagttgcggtatgccacaagaacacctcagcttggaacccaaaccacttggccttcaaagtcttaaaggtgaagccagggaccgttccggtctgccacttcctcccggagactcatgttgtgtggttcagctactagatagatctgttttctatcttattgtgggttatgtataattacgtttcagataatctatcttttgggatgttttggttatgaatatacatacatatacatatagtaatgcgtggtttccatataagagtgaaggcatctatatgtttttttttttattaacctacgtagctgtcttttgtggtctgtatcttgtggttttgcaaaaacctataataaaattagagctgaaatgttaccatttc

SEQ ID NO: 22511 - protein, 392 aa, Arabidopsis thaliana
  peptide (1)..(392): Ceres Seq. ID no. 12394810
MAIRLPLICLLGSFMVVAIAADLTPERYWSTALPNTPIPNSLHNLLTFDFTDEKSTNVQVGKGGVNVNTHKGKTGSGTAVNVGKGGVRVDTGKGKPGGGTHVSVGSGKGHGGGVAVHTGKPGKRTDVGVGKGGVTVHTRHKGRPIYVGVKPGANPFVYNYAAKETQLHDDPNAALFFLEKDLVRGKEMNVRFNAEDGYGGKTAFLPRGEAETVPFGSEKFSETLKRFSVEAGSEEAEMMKKTIEECEARKVSGEEKYCATSLESMVDFSVSKLGKYHVRAVSTEVAKKNAPMQKYKIAAAGVKKLSDDKSVVCHKQKYPFAVFYCHKAMMTTVYAVPLEGENGMRAKAVAVCHKNTSAWNPNHLAFKVLKVKPGTVPVCHFLPETHVVWFSY

SEQ ID NO: 22512 - protein, 378 aa, Arabidopsis thaliana
  peptide (1)..(378): Ceres Seq. ID no. 12394811
MVVAIAADLTPERYWSTALPNTPIPNSLHNLLTFDFTDEKSTNVQVGKGGVNVNTHKGKTGSGTAVNVGKGGVRVDTGKGKPGGGTHVSVGSGKGHGGGVAVHTGKPGKRTDVGVGKGGVTVHTRHKGRPIYVGVKPGANPFVYNYAAKETQLHDDPNAALFFLEKDLVRGKEMNVRFNAEDGYGGKTAFLPRGEAETVPFGSEKFSETLKRFSVEAGSEEAEMMKKTIEECEARKVSGEEKYCATSLESMVDFSVSKLGKYHVRAVSTEVAKKNAPMQKYKIAAAGVKKLSDDKSVVCHKQKYPFAVFYCHKAMMTTVYAVPLEGENGMRAKAVAVCHKNTSAWNPNHLAFKVLKVKPGTVPVCHFLPETHVVWFSY

SEQ ID NO: 22513 - protein, 205 aa, Arabidopsis thaliana
  peptide (1)..(205): Ceres Seq. ID no. 12394812
MNVRFNAEDGYGGKTAFLPRGEAETVPFGSEKFSETLKRFSVEAGSEEAEMMKKTIEECEARKVSGEEKYCATSLESMVDFSVSKLGKYHVRAVSTEVAKKNAPMQKYKIAAAGVKKLSDDKSVVCHKQKYPFAVFYCHKAMMTTVYAVPLEGENGMRAKAVAVCHKNTSAWNPNHLAFKVLKVKPGTVPVCHFLPETHVVWFSY

SEQ ID NO: 22514 - DNA, 1113 bp, Arabidopsis thaliana
  misc_feature (1)..(1113): Ceres Seq. ID no. 12328198
  misc_feature (1)..(1113): Ortholog of  Ceres SEQ ID NO 15177518 as cited in SEQ ID NO 1034
  misc_feature (1)..(1113): Ortholog of  Ceres SEQ ID NO 14313694 as cited in SEQ ID NO 54115
aattagaatagtgtatccctcttctctattccttcaagccaactaaaactacattgcgtgacttcttctgtaaccatttttctattccgatcaaaccatggcgtatttagctccgatttcttcatccttatccatattcaagaatccccaactctcaagattccaattttcttcttcctcaccgaacccacttttccttcgacctaggattcagattctgagtatgaccatgaacaagtcgccgtctttagtggtggttgcggctactactgcggcagagaagcagaagaagaggtatcctggagaatcaaagggttttgtggaggagatgaggtttgtggctatgagacttcatactaaagatcaagctaaggaaggtgagaaagagactaaatctattgaggaacgtcctgttgctaaatgggaacctactgttgaaggttacttgaggtttcttgtggatagtaaattggtttatgatactcttgaactgattattcaagactccaatttcccaacttatgccgagttcaagaacacggggctggaaagagcggagaaattatccacggatttggagtggttcaaggaacaaggttacgagattccagaaccaacagctcctggtaaaacatattctcaatatttaaaggaattagcagagaaggatcctcaagcattcatttgtcacttctacaacatctactttgctcatagtgctggtggacgaatgattggcagaaaggtggcagagcggatactcgataataaagaactcgagttctacaaatgggacggcgaactttctcaattgttgcagaacgttagggagaaactgaacaaggttgcagaggagtggactagagaagaaaagaatcattgtttggaagagactgagaaatcgttcaagtattctggtgagatacttcgtctcatattgtcctgatttggtgcgcagtgtctctagatatctcaatacgtcttgtggcaactaaaatgatgcacattgtttatattcctgtattatattaatcatcttctacatgtattaaactcttctttgcttcaaagctgttactaagttcaaggttcaaattaataacttttctgccg

SEQ ID NO: 22515 - protein, 282 aa, Arabidopsis thaliana
  peptide (1)..(282): Ceres Seq. ID no. 12328199
MAYLAPISSSLSIFKNPQLSRFQFSSSSPNPLFLRPRIQILSMTMNKSPSLVVVAATTAAEKQKKRYPGESKGFVEEMRFVAMRLHTKDQAKEGEKETKSIEERPVAKWEPTVEGYLRFLVDSKLVYDTLELIIQDSNFPTYAEFKNTGLERAEKLSTDLEWFKEQGYEIPEPTAPGKTYSQYLKELAEKDPQAFICHFYNIYFAHSAGGRMIGRKVAERILDNKELEFYKWDGELSQLLQNVREKLNKVAEEWTREEKNHCLEETEKSFKYSGEILRLILS

SEQ ID NO: 22516 - protein, 240 aa, Arabidopsis thaliana
  peptide (1)..(240): Ceres Seq. ID no. 12328200
MTMNKSPSLVVVAATTAAEKQKKRYPGESKGFVEEMRFVAMRLHTKDQAKEGEKETKSIEERPVAKWEPTVEGYLRFLVDSKLVYDTLELIIQDSNFPTYAEFKNTGLERAEKLSTDLEWFKEQGYEIPEPTAPGKTYSQYLKELAEKDPQAFICHFYNIYFAHSAGGRMIGRKVAERILDNKELEFYKWDGELSQLLQNVREKLNKVAEEWTREEKNHCLEETEKSFKYSGEILRLILS

SEQ ID NO: 22517 - protein, 238 aa, Arabidopsis thaliana
  peptide (1)..(238): Ceres Seq. ID no. 12328201
MNKSPSLVVVAATTAAEKQKKRYPGESKGFVEEMRFVAMRLHTKDQAKEGEKETKSIEERPVAKWEPTVEGYLRFLVDSKLVYDTLELIIQDSNFPTYAEFKNTGLERAEKLSTDLEWFKEQGYEIPEPTAPGKTYSQYLKELAEKDPQAFICHFYNIYFAHSAGGRMIGRKVAERILDNKELEFYKWDGELSQLLQNVREKLNKVAEEWTREEKNHCLEETEKSFKYSGEILRLILS

SEQ ID NO: 22518 - DNA, 911 bp, Arabidopsis thaliana
  misc_feature (1)..(911): Ceres Seq. ID no. 12334851
  misc_feature (1)..(911): Ortholog of  Ceres SEQ ID NO 12782188 as cited in SEQ ID NO 59846
attctcttaacattccattactcttatccttttaccctcatcatcctccactatttacagttttgccactctgactttatgctagcttcttccggtgactggcgataacacgagagagccttcgccttctccaagcttcatactcttccgacgataaagattagaagacatgaagaacggtaaccggaaaacaacgccggaaacagagaagtctcaccggagaaagttatcagagaaagcgatgtcgtttcacggcagaggaacaacgccgttatcaaatccaggcgagcttcgaagaccgaaaacgttaccggagttattctccaccggtcaaagcatcaccgtaccggagacggtttcacttccgccacgtttgacgaaacttttacttaacgtgacggtacaaggaagtttaggagccgtacaaattataatctcgccggaatccaccgtgagtgatttaatcgacgccgccgttcgtcagtacgttaaagaagctcgccggccatttttaccggaatctgaaccgtcacgatttgatcttcattactcgcagtttagtcttgagagtattgtaagagacgagaagttgatatcgctagggtcgagaaactttttcttatgtggtcggaaagagaccggagggtttatcggctgtggtttatcgtcggaatcttgttctaaggaagcagagaaagtggctaaaactggttttcattggctcaaatttatgggcttctagaagtttttatcattttgaattattgctttttcaaattagttccattctttagaaaaaggatataaaaaacatctgtgtatattatttctatgtagaaatgaaaatcattaattagtggtgtataatgtattttaatcaattatataccaagatgattatatgaagttct

SEQ ID NO: 22519 - protein, 190 aa, Arabidopsis thaliana
  peptide (1)..(190): Ceres Seq. ID no. 12334852
MKNGNRKTTPETEKSHRRKLSEKAMSFHGRGTTPLSNPGELRRPKTLPELFSTGQSITVPETVSLPPRLTKLLLNVTVQGSLGAVQIIISPESTVSDLIDAAVRQYVKEARRPFLPESEPSRFDLHYSQFSLESIVRDEKLISLGSRNFFLCGRKETGGFIGCGLSSESCSKEAEKVAKTGFHWLKFMGF

SEQ ID NO: 22520 - protein, 166 aa, Arabidopsis thaliana
  peptide (1)..(166): Ceres Seq. ID no. 12334853
MSFHGRGTTPLSNPGELRRPKTLPELFSTGQSITVPETVSLPPRLTKLLLNVTVQGSLGAVQIIISPESTVSDLIDAAVRQYVKEARRPFLPESEPSRFDLHYSQFSLESIVRDEKLISLGSRNFFLCGRKETGGFIGCGLSSESCSKEAEKVAKTGFHWLKFMGF

SEQ ID NO: 22521 - DNA, 980 bp, Arabidopsis thaliana
  misc_feature (1)..(980): Ceres Seq. ID no. 12394825
  misc_feature (1)..(980): Ortholog of  Ceres SEQ ID NO 15174396 as cited in SEQ ID NO 0
gttttttctttcccttcttcaatcaaaacctatttgcatgctctcaaacccgaattaaatcgacacttttcagtttttgttttaacaagtagagtttcccaaaatattggatatatttctttttcaaatttcggaaaagaaatgagttgcaatggatgtagagttcttcgaaaaggttgcagtgaaacatgcatccttcgtccttgccttcaatggatcgaatccgccgagtcacaaggccacgccaccgtcttcgtcgctaaattctttggtcgtgctggtctcatgtctttcatctcctccgtacctgaactccaacgtcctgctttgtttcagtcgttgttgtttgaagcgtgtgggagaacggtgaatccggttaacggagcggttggtatgttgtggaccaggaactggcacgtatgccaagcggcggttgagactgttcttcgcggcggaactttacgaccgatatcagatcttcttgaatctccgtcgttgatgatctcctgtgatgagtcttcagagatttggcatcaagacgtttcaagaaaccaaacccaccattgtcgcttctccacctccagatccacgacggagatgaaagactctctggttaaccgaaaacgattgaagtccgattcggatcttgatctccaagtgaaccacggtttaaccctaaccgctccggctgtaccggttccttttcttcctccgtcgtcgttttgtaaggtggttaagggtgatcgtccgggaagtccatcggaggaatctgtaacgacgtcgtgttgggaaaatgggatgagaggagataataaacaaaaaagaaacaaaggagagaaaaagttattgaacctttttgtttaaaaccgacgacgcaaaacactcaaagattttgaggctctcttttttagggttttgagtgggaatggatatttagttaatgatttttctctatcgagaaatatgataaaattttgggg

SEQ ID NO: 22522 - protein, 287 aa, Arabidopsis thaliana
  peptide (1)..(287): Ceres Seq. ID no. 12394826
VFSFPSSIKTYLHALKPELNRHFSVFVLTSRVSQNIGYISFSNFGKEMSCNGCRVLRKGCSETCILRPCLQWIESAESQGHATVFVAKFFGRAGLMSFISSVPELQRPALFQSLLFEACGRTVNPVNGAVGMLWTRNWHVCQAAVETVLRGGTLRPISDLLESPSLMISCDESSEIWHQDVSRNQTHHCRFSTSRSTTEMKDSLVNRKRLKSDSDLDLQVNHGLTLTAPAVPVPFLPPSSFCKVVKGDRPGSPSEESVTTSCWENGMRGDNKQKRNKGEKKLLNLFV

SEQ ID NO: 22523 - protein, 240 aa, Arabidopsis thaliana
  peptide (1)..(240): Ceres Seq. ID no. 12394827
MSCNGCRVLRKGCSETCILRPCLQWIESAESQGHATVFVAKFFGRAGLMSFISSVPELQRPALFQSLLFEACGRTVNPVNGAVGMLWTRNWHVCQAAVETVLRGGTLRPISDLLESPSLMISCDESSEIWHQDVSRNQTHHCRFSTSRSTTEMKDSLVNRKRLKSDSDLDLQVNHGLTLTAPAVPVPFLPPSSFCKVVKGDRPGSPSEESVTTSCWENGMRGDNKQKRNKGEKKLLNLFV

SEQ ID NO: 22524 - protein, 192 aa, Arabidopsis thaliana
  peptide (1)..(192): Ceres Seq. ID no. 12394828
MSFISSVPELQRPALFQSLLFEACGRTVNPVNGAVGMLWTRNWHVCQAAVETVLRGGTLRPISDLLESPSLMISCDESSEIWHQDVSRNQTHHCRFSTSRSTTEMKDSLVNRKRLKSDSDLDLQVNHGLTLTAPAVPVPFLPPSSFCKVVKGDRPGSPSEESVTTSCWENGMRGDNKQKRNKGEKKLLNLFV

SEQ ID NO: 22525 - DNA, 1426 bp, Arabidopsis thaliana
  misc_feature (1)..(1426): Ceres Seq. ID no. 12334899
  misc_feature (1)..(1426): Ortholog of  Ceres SEQ ID NO 14307273 as cited in SEQ ID NO 54302
  misc_feature (1)..(1426): Ortholog of  Ceres SEQ ID NO 14315317 as cited in SEQ ID NO 58242
  misc_feature (1)..(1426): Ortholog of  Ceres SEQ ID NO 13655375 as cited in SEQ ID NO 63347
  misc_feature (1)..(1426): Ortholog of  Ceres SEQ ID NO 12626166 as cited in SEQ ID NO 64505
  misc_feature (1)..(1426): Ortholog of  Ceres SEQ ID NO 14301978 as cited in SEQ ID NO 0
  misc_feature (1)..(1426): Ortholog of  Ceres SEQ ID NO 14303290 as cited in SEQ ID NO 0
gtcagatatttttctcaacgtgaaagagagaaaagagaatctctcagaaggtgagcctccaacaaagcgtgaatctctctttctctctctatctctctatctctctgtctccgagatcgcatcaccggaaatctccttctacggtggtggtggtgacagttgaccagagatggcggcggagaatgagagaaaatctccttcagcagtctccgatatgggagcttgggcaatgaatgtaataagctccgttggaatcatcatggcgaataaacaacttatgtcctcttctggattcgcatttagtttcgctacaactctcaccggattccacttcgctttaaccgcattggtcggtatggtatcaaacgctaccggattctctgcttcgaagcatgttcctatgtgggagcttatttggttctccattgttgctaatgtctctattgctgctatgaacttcagtctcatgctcaattccgttggcttctaccaaatctcgaagctgagcatgattcctgtggtgtgtgtaatggaatggattctacatagcaagagatactcaagagaagtgaaaatatctgttgtggttgttgttgttggtgttggtatttgtactgtgactgatgttaaagttaatgccaaaggttttatctgtgcttgtgttgcgattttctcgtcatccttgcagcaaattttaataggttctctacagaagaaatattcaattgggtcctttgagttgttgagtaaaacagcgccgattcaagctttttcgcttcttgttgtcggtcctttagttgattatcttcttagtgggaagttcattatgaagtataatatgtcttccggttgctttctattcattcttctctcatgtggtctagctgtgttctgcaacataagccagtacctttgcatcgggcggttttcagcagtatcgttccaagttattggtcacatgaaaaccgtctgtatcctcacgcttggatggctcctatttgattctgcaatgactttcaaaaacgtagcggggatgattgttgcgattgttgggatggtaatctatagttgggcaatggaattggagaaacagtcgattattgcagcaaaggctttaaacagtgtgaaacatagcttaacagaggaagagtttgaacttttgaaggaaggtgtagaaactacacaatcaaaagatgttgaacttggccgcacaaaagattagagacagatggatagagaaagaaacatagtcttcaggtacaatttgttctgctataatttttgtatgttttgtgttatctaaaccaagagatcggatcctcggagattagtgtctaggcttcgatctaaagtttccttggttatacaaatgttttgtgttatttatatctttttacccaattccatggaaataacttcaatgacc

SEQ ID NO: 22526 - protein, 350 aa, Arabidopsis thaliana
  peptide (1)..(350): Ceres Seq. ID no. 12334900
MAAENERKSPSAVSDMGAWAMNVISSVGIIMANKQLMSSSGFAFSFATTLTGFHFALTALVGMVSNATGFSASKHVPMWELIWFSIVANVSIAAMNFSLMLNSVGFYQISKLSMIPVVCVMEWILHSKRYSREVKISVVVVVVGVGICTVTDVKVNAKGFICACVAIFSSSLQQILIGSLQKKYSIGSFELLSKTAPIQAFSLLVVGPLVDYLLSGKFIMKYNMSSGCFLFILLSCGLAVFCNISQYLCIGRFSAVSFQVIGHMKTVCILTLGWLLFDSAMTFKNVAGMIVAIVGMVIYSWAMELEKQSIIAAKALNSVKHSLTEEEFELLKEGVETTQSKDVELGRTKD

SEQ ID NO: 22527 - protein, 335 aa, Arabidopsis thaliana
  peptide (1)..(335): Ceres Seq. ID no. 12334901
MGAWAMNVISSVGIIMANKQLMSSSGFAFSFATTLTGFHFALTALVGMVSNATGFSASKHVPMWELIWFSIVANVSIAAMNFSLMLNSVGFYQISKLSMIPVVCVMEWILHSKRYSREVKISVVVVVVGVGICTVTDVKVNAKGFICACVAIFSSSLQQILIGSLQKKYSIGSFELLSKTAPIQAFSLLVVGPLVDYLLSGKFIMKYNMSSGCFLFILLSCGLAVFCNISQYLCIGRFSAVSFQVIGHMKTVCILTLGWLLFDSAMTFKNVAGMIVAIVGMVIYSWAMELEKQSIIAAKALNSVKHSLTEEEFELLKEGVETTQSKDVELGRTKD

SEQ ID NO: 22528 - protein, 330 aa, Arabidopsis thaliana
  peptide (1)..(330): Ceres Seq. ID no. 12334902
MNVISSVGIIMANKQLMSSSGFAFSFATTLTGFHFALTALVGMVSNATGFSASKHVPMWELIWFSIVANVSIAAMNFSLMLNSVGFYQISKLSMIPVVCVMEWILHSKRYSREVKISVVVVVVGVGICTVTDVKVNAKGFICACVAIFSSSLQQILIGSLQKKYSIGSFELLSKTAPIQAFSLLVVGPLVDYLLSGKFIMKYNMSSGCFLFILLSCGLAVFCNISQYLCIGRFSAVSFQVIGHMKTVCILTLGWLLFDSAMTFKNVAGMIVAIVGMVIYSWAMELEKQSIIAAKALNSVKHSLTEEEFELLKEGVETTQSKDVELGRTKD

SEQ ID NO: 22529 - DNA, 1388 bp, Arabidopsis thaliana
  misc_feature (1)..(1388): Ceres Seq. ID no. 12421518
  misc_feature (1)..(1388): Ortholog of  Ceres SEQ ID NO 13595861 as cited in SEQ ID NO 58153
tcgttagctctctcaatgaggagcccgatttagggtttcctccattggttatatcaattcgatcatctccacaaagctctctaagactctttcggtgatctcatcttcttcttcttgtttagcctccttgaggttactttgtttgttactagttccaaaacatgccgaaagagaggaaagaacggtccgtatctcttgataagtataaacgatcgccactgtgttgtgaggcaagccttgctttgaagccgagtgagaaacaagttaaagaatgggaagaggctcgttgtcctgtttgtatggaacatcctcacaatgggattcttctcatttgttcttcttatgaaaatggttgtcgaccttacatgtgcgacactagccatcggcattctaactgtttcgatcagttccgcaaagcttctaaagagaaaccttctttgtctttacttcgtgaggaagaggaaagtaatgaaccaactgagatggaagatgtggattcagactcaactgctgtaaatctattaggagaagctgcatctgagataacagttgtggatttaagtgatggtgagagaggagaagaagaagtagaagaagatcaaaaaaaaaacaaaccaccaaagcttacttgtccgttatgtcgtggacatataaaagaatgggtagttgttaaagcagctcgatgtttcatgaactcaaaacatagaagctgttcttgtgagacttgtgatttcagtggaagctattccgatctgagaaagcacgcaaggcttctacatccaggagttaggccatcagaagcagatccagagagacagagaagctggaggaggctagaaaggcagagcgatttaggggatttacttagcacactccaatcttcttttggaggagatgaaataagtaacgatgatgggtttctatttgctgatactcgcttgcttacagtgtactttctcatccgcgtgtttagaccagaatcgagtggctcaaggagtagtagctggtctggtacatctagagctaggacacatacaagtgggagaagaagatcttcaagacctgcaagtctttggggagagagctatgaaggtaatacaggaacatcacctagagatgaggagaataatcaatcttctgatgtacaagtgtctggaactcggagacgtcgttctagaagaagaactgtcattgatgatgatgatgaagaagaagaaccgtgatgctctgcagtttggaaatttggtctttggagtttatgataaaatgggggaaaccttgtagtaataaccccacttatgaaaccctattatgtaaaatttctttggagattgaaaaaagtttctactattgggaaacaaaatgttcaatatttcattaccgtttac

SEQ ID NO: 22530 - protein, 353 aa, Arabidopsis thaliana
  peptide (1)..(353): Ceres Seq. ID no. 12421519
MPKERKERSVSLDKYKRSPLCCEASLALKPSEKQVKEWEEARCPVCMEHPHNGILLICSSYENGCRPYMCDTSHRHSNCFDQFRKASKEKPSLSLLREEEESNEPTEMEDVDSDSTAVNLLGEAASEITVVDLSDGERGEEEVEEDQKKNKPPKLTCPLCRGHIKEWVVVKAARCFMNSKHRSCSCETCDFSGSYSDLRKHARLLHPGVRPSEADPERQRSWRRLERQSDLGDLLSTLQSSFGGDEISNDDGFLFADTRLLTVYFLIRVFRPESSGSRSSSWSGTSRARTHTSGRRRSSRPASLWGESYEGNTGTSPRDEENNQSSDVQVSGTRRRRSRRRTVIDDDDEEEEP

SEQ ID NO: 22531 - protein, 307 aa, Arabidopsis thaliana
  peptide (1)..(307): Ceres Seq. ID no. 12421520
MEHPHNGILLICSSYENGCRPYMCDTSHRHSNCFDQFRKASKEKPSLSLLREEEESNEPTEMEDVDSDSTAVNLLGEAASEITVVDLSDGERGEEEVEEDQKKNKPPKLTCPLCRGHIKEWVVVKAARCFMNSKHRSCSCETCDFSGSYSDLRKHARLLHPGVRPSEADPERQRSWRRLERQSDLGDLLSTLQSSFGGDEISNDDGFLFADTRLLTVYFLIRVFRPESSGSRSSSWSGTSRARTHTSGRRRSSRPASLWGESYEGNTGTSPRDEENNQSSDVQVSGTRRRRSRRRTVIDDDDEEEEP

SEQ ID NO: 22532 - protein, 285 aa, Arabidopsis thaliana
  peptide (1)..(285): Ceres Seq. ID no. 12421521
MCDTSHRHSNCFDQFRKASKEKPSLSLLREEEESNEPTEMEDVDSDSTAVNLLGEAASEITVVDLSDGERGEEEVEEDQKKNKPPKLTCPLCRGHIKEWVVVKAARCFMNSKHRSCSCETCDFSGSYSDLRKHARLLHPGVRPSEADPERQRSWRRLERQSDLGDLLSTLQSSFGGDEISNDDGFLFADTRLLTVYFLIRVFRPESSGSRSSSWSGTSRARTHTSGRRRSSRPASLWGESYEGNTGTSPRDEENNQSSDVQVSGTRRRRSRRRTVIDDDDEEEEP

SEQ ID NO: 22533 - DNA, 1903 bp, Arabidopsis thaliana
  misc_feature (1)..(1903): Ceres Seq. ID no. 12328210
  misc_feature (1)..(1903): Ortholog of  Ceres SEQ ID NO 13594380 as cited in SEQ ID NO 58039
  misc_feature (1)..(1903): Ortholog of  Ceres SEQ ID NO 13597407 as cited in SEQ ID NO 64106
  misc_feature (1)..(1903): Ortholog of  Ceres SEQ ID NO 15180690 as cited in SEQ ID NO 0
atctaatatctctttctcaatttcggttccactttcctttcgtttgcaaaaacccatcccatcaaaaataaacaagagggcctaaagaagaatcctaaagactttacgggtcttgtttaggataaaagaaatgcctgccggtggattcgtcgtcggggatggccaaaaggcttatcccggcaaactcactccctttgttctcttcacttgcgttgttgctgccatgggcggtctcatcttcggatacgatatcggaatctccggtggtgtgacgtctatgccgtctttcctcaagcgattcttcccgtcggtgtatcggaaacaacaagaggacgcgtcaacgaaccagtactgtcagtacgatagcccgacgctaacgatgttcacatcgtctctatatctagcggcgctaatttcgtcgctggtggcttccaccgtgacaagaaagttcggacggcggctctcgatgctcttcggcggcatactcttctgcgccggagctctcatcaatggtttcgccaaacatgtttggatgctcatcgtcggtcgtatcttgcttggtttcggtatcggtttcgctaatcaggctgtgccactgtacctctctgagatggctccatacaaatacagaggagctttaaacattggtttccagctctcaattacaatcggaatcctcgtcgccgaagtgctaaactacttcttcgccaagatcaaaggcggttggggatggcggctcagtctcggaggcgcggtggttcctgccttgatcataaccatcggctccctcgtcctccctgacactcccaattcaatgatcgagcgtggccaacacgaagaagccaaaaccaagctcagacgaatccgtggtgtcgatgacgtcagccaagagtttgacgatttggtcgccgctagtaaagagtcgcagtcgatagagcacccgtggagaaacctcctccgccgcaagtaccgaccacatctcacaatggccgttatgattccgttctttcaacagctaaccggaatcaatgtgattatgttttacgctccggttttgttcaacaccattggtttcacgaccgatgcttctctcatgtccgctgtggtcactggctcggttaacgtggccgctacgcttgtttctatctacggtgttgacagatggggacgtcggtttctctttcttgaaggtggtacacaaatgcttatatgccaggctgtggttgcagcttgcataggggccaagtttggggtagacgggacccctggtgagctaccaaagtggtatgctatagtggttgtaacgttcatttgcatctatgtggcgggttttgcgtggtcgtggggcccactagggtggttagtaccgagtgaaatcttcccgttggagataaggtcggcggcgcagagtatcaccgtgtccgtgaacatgatcttcacgttcattatcgcgcaaatcttcttgacgatgctttgtcatttgaagtttgggttattccttgttttcgcctttttcgtggtggtgatgtcgatctttgtatacattttcttgccggagacgaaagggattccgatagaggagatgggtcaagtgtggaggtcacactggtattggtcaaggtttgtggaggatggtgagtatgggaatgcgcttgagatgggcaagaacagtaaccaagctggaacgaagcatgtttgatttatcattgtttttaatgagagttttaagaaagaaagaaaaaagatttgtaatttctaatgtcgtaaaggaaaaagtgtattagcctagatatttattggtgtttatataattcaataccacatgaagaaattatgcatatgattcttcgttaattgtccgtaattgttatactctttacttaaaccaagtgttttctctttg

SEQ ID NO: 22534 - protein, 522 aa, Arabidopsis thaliana
  peptide (1)..(522): Ceres Seq. ID no. 12328211
MPAGGFVVGDGQKAYPGKLTPFVLFTCVVAAMGGLIFGYDIGISGGVTSMPSFLKRFFPSVYRKQQEDASTNQYCQYDSPTLTMFTSSLYLAALISSLVASTVTRKFGRRLSMLFGGILFCAGALINGFAKHVWMLIVGRILLGFGIGFANQAVPLYLSEMAPYKYRGALNIGFQLSITIGILVAEVLNYFFAKIKGGWGWRLSLGGAVVPALIITIGSLVLPDTPNSMIERGQHEEAKTKLRRIRGVDDVSQEFDDLVAASKESQSIEHPWRNLLRRKYRPHLTMAVMIPFFQQLTGINVIMFYAPVLFNTIGFTTDASLMSAVVTGSVNVAATLVSIYGVDRWGRRFLFLEGGTQMLICQAVVAACIGAKFGVDGTPGELPKWYAIVVVTFICIYVAGFAWSWGPLGWLVPSEIFPLEIRSAAQSITVSVNMIFTFIIAQIFLTMLCHLKFGLFLVFAFFVVVMSIFVYIFLPETKGIPIEEMGQVWRSHWYWSRFVEDGEYGNALEMGKNSNQAGTKHV

SEQ ID NO: 22535 - protein, 491 aa, Arabidopsis thaliana
  peptide (1)..(491): Ceres Seq. ID no. 12328212
MGGLIFGYDIGISGGVTSMPSFLKRFFPSVYRKQQEDASTNQYCQYDSPTLTMFTSSLYLAALISSLVASTVTRKFGRRLSMLFGGILFCAGALINGFAKHVWMLIVGRILLGFGIGFANQAVPLYLSEMAPYKYRGALNIGFQLSITIGILVAEVLNYFFAKIKGGWGWRLSLGGAVVPALIITIGSLVLPDTPNSMIERGQHEEAKTKLRRIRGVDDVSQEFDDLVAASKESQSIEHPWRNLLRRKYRPHLTMAVMIPFFQQLTGINVIMFYAPVLFNTIGFTTDASLMSAVVTGSVNVAATLVSIYGVDRWGRRFLFLEGGTQMLICQAVVAACIGAKFGVDGTPGELPKWYAIVVVTFICIYVAGFAWSWGPLGWLVPSEIFPLEIRSAAQSITVSVNMIFTFIIAQIFLTMLCHLKFGLFLVFAFFVVVMSIFVYIFLPETKGIPIEEMGQVWRSHWYWSRFVEDGEYGNALEMGKNSNQAGTKHV

SEQ ID NO: 22536 - protein, 473 aa, Arabidopsis thaliana
  peptide (1)..(473): Ceres Seq. ID no. 12328213
MPSFLKRFFPSVYRKQQEDASTNQYCQYDSPTLTMFTSSLYLAALISSLVASTVTRKFGRRLSMLFGGILFCAGALINGFAKHVWMLIVGRILLGFGIGFANQAVPLYLSEMAPYKYRGALNIGFQLSITIGILVAEVLNYFFAKIKGGWGWRLSLGGAVVPALIITIGSLVLPDTPNSMIERGQHEEAKTKLRRIRGVDDVSQEFDDLVAASKESQSIEHPWRNLLRRKYRPHLTMAVMIPFFQQLTGINVIMFYAPVLFNTIGFTTDASLMSAVVTGSVNVAATLVSIYGVDRWGRRFLFLEGGTQMLICQAVVAACIGAKFGVDGTPGELPKWYAIVVVTFICIYVAGFAWSWGPLGWLVPSEIFPLEIRSAAQSITVSVNMIFTFIIAQIFLTMLCHLKFGLFLVFAFFVVVMSIFVYIFLPETKGIPIEEMGQVWRSHWYWSRFVEDGEYGNALEMGKNSNQAGTKHV

SEQ ID NO: 22537 - DNA, 1183 bp, Arabidopsis thaliana
  misc_feature (1)..(1183): Ceres Seq. ID no. 12335039
  misc_feature (1)..(1183): Ortholog of  Ceres SEQ ID NO 13599444 as cited in SEQ ID NO 517
  misc_feature (1)..(1183): Ortholog of  Ceres SEQ ID NO 15169431 as cited in SEQ ID NO 60449
  misc_feature (1)..(1183): Ortholog of  Ceres SEQ ID NO 12615444 as cited in SEQ ID NO 62593
  misc_feature (1)..(1183): Ortholog of  Ceres SEQ ID NO 14302204 as cited in SEQ ID NO 63150
aattctctccttcgaagtttttttcttgtgaggtcagaaaagaaaatgggaagtcaacaagcagcgatttcgtttctgacgaacttggcgaaggcggcgtttgggttaggtgtggcggcgacggcactaaactcgtcgctctacactgttgatggtggcgagagagctgttttgttcgatcgattcaggggagtgttggatcagaccgtcggcgaagggactcatttcttgatcccgtatctccagacgccgcacatatacgatattcgtacgaaacctcacactttctcctccaaatctggtactaaggatcttcagatggttaatctcacccttcgtgttctctttcgccctgaggtttctcgtctcccgtacattttccaaacattgggtcttgaatacgatgagaaggttcttccatcgattggaaatgaggtcttgaaagctgtggttgctaatttcaatgctgatcagctcctcactgagcgtcctcaagtatcagcacttgttcgtgaggctcttatcaagcgtgccagggaatttaacattgagctcgacgacatagccattactcacttatcgtacggtgctgagttctcgagggcagtggaggcgaagcaagtggctcagcaggaagctgaaaggtcaaagtttgtggtgatgaaggctgatcaagagaggagagctgcggttataagagcagaaggtgagagtgaagctgctcagttgatatcagatgcaacagctaaagcaggaatgggactaattgagcttaggaggattgaagcttcaagggaggttgcggctactctggctaggtctccgaacgtggcttacttacctggtggacaaagcatgctctttaatctgaaccctggtcgttgagctataacattggtgggaagaggagcttcagtggagacaaaacgacggagctgtgaagtttattaacgttgatgctcttttatttttgatgaacacaatgtgaaaaaagataattgttttgagccgttctatcttttctgactctagaagtaaagactatgccattgttgtcgaaacccgatcattccaatgaaaggcttcaccaaaaaatctaccataacaatagtcgaaatttgtattgtcaaaaacaatttccaacaccaaggttgttgtacttgtattatttaaaatataaatc

SEQ ID NO: 22538 - protein, 294 aa, Arabidopsis thaliana
  peptide (1)..(294): Ceres Seq. ID no. 12335040
NSLLRSFFLVRSEKKMGSQQAAISFLTNLAKAAFGLGVAATALNSSLYTVDGGERAVLFDRFRGVLDQTVGEGTHFLIPYLQTPHIYDIRTKPHTFSSKSGTKDLQMVNLTLRVLFRPEVSRLPYIFQTLGLEYDEKVLPSIGNEVLKAVVANFNADQLLTERPQVSALVREALIKRAREFNIELDDIAITHLSYGAEFSRAVEAKQVAQQEAERSKFVVMKADQERRAAVIRAEGESEAAQLISDATAKAGMGLIELRRIEASREVAATLARSPNVAYLPGGQSMLFNLNPGR

SEQ ID NO: 22539 - protein, 279 aa, Arabidopsis thaliana
  peptide (1)..(279): Ceres Seq. ID no. 12335041
MGSQQAAISFLTNLAKAAFGLGVAATALNSSLYTVDGGERAVLFDRFRGVLDQTVGEGTHFLIPYLQTPHIYDIRTKPHTFSSKSGTKDLQMVNLTLRVLFRPEVSRLPYIFQTLGLEYDEKVLPSIGNEVLKAVVANFNADQLLTERPQVSALVREALIKRAREFNIELDDIAITHLSYGAEFSRAVEAKQVAQQEAERSKFVVMKADQERRAAVIRAEGESEAAQLISDATAKAGMGLIELRRIEASREVAATLARSPNVAYLPGGQSMLFNLNPGR

SEQ ID NO: 22540 - protein, 188 aa, Arabidopsis thaliana
  peptide (1)..(188): Ceres Seq. ID no. 12335042
MVNLTLRVLFRPEVSRLPYIFQTLGLEYDEKVLPSIGNEVLKAVVANFNADQLLTERPQVSALVREALIKRAREFNIELDDIAITHLSYGAEFSRAVEAKQVAQQEAERSKFVVMKADQERRAAVIRAEGESEAAQLISDATAKAGMGLIELRRIEASREVAATLARSPNVAYLPGGQSMLFNLNPGR

SEQ ID NO: 22541 - DNA, 930 bp, Arabidopsis thaliana
  misc_feature (1)..(930): Ceres Seq. ID no. 12334665
  misc_feature (1)..(930): Ortholog of  Ceres SEQ ID NO 13657064 as cited in SEQ ID NO 66003
aaataacgaattcgattttaaccggaaactgaaccggaagctgagtctcgtgcctgccttctctaggcttctttgtttccgatcagaatctcgagctcaactgtcaaaactagccgaccactaagtcgttgtcctaactttctctctgttcctcatcgaacattattgggaggagagagagagagagaagaacaagaaacaacgagaatagatcggaggattttgtcggaaccagaaggaggaagatgggagatatctggacatggcttatttccttcttcttcctcatcgctcttgtcggaatcatcgtctatcagcttgtttgcttagcggatctcgagtttgattatatcaacccttacgactctgcgtcgagaataaactcagtggttttaccggagttcattgttcaaggagttctatgcgtattctacctcctaacaggacactggttcatgacactcttatgtctcccctatctctactacaatttccatctttactcgaagcgacaacacttagtagatgtcaccgagatcttcaatttgctaaactgggagaagaagaaacggctgttcaagcttgcttacattgtccttaacctctttctcactatcttctggatgatttattcggcgctggatgattacgaggactgactaatgaagaagacatggtccatcttcttcggtttattgacactacgcttaaagatacagcgacatgctcgtggacgaaaaaaagcaaggaaaagtgtttgctttgtgatgtttgtaagattagtggcaggaagatttgtgtatttatttatttcttagaaacatgttcagattaactgttttttttttatcttatgtcttgatcattatttgtacaagcaatcaagctcgtaaactactggttacagtaacaatgaaactgaatattttc

SEQ ID NO: 22542 - protein, 137 aa, Arabidopsis thaliana
  peptide (1)..(137): Ceres Seq. ID no. 12334666
MGDIWTWLISFFFLIALVGIIVYQLVCLADLEFDYINPYDSASRINSVVLPEFIVQGVLCVFYLLTGHWFMTLLCLPYLYYNFHLYSKRQHLVDVTEIFNLLNWEKKKRLFKLAYIVLNLFLTIFWMIYSALDDYED

SEQ ID NO: 22543 - DNA, 1652 bp, Arabidopsis thaliana
  misc_feature (1)..(1652): Ceres Seq. ID no. 13487639
  misc_feature (1)..(1652): Ortholog of  Ceres SEQ ID NO 14302255 as cited in SEQ ID NO 65021
aaaagaagcttcttcaccttgtctcttttcacagtctcacacagcatagaaataatcgaaagatttctttttaaaatctgggatttgttttttttgttcattgatcattttcgattgttagagaagaatcaaatggcgatggctatggatcggatcgtcttctccccttcatcttacgtctatcgtccttgtcaagctaggggatccagatcttccagagtttccatggcttctacgattcgctctgcgactacagaggttacgaatggaaggaaactgtatatccctcccagagaggtgcatgtccaagtcaaacattcaatgccgccacaaaagttagatatctttaagtctttagaaggatgggctgatgaaaccctgttgacttatttaaaacctgttgagaaatcgtggcagcctaccgattttcttcccgaacctgagtcggaaggattctatgaccaagtcaaggagctaagggaaaggtgcaaggaacttcctgatgactattttgtggtgcttgttggggatatgatcactgaagaagcacttcctacttaccagaccatgttgaacacattggatggtgttagggatgagacaggagctagtcctactccttgggctatatggaccagggcttggactgctgaggagaatagacatggggatctccttaacaagtatctttatctgtctggtcgggtagacatgaggcagattgaaaagactattcagtacctgattggttctggaatggatccaaaaactgaaaacaacccttacttgggtttcatctacacatcatttcaagaaagagcgaccttcatctcccatggaaacactgccagactggcgaaagatcgtggagatttgaaacttgcgcagatatgcgggaccattgctgctgatgagaggcgtcatgagactgcttacaccaagattgtagagaagctctttgaaattgaccctgatggcacgatcttgggcctggctgatatgatgaagaaaaagatatcaatgcctgcacatttaatgtatgatggccaagatgataacctgtttgagcacttctcaaccgttgcccagaggctcggtgtctacactgccaaggactatgctgatattctggagtttcttgttgaacggtggaatgtggagactttgacagacctttctagtgaaggacacagggcccaggactttgtctgcggactacctgcaagaatccgtaaaattgaagagagagctcaaggaagagccaaagaagctgccaaaaacataccattcagctggatatttggtcgaaatatcagggcttaagaagtttactacacaattctctttccaattatcccaagtaagtcataaaggtcttcaccaaccatttcaccaatgaaggaccagtttttaagaccacgaaagttcatttgaatgtgttttgttttatacggaacattgtagataaagttatgtggttaggttatgtttcttgtttgaatcagtcaagaccaaagaaaatgtgtttgagtgttcttagatattgtatggtttaccaagaacaagacttaagattttcctttacctttttgattctctttttgttgtatcagtctaaagaatgttctctcttaaataaagagtggtttggc

SEQ ID NO: 22544 - protein, 440 aa, Arabidopsis thaliana
  peptide (1)..(440): Ceres Seq. ID no. 13487640
KRSFFTLSLFTVSHSIEIIERFLFKIWDLFFLFIDHFRLLEKNQMAMAMDRIVFSPSSYVYRPCQARGSRSSRVSMASTIRSATTEVTNGRKLYIPPREVHVQVKHSMPPQKLDIFKSLEGWADETLLTYLKPVEKSWQPTDFLPEPESEGFYDQVKELRERCKELPDDYFVVLVGDMITEEALPTYQTMLNTLDGVRDETGASPTPWAIWTRAWTAEENRHGDLLNKYLYLSGRVDMRQIEKTIQYLIGSGMDPKTENNPYLGFIYTSFQERATFISHGNTARLAKDRGDLKLAQICGTIAADERRHETAYTKIVEKLFEIDPDGTILGLADMMKKKISMPAHLMYDGQDDNLFEHFSTVAQRLGVYTAKDYADILEFLVERWNVETLTDLSSEGHRAQDFVCGLPARIRKIEERAQGRAKEAAKNIPFSWIFGRNIRA

SEQ ID NO: 22545 - protein, 396 aa, Arabidopsis thaliana
  peptide (1)..(396): Ceres Seq. ID no. 13487641
MAMAMDRIVFSPSSYVYRPCQARGSRSSRVSMASTIRSATTEVTNGRKLYIPPREVHVQVKHSMPPQKLDIFKSLEGWADETLLTYLKPVEKSWQPTDFLPEPESEGFYDQVKELRERCKELPDDYFVVLVGDMITEEALPTYQTMLNTLDGVRDETGASPTPWAIWTRAWTAEENRHGDLLNKYLYLSGRVDMRQIEKTIQYLIGSGMDPKTENNPYLGFIYTSFQERATFISHGNTARLAKDRGDLKLAQICGTIAADERRHETAYTKIVEKLFEIDPDGTILGLADMMKKKISMPAHLMYDGQDDNLFEHFSTVAQRLGVYTAKDYADILEFLVERWNVETLTDLSSEGHRAQDFVCGLPARIRKIEERAQGRAKEAAKNIPFSWIFGRNIRA

SEQ ID NO: 22546 - protein, 394 aa, Arabidopsis thaliana
  peptide (1)..(394): Ceres Seq. ID no. 13487642
MAMDRIVFSPSSYVYRPCQARGSRSSRVSMASTIRSATTEVTNGRKLYIPPREVHVQVKHSMPPQKLDIFKSLEGWADETLLTYLKPVEKSWQPTDFLPEPESEGFYDQVKELRERCKELPDDYFVVLVGDMITEEALPTYQTMLNTLDGVRDETGASPTPWAIWTRAWTAEENRHGDLLNKYLYLSGRVDMRQIEKTIQYLIGSGMDPKTENNPYLGFIYTSFQERATFISHGNTARLAKDRGDLKLAQICGTIAADERRHETAYTKIVEKLFEIDPDGTILGLADMMKKKISMPAHLMYDGQDDNLFEHFSTVAQRLGVYTAKDYADILEFLVERWNVETLTDLSSEGHRAQDFVCGLPARIRKIEERAQGRAKEAAKNIPFSWIFGRNIRA

SEQ ID NO: 22547 - DNA, 1274 bp, Arabidopsis thaliana
  misc_feature (1)..(1274): Ceres Seq. ID no. 13491491
  misc_feature (1)..(1274): Ortholog of  Ceres SEQ ID NO 14310524 as cited in SEQ ID NO 58840
  misc_feature (1)..(1274): Ortholog of  Ceres SEQ ID NO 15169541 as cited in SEQ ID NO 67500
gatcgtcttctctttccctaaacacactgattattttctctccgacgccgccatgtctctgctctcagatctcgttaacctcaacctcaccgatgccaccgggaaaatcatcgccgaatacatatggatcggtggatctggaatggatatcagaagcaaagccaggacactaccaggaccagtgactgatccatcaaagcttcccaagtggaactacgacggatccagcaccggtcaggctgctggagaagacagtgaagtcattctataccctcaggcaatattcaaggatcccttcaggaaagacaacaacatcctggtgatgtgtgatgcttacacaccagctggtgatcctattccaaccaacaagaggcacaacgctgctaagatcttcagccaccccgacgttgccaaggaggagccttggtatgggattgagcaagaatacactttgatgcaaaaggatgtgaactggccaattggttggcctgttggtggctaccctggccctcagggaccttactactgtggtgtgggagctgacaaagccattggtcgtgacattgtggatgctcactacaaggcctgtctttacgccggtattggtatttctggtatcaatggagaagtcatgccaggccagtgggagttccaagtcggccctgttgagggtattagttctggtgatcaagtctgggttgctcgataccttctcgagaggatcactgagatctctggtgtaattgtcagcttcgacccgaaaccagtcccgggtgactggaatggagctggagctcactgcaactacagcactaagacaatgagaaacgatggaggattagaagtgatcaagaaagcgatagggaagcttcagctgaaacacaaagaacacattgctgcttacggtgaaggaaacgagcgtcgtctcactggaaagcacgaaaccgcagacatcaacacattctcttggggagtcgcgaaccgtggagcgtcagtgagagtgggacgtgacacagagaaggaaggtaaagggtacttcgaagacagaaggccagcttctaacatggatccttacgttgtcacctccatgatcgctgagacgaccatactcggttgatgacacatttcatgatttgatttctctccaatttggttttttttttttcccttttgattgcacttttcgataataaaaaaataattcttattatgggcgtattgttgtgacattttgtgttttgtttcgaataattaaataagcgcttcttaaggtg

SEQ ID NO: 22548 - protein, 371 aa, Arabidopsis thaliana
  peptide (1)..(371): Ceres Seq. ID no. 13491492
IVFSFPKHTDYFLSDAAMSLLSDLVNLNLTDATGKIIAEYIWIGGSGMDIRSKARTLPGPVTDPSKLPKWNYDGSSTGQAAGEDSEVILYPQAIFKDPFRKDNNILVMCDAYTPAGDPIPTNKRHNAAKIFSHPDVAKEEPWYGIEQEYTLMQKDVNWPIGWPVGGYPGPQGPYYCGVGADKAIGRDIVDAHYKACLYAGIGISGINGEVMPGQWEFQVGPVEGISSGDQVWVARYLLERITEISGVIVSFDPKPVPGDWNGAGAHCNYSTKTMRNDGGLEVIKKAIGKLQLKHKEHIAAYGEGNERRLTGKHETADINTFSWGVANRGASVRVGRDTEKEGKGYFEDRRPASNMDPYVVTSMIAETTILG

SEQ ID NO: 22549 - protein, 354 aa, Arabidopsis thaliana
  peptide (1)..(354): Ceres Seq. ID no. 13491493
MSLLSDLVNLNLTDATGKIIAEYIWIGGSGMDIRSKARTLPGPVTDPSKLPKWNYDGSSTGQAAGEDSEVILYPQAIFKDPFRKDNNILVMCDAYTPAGDPIPTNKRHNAAKIFSHPDVAKEEPWYGIEQEYTLMQKDVNWPIGWPVGGYPGPQGPYYCGVGADKAIGRDIVDAHYKACLYAGIGISGINGEVMPGQWEFQVGPVEGISSGDQVWVARYLLERITEISGVIVSFDPKPVPGDWNGAGAHCNYSTKTMRNDGGLEVIKKAIGKLQLKHKEHIAAYGEGNERRLTGKHETADINTFSWGVANRGASVRVGRDTEKEGKGYFEDRRPASNMDPYVVTSMIAETTILG

SEQ ID NO: 22550 - protein, 324 aa, Arabidopsis thaliana
  peptide (1)..(324): Ceres Seq. ID no. 13491494
MDIRSKARTLPGPVTDPSKLPKWNYDGSSTGQAAGEDSEVILYPQAIFKDPFRKDNNILVMCDAYTPAGDPIPTNKRHNAAKIFSHPDVAKEEPWYGIEQEYTLMQKDVNWPIGWPVGGYPGPQGPYYCGVGADKAIGRDIVDAHYKACLYAGIGISGINGEVMPGQWEFQVGPVEGISSGDQVWVARYLLERITEISGVIVSFDPKPVPGDWNGAGAHCNYSTKTMRNDGGLEVIKKAIGKLQLKHKEHIAAYGEGNERRLTGKHETADINTFSWGVANRGASVRVGRDTEKEGKGYFEDRRPASNMDPYVVTSMIAETTILG

SEQ ID NO: 22551 - DNA, 1222 bp, Arabidopsis thaliana
  misc_feature (1)..(1222): Ceres Seq. ID no. 12324824
  misc_feature (1)..(1222): Ortholog of  Ceres SEQ ID NO 15171289 as cited in SEQ ID NO 51570
ctcgaacttgtttttggttcatctctcaaaaccaaaatcactaaagaggagaagattgctaaagtttgataaaacattccaaaatcaatggctgataggatcaaaggtccatggagtcctgaagaagacgagcagcttcgtaggcttgttgttaaatacggtccaagaaactggacagtgattagcaaatctattcccggtagatcggggaaatcgtgtcgtttacggtggtgcaaccagctttcgccgcaagttgagcatcggccgttttcggctgaggaagacgagacgatcgcacgtgctcacgctcagttcggtaataaatgggcgacgattgctcgtcttctcaacggtcgtacggacaacgccgtgaagaatcactggaactcgacgctcaagaggaaatgcggcggttacgaccatcggggttacgatggttcggaggatcatcggccggttaagagatcggtgagtgcgggatctccacctgttgttactgggctttacatgagcccaggaagcccaactggatctgatgtcagtgattcaagtactatcccgatattaccttccgttgagcttttcaagcctgtgcctagacctggtgctgttgtgctaccgcttcctatcgaaacgtcgtcttcttccgatgatccaccgacttcgttaagcttgtcacttcctggtgccgacgtaagcgaggagtcaaaccgtagccacgagtcaacgaatatcaacaacaccacttcgagccgccacaaccacaacaatacggtgtcgtttatgccgtttagtggtgggtttagaggtgcgattgaggaaatggggaagtcttttcccggtaacggaggcgagtttatggcggtggtgcaagagatgattaaggcggaagtgaggagttacatgacggagatgcaacggaacaatggtggcggattcgtcggaggattcattgataatggcatgattccgatgagtcaaattggagttgggagaatcgagtagacaaagtgagattattaggaaactgtttaaattggagaagaagaaaaatgctctgtttttttctcctttggattaggcttaagaattttgggttttaaggaaatgtatagaggaaatcgagtgaacaaagctcgagagctggggacgtagtgacgaagacgaagatcaaatttctcttaagctattcaggaaaataaaataaatttttatttataac

SEQ ID NO: 22552 - protein, 305 aa, Arabidopsis thaliana
  peptide (1)..(305): Ceres Seq. ID no. 12324825
MADRIKGPWSPEEDEQLRRLVVKYGPRNWTVISKSIPGRSGKSCRLRWCNQLSPQVEHRPFSAEEDETIARAHAQFGNKWATIARLLNGRTDNAVKNHWNSTLKRKCGGYDHRGYDGSEDHRPVKRSVSAGSPPVVTGLYMSPGSPTGSDVSDSSTIPILPSVELFKPVPRPGAVVLPLPIETSSSSDDPPTSLSLSLPGADVSEESNRSHESTNINNTTSSRHNHNNTVSFMPFSGGFRGAIEEMGKSFPGNGGEFMAVVQEMIKAEVRSYMTEMQRNNGGGFVGGFIDNGMIPMSQIGVGRIE

SEQ ID NO: 22553 - protein, 165 aa, Arabidopsis thaliana
  peptide (1)..(165): Ceres Seq. ID no. 12324826
MSPGSPTGSDVSDSSTIPILPSVELFKPVPRPGAVVLPLPIETSSSSDDPPTSLSLSLPGADVSEESNRSHESTNINNTTSSRHNHNNTVSFMPFSGGFRGAIEEMGKSFPGNGGEFMAVVQEMIKAEVRSYMTEMQRNNGGGFVGGFIDNGMIPMSQIGVGRIE

SEQ ID NO: 22554 - DNA, 1488 bp, Arabidopsis thaliana
  misc_feature (1)..(1488): Ceres Seq. ID no. 12421978
  misc_feature (1)..(1488): Ortholog of  Ceres SEQ ID NO 14315457 as cited in SEQ ID NO 57014
  misc_feature (1)..(1488): Ortholog of  Ceres SEQ ID NO 13597043 as cited in SEQ ID NO 63508
agacttggaatcagtttctcttttcttccctctttctctgagctatggagattactgtaatcgcttcttcctcaatcgatgaaggaattggaagttgggatctcaaaaccgggacagagcagcttcaattcaagccgtgtgcttctccggcgcatggtctcaccgccgtcggcgaaaaatttctcgcctcctctcagctctcggcgagaaatacttctggctcgattttttactggtcttggactaagcctcaagctgaagtgaagagctacccagtggaaccaataaaggctcttgcagcaaacaatgaaggaacttacttagttggtggtggaatctctggagatatttacctttgggaggttgcgactgggaagttgcttaagaagtggcatggtcattatcgttcagtaacatgtttggtgttctctggagatgattctttgttggtttctggatctcaagatgggtctattagagtttggtctcttataaggctatttgatgatttccaaaggcagcaagggaacactctttatgaacacaattttaatgagcatacaatgtctgtaactgatattgttatagactatggaggctgcaatgctgtgataatttcctcttcagaagatcggacttgcaaggtttggagcttgtcaagagggaaattgttgaaaaatatcatttttccttcagtcatcaatgcactcgcattggaccctggagggtgtgtgttctatgctggtgccagagacagcaaaatctatatcggtgccattaatgccacaagtgaatacgggacacaagttcttggttcagtatctgaaaaaggcaaagctattacttgcttagcatattgtgcagacggaaaccttttgatatctggatcagaagatggtgtggtttgtgtttgggatcccaaatcacttcgccatgttcgtactctcatccatgcaaaaggttctagaaaatgtcctgtgaacaatattcaaattgttagaaaaacgattgttgctaattccaacaaaacccaagtttcctggaaaagtcgtggggctttaatcccaccgcctttggaaaaatatgaaagaccagtagaagatactatggatggtatcgttacggttgatccgccgccattttctgatgttcctgtttactcttctttcctcagtgctgaccttattgacgagcaagttaaagaacttcagcaacaaggctctgcagcaacagagatggaaatggaaagactgaaacttgaatacaaaagatctttacagatgaatgaacaatggcagaagaactatgagaatttgcttcaagtggttatggaagaagaacaaatcggtggtaccaattgaaagctttttattgttgtttctacacatttttggaattacattaagagatattgtcaagtggcatatgaagtcgtcactaaagatatgttttatcaagatcccaaatttaggtatcatagcattctgt

SEQ ID NO: 22555 - protein, 438 aa, Arabidopsis thaliana
  peptide (1)..(438): Ceres Seq. ID no. 12421979
MEITVIASSSIDEGIGSWDLKTGTEQLQFKPCASPAHGLTAVGEKFLASSQLSARNTSGSIFYWSWTKPQAEVKSYPVEPIKALAANNEGTYLVGGGISGDIYLWEVATGKLLKKWHGHYRSVTCLVFSGDDSLLVSGSQDGSIRVWSLIRLFDDFQRQQGNTLYEHNFNEHTMSVTDIVIDYGGCNAVIISSSEDRTCKVWSLSRGKLLKNIIFPSVINALALDPGGCVFYAGARDSKIYIGAINATSEYGTQVLGSVSEKGKAITCLAYCADGNLLISGSEDGVVCVWDPKSLRHVRTLIHAKGSRKCPVNNIQIVRKTIVANSNKTQVSWKSRGALIPPPLEKYERPVEDTMDGIVTVDPPPFSDVPVYSSFLSADLIDEQVKELQQQGSAATEMEMERLKLEYKRSLQMNEQWQKNYENLLQVVMEEEQIGGTN

SEQ ID NO: 22556 - protein, 265 aa, Arabidopsis thaliana
  peptide (1)..(265): Ceres Seq. ID no. 12421980
MSVTDIVIDYGGCNAVIISSSEDRTCKVWSLSRGKLLKNIIFPSVINALALDPGGCVFYAGARDSKIYIGAINATSEYGTQVLGSVSEKGKAITCLAYCADGNLLISGSEDGVVCVWDPKSLRHVRTLIHAKGSRKCPVNNIQIVRKTIVANSNKTQVSWKSRGALIPPPLEKYERPVEDTMDGIVTVDPPPFSDVPVYSSFLSADLIDEQVKELQQQGSAATEMEMERLKLEYKRSLQMNEQWQKNYENLLQVVMEEEQIGGTN

SEQ ID NO: 22557 - DNA, 1117 bp, Arabidopsis thaliana
  misc_feature (1)..(1117): Ceres Seq. ID no. 12334667
  misc_feature (1)..(1117): Ortholog of  Ceres SEQ ID NO 13594244 as cited in SEQ ID NO 57362
aggatcttcgagctgataattctattttctcaattcatcttctaagacttgtggtttctccttccttggagttcacagagaattgggatttatcctcccttggccggtttctatgtggccttccacatcacctagattcaccatcaccacaccttatccacacccacgcgccgcctcttctttcttacaggtgaaagctttccaacgcggcgactttgaccgtttggctgataacgttaagtcaggtaaagcatggagagacgcgtggagaagcgctaacgatggattcgagcaattcgtttttgaggctaagaaaaccgctgagcgaattgatcgccaatacgctgtttctcgccgctttagctccgctgctagctcagccgctgaccgtgctcgtgagattgatcgtgagtttgggattactcctcgtgttaggactgtctctgccgatttcagtagaaatttccctaagtacaggaagcaattcagtgcattcttgaatacaccgcttggtggaagttttgctactattttcttcctttggtttgctctctctggatggctgttccgagttataataatcgccacttgggttcttccaattgctggccctcttctcattggtgcagtcgccaacaactttgtcatcaagggagaatgcccagcatgtaagaggcagtttatagggtacaagaaccaaatcatcagatgtgagggatgtgggaacatagtgtggcaaccacaaggcgatttcttctcaaaagatggcaacaacaacaacaacaataataatagcaagggaaactctaaaaagccacctaagtcccaaatcattgatgtcgattttgaggagaaatgattattagagacgagaatgaagcagaaggctctattggtgcactaatattcaagtgaagataaaaatatgtgtttatagctgaatcgtttactgtttttgtctgttttgagctgtagcaatcgtgttgcttgttgtgtacatgataaggtttctttgtagacgaacaaatctagtttccacaagcctagagacttgattgaaactctgaaagttcttacatgttagacaaatcatattatgaaaacaatttacatctcc

SEQ ID NO: 22558 - protein, 248 aa, Arabidopsis thaliana
  peptide (1)..(248): Ceres Seq. ID no. 12334668
MWPSTSPRFTITTPYPHPRAASSFLQVKAFQRGDFDRLADNVKSGKAWRDAWRSANDGFEQFVFEAKKTAERIDRQYAVSRRFSSAASSAADRAREIDREFGITPRVRTVSADFSRNFPKYRKQFSAFLNTPLGGSFATIFFLWFALSGWLFRVIIIATWVLPIAGPLLIGAVANNFVIKGECPACKRQFIGYKNQIIRCEGCGNIVWQPQGDFFSKDGNNNNNNNNSKGNSKKPPKSQIIDVDFEEK

SEQ ID NO: 22559 - DNA, 1266 bp, Arabidopsis thaliana
  misc_feature (1)..(1266): Ceres Seq. ID no. 12338255
  misc_feature (1)..(1266): Ortholog of  Ceres SEQ ID NO 14304148 as cited in SEQ ID NO 57313
  misc_feature (1)..(1266): Ortholog of  Ceres SEQ ID NO 13598513 as cited in SEQ ID NO 64102
acccatcacacaatcctcaaaacagagtaacccaaaaaacagagcaatctctaaaaaatctcaagaaacctcactaaaatgggttcaacggcggagacacaattaactccggtgcaagtcaccgacgacgaagctgccctcttcgccatgcaactagccagtgcttccgttcttccgatggctttaaaatccgccttagagcttgaccttcttgagattatggccaagaatggttctcccatgtctcctaccgagatcgcttctaaacttccgaccaaaaaccctgaagctccggtcatgctcgaccgtatcctccgtcttcttacgtcttactccgtcttaacctgctccaaccgtaaactttccggtgatggcgttgaacggatttacgggcttggtccggtttgcaagtatttgaccaagaacgaagatggtgtttccattgctgctctttgtcttatgaaccaagacaaggttctcatggaaagctggtaccatttgaaggatgcaattcttgatggtgggattccattcaacaaggcttatggaatgagcgcgttcgagtaccacgggactgaccctagattcaacaaggtctttaacaatggaatgtctaaccattccacaatcaccatgaagaagattcttgagacctataagggttttgaaggattgacttctttggttgatgttggtggtggcattggtgctacactcaaaatgattgtctccaagtaccctaatcttaaaggcatcaactttgatctcccacatgtcattgaagatgctccttctcatcctggtattgagcatgttggaggagatatgtttgtaagtgtccctaaaggtgatgccatattcatgaagtggatatgtcatgactggagtgacgaacattgcgtgaaattcttgaaaaactgctacgagtcacttccagaggatggaaaagtgatattagcagagtgtatacttccagagacaccagactcaagcctctcaaccaaacaagtagtccatgtcgattgcattatgttggctcacaatcccggaggcaaagaacgaaccgagaaagagtttgaggcattagccaaagcatcaggcttcaagggcatcaaagttgtctgcgacgcttttggtgttaaccttattgagttactcaagaagctctaaaaacaaacaatgttcctatgaagatgatttatatgtaaacattatctcatatctccttccacggttccaaaactatgctgtttaataatggttttt

SEQ ID NO: 22560 - protein, 363 aa, Arabidopsis thaliana
  peptide (1)..(363): Ceres Seq. ID no. 12338256
MGSTAETQLTPVQVTDDEAALFAMQLASASVLPMALKSALELDLLEIMAKNGSPMSPTEIASKLPTKNPEAPVMLDRILRLLTSYSVLTCSNRKLSGDGVERIYGLGPVCKYLTKNEDGVSIAALCLMNQDKVLMESWYHLKDAILDGGIPFNKAYGMSAFEYHGTDPRFNKVFNNGMSNHSTITMKKILETYKGFEGLTSLVDVGGGIGATLKMIVSKYPNLKGINFDLPHVIEDAPSHPGIEHVGGDMFVSVPKGDAIFMKWICHDWSDEHCVKFLKNCYESLPEDGKVILAECILPETPDSSLSTKQVVHVDCIMLAHNPGGKERTEKEFEALAKASGFKGIKVVCDAFGVNLIELLKKL

SEQ ID NO: 22561 - protein, 340 aa, Arabidopsis thaliana
  peptide (1)..(340): Ceres Seq. ID no. 12338257
MQLASASVLPMALKSALELDLLEIMAKNGSPMSPTEIASKLPTKNPEAPVMLDRILRLLTSYSVLTCSNRKLSGDGVERIYGLGPVCKYLTKNEDGVSIAALCLMNQDKVLMESWYHLKDAILDGGIPFNKAYGMSAFEYHGTDPRFNKVFNNGMSNHSTITMKKILETYKGFEGLTSLVDVGGGIGATLKMIVSKYPNLKGINFDLPHVIEDAPSHPGIEHVGGDMFVSVPKGDAIFMKWICHDWSDEHCVKFLKNCYESLPEDGKVILAECILPETPDSSLSTKQVVHVDCIMLAHNPGGKERTEKEFEALAKASGFKGIKVVCDAFGVNLIELLKKL

SEQ ID NO: 22562 - protein, 330 aa, Arabidopsis thaliana
  peptide (1)..(330): Ceres Seq. ID no. 12338258
MALKSALELDLLEIMAKNGSPMSPTEIASKLPTKNPEAPVMLDRILRLLTSYSVLTCSNRKLSGDGVERIYGLGPVCKYLTKNEDGVSIAALCLMNQDKVLMESWYHLKDAILDGGIPFNKAYGMSAFEYHGTDPRFNKVFNNGMSNHSTITMKKILETYKGFEGLTSLVDVGGGIGATLKMIVSKYPNLKGINFDLPHVIEDAPSHPGIEHVGGDMFVSVPKGDAIFMKWICHDWSDEHCVKFLKNCYESLPEDGKVILAECILPETPDSSLSTKQVVHVDCIMLAHNPGGKERTEKEFEALAKASGFKGIKVVCDAFGVNLIELLKKL

SEQ ID NO: 22563 - DNA, 1149 bp, Arabidopsis thaliana
  misc_feature (1)..(1149): Ceres Seq. ID no. 12334999
  misc_feature (1)..(1149): Ortholog of  Ceres SEQ ID NO 13658873 as cited in SEQ ID NO 66604
  misc_feature (1)..(1149): Ortholog of  Ceres SEQ ID NO 14309137 as cited in SEQ ID NO 0
aacaattaaagtgagaattttcctgaagaagaagaacttttgctttttttctgggtttgcttttttgttgtgtcaatgaaatgggagaaatggagatcgaagaaatcgaagctgttcttgagaaaatctgggatctacatgacaagcttagcgatgagattcacttgatttcgaagtctcactttctcaaatcggttaaaccttcaaatagatcggagaagagaaagaatcctcacggaaattccggcgaagataagcgacctggttatgttttcatcaaaggattcgccgtcgatgataacgactccacgattcaggaggcgaagagtcttaacgcaattcgaaccgctcttgagaaccttgaagaccagctcgagtttttccatactatacatacacagcagcgaacagagaaagatgttgcgattgctcggcttgaacagagcagaatattactagcaatgagattagctgaacaccacggcaagaactatggagtcctagaggaagctcttgcatttgttgggagcattaaatccacctcgcattacgtttcacctgatcacctctacgattcctctcgaaacccagacggagcaaactctactccatatggaataaagtcaaactttgtaatcaactcatttgcctcgactttcgggtttgctaaaagagcacttggattcaaccatgtgaaaggcgtacttggaaacgctgctatatttaccataagcgtggtcgctatgctacatcttcaccaagtggctactagtgaacatcatctacagaagaaagaagacagattctacagaagccaacagaggaaaacatacggaagagataagtcttcaggtgacagaagtttggatcacttggacgtaatgatggctcgtggttaagaccagagatcgaacttgtctacacgtgagaaaactaaagaagagaagagatattgttgctctcaaaaggtttcgatattatcagcaaaaggataagaatttggaggcaaagtgttggaattttctgagctcgtctgatgcaaatattgttcctttcttctaattttgattttcaatcactgtggttaatgttttgtttgttttgtttggttttgttgatttcaagtgtggttaggctttcttgtaaacc

SEQ ID NO: 22564 - protein, 272 aa, Arabidopsis thaliana
  peptide (1)..(272): Ceres Seq. ID no. 12335000
MGEMEIEEIEAVLEKIWDLHDKLSDEIHLISKSHFLKSVKPSNRSEKRKNPHGNSGEDKRPGYVFIKGFAVDDNDSTIQEAKSLNAIRTALENLEDQLEFFHTIHTQQRTEKDVAIARLEQSRILLAMRLAEHHGKNYGVLEEALAFVGSIKSTSHYVSPDHLYDSSRNPDGANSTPYGIKSNFVINSFASTFGFAKRALGFNHVKGVLGNAAIFTISVVAMLHLHQVATSEHHLQKKEDRFYRSQQRKTYGRDKSSGDRSLDHLDVMMARG

SEQ ID NO: 22565 - protein, 269 aa, Arabidopsis thaliana
  peptide (1)..(269): Ceres Seq. ID no. 12335001
MEIEEIEAVLEKIWDLHDKLSDEIHLISKSHFLKSVKPSNRSEKRKNPHGNSGEDKRPGYVFIKGFAVDDNDSTIQEAKSLNAIRTALENLEDQLEFFHTIHTQQRTEKDVAIARLEQSRILLAMRLAEHHGKNYGVLEEALAFVGSIKSTSHYVSPDHLYDSSRNPDGANSTPYGIKSNFVINSFASTFGFAKRALGFNHVKGVLGNAAIFTISVVAMLHLHQVATSEHHLQKKEDRFYRSQQRKTYGRDKSSGDRSLDHLDVMMARG

SEQ ID NO: 22566 - protein, 145 aa, Arabidopsis thaliana
  peptide (1)..(145): Ceres Seq. ID no. 12335002
MRLAEHHGKNYGVLEEALAFVGSIKSTSHYVSPDHLYDSSRNPDGANSTPYGIKSNFVINSFASTFGFAKRALGFNHVKGVLGNAAIFTISVVAMLHLHQVATSEHHLQKKEDRFYRSQQRKTYGRDKSSGDRSLDHLDVMMARG

SEQ ID NO: 22567 - DNA, 1784 bp, Arabidopsis thaliana
  misc_feature (1)..(1784): Ceres Seq. ID no. 13580587
  misc_feature (1)..(1784): Ortholog of  Ceres SEQ ID NO 13597732 as cited in SEQ ID NO 64810
  misc_feature (1)..(1784): Ortholog of  Ceres SEQ ID NO 14301912 as cited in SEQ ID NO 67786
aagataaacccaattttgttatttttgttctctcttctctctcgttcatgtttcaaatctgtttctagggtttcacaaaccagagatagagagaggtttagcgaaaaatggcgatggccatggctcttcgaaggctttcttcttcaattgacaaacccattcgtcctcttattcgatccacttcatgttacatgtcttctttgcccagtgaagctgttgatgagaaggaaagatctcgtgtcacttggccaaaacagcttaacgcacctttagaggaggttgatcctgagattgctgacattattgagcatgagaaagctagacaatggaagggacttgaacttattccatctgagaacttcacatctgtgtcggtgatgcaagctgttgggtctgtcatgactaacaaatacagtgaaggctatcctggtgccagatactatggaggaaatgagtatatagacatggcagaaaccttatgccagaagcgcgctcttgaagctttccggttagatcctgaaaagtggggagtgaatgttcaacctttgtctggatctcctgccaacttccatgtgtacactgcattgttaaagcctcatgaaagaatcatggcacttgatcttcctcatggtggtcatctttctcatggttatcagactgacaccaagaagatatcagctgtgtctatcttctttgaaacaatgccctatagattggacgagagcactggctacatcgactacgatcagatggagaaaagtgctactcttttcaggccaaaaattgattgttgctggtgcaagtgcttatgctagattgtatgactatgcccgcatcagaaaggtctgtaacaagcaaaaagctgtaatgctagcagatatggcacacatcagtggtttggttgctgctaatgtaatcccttcaccgttcgactatgctgatgttgtaaccaccacaactcacaagtcacttcgtggaccccgtggagccatgattttcttcagaaagggtgttaaggaaattaacaagcaagggaaagaggttttgtatgattttgaagacaagatcaaccaagctgtcttccctggtcttcaaggtggtccacacaaccacactatcacaggactagctgttgctttgaaacaggcaactacttcagagtacaaagcataccaagaacaagtcctgagtaacagtgcaaagtttgctcagactctaatggagagaggatatgaacttgtttctggtggaactgacaaccatctggttctagtgaatctaaagcccaagggaattgatggatctagagttgagaaagtgttggaagctgttcacattgcatccaacaaaaacactgttcctggagatgtttctgccatggttcctggtggaatcagaatgggtactcctgctctcacttccagaggctttgttgaggaagactttgccaaagtagctgaatacttcgacaaagctgtgacaatagctctcaaagtcaaatctgaagctcaaggaaccaagttgaaggatttcgtgtcagcaatggaatcctcttcaaccatccaatccgagattgcgaaactgcgccatgaagtcgaggaattcgctaagcagttcccaacaattgggtttgagaaagaaaccatgaagtacaagaactaaactgtttcaccccacaagtgttttctgttatgctttgaattcccatggaatgtatagatgatacatgtaaaactctattttcacgctatgcgaaaaataatgatctgttaaattttctctct

SEQ ID NO: 22568 - protein, 354 aa, Arabidopsis thaliana
  peptide (1)..(354): Ceres Seq. ID no. 13580588
MKESWHLIFLMVVIFLMVIRLTPRRYQLCLSSLKQCPIDWTRALATSTTIRWRKVLLFSGQKLIVAGASAYARLYDYARIRKVCNKQKAVMLADMAHISGLVAANVIPSPFDYADVVTTTTHKSLRGPRGAMIFFRKGVKEINKQGKEVLYDFEDKINQAVFPGLQGGPHNHTITGLAVALKQATTSEYKAYQEQVLSNSAKFAQTLMERGYELVSGGTDNHLVLVNLKPKGIDGSRVEKVLEAVHIASNKNTVPGDVSAMVPGGIRMGTPALTSRGFVEEDFAKVAEYFDKAVTIALKVKSEAQGTKLKDFVSAMESSSTIQSEIAKLRHEVEEFAKQFPTIGFEKETMKYKN

SEQ ID NO: 22569 - protein, 344 aa, Arabidopsis thaliana
  peptide (1)..(344): Ceres Seq. ID no. 13580589
MVVIFLMVIRLTPRRYQLCLSSLKQCPIDWTRALATSTTIRWRKVLLFSGQKLIVAGASAYARLYDYARIRKVCNKQKAVMLADMAHISGLVAANVIPSPFDYADVVTTTTHKSLRGPRGAMIFFRKGVKEINKQGKEVLYDFEDKINQAVFPGLQGGPHNHTITGLAVALKQATTSEYKAYQEQVLSNSAKFAQTLMERGYELVSGGTDNHLVLVNLKPKGIDGSRVEKVLEAVHIASNKNTVPGDVSAMVPGGIRMGTPALTSRGFVEEDFAKVAEYFDKAVTIALKVKSEAQGTKLKDFVSAMESSSTIQSEIAKLRHEVEEFAKQFPTIGFEKETMKYKN

SEQ ID NO: 22570 - protein, 338 aa, Arabidopsis thaliana
  peptide (1)..(338): Ceres Seq. ID no. 13580590
MVIRLTPRRYQLCLSSLKQCPIDWTRALATSTTIRWRKVLLFSGQKLIVAGASAYARLYDYARIRKVCNKQKAVMLADMAHISGLVAANVIPSPFDYADVVTTTTHKSLRGPRGAMIFFRKGVKEINKQGKEVLYDFEDKINQAVFPGLQGGPHNHTITGLAVALKQATTSEYKAYQEQVLSNSAKFAQTLMERGYELVSGGTDNHLVLVNLKPKGIDGSRVEKVLEAVHIASNKNTVPGDVSAMVPGGIRMGTPALTSRGFVEEDFAKVAEYFDKAVTIALKVKSEAQGTKLKDFVSAMESSSTIQSEIAKLRHEVEEFAKQFPTIGFEKETMKYKN

SEQ ID NO: 22571 - DNA, 1075 bp, Arabidopsis thaliana
  misc_feature (1)..(1075): Ceres Seq. ID no. 13593739
  misc_feature (1)..(1075): Ortholog of  Ceres SEQ ID NO 15173003 as cited in SEQ ID NO 51318
  misc_feature (1)..(1075): Ortholog of  Ceres SEQ ID NO 15224290 as cited in SEQ ID NO 62810
  misc_feature (1)..(1075): Ortholog of  Ceres SEQ ID NO 14302267 as cited in SEQ ID NO 68607
aagcagaggagttatactttactacttactaatctctccctctctctatctgactctttgatcggaaaaaatggcggagaaaaatgcgagcgcggtggacggtgcaattagggttagtggaatgcagttttcttacgatgttcaagatcctattttcttcgattttaatctcgatcttcccgctggatctcgttgcctcttggttggtgccaatggatctgggaaaactacgttattgaagattcttgctggaaaacatatggttggaggaaagaatgttgtacaagtgcttgatcgctcagcatttcatgatacagagcttgtttgtagtggtgatttgtcttacctaggaggatcatggagtaaaactgctggttctgctggtgatattccactccaaggagacttctcagcagaacatatgatatttggagttgaagggattgatcctttcagaagagagaagttgattgatcttcttgatatcaatcttcaatggcgtatgcataaggtttctgatgggcagagacgtcgagtgcaaatatgtatgggtctattacatccgttcaaggtattactactggatgaagttactgttgacctcgacgttgttgctaggatggatttgttggagttctttaaagaagaatgtgaacagagaggagctacaattgtatatgcaactcatattttcgacgggctcgagacatgggctagtcatttggcttacattaatggaggagagctgaaactctcggccaagttagatgagatcaaggatctcaaaacctcaccaaatctgctatctgttgttgaagcttggctccggtctgaaaccaaagttgagaaaaagacgaagaagaaacctgttgttacctctccatttatgtcgtctagacaaatggcatattaccgatgaatcttaacttgtttatgagatcagtaagaataagagcactgcttctacagatgcctttgttttctatggtacttcattgtttagaatccgataatttttatcacacatgaaagaatttctgtaaaaccacgtttttaattaaattactattttgcc

SEQ ID NO: 22572 - protein, 282 aa, Arabidopsis thaliana
  peptide (1)..(282): Ceres Seq. ID no. 15221238
MAEKNASAVDGAIRVSGMQFSYDVQDPIFFDFNLDLPAGSRCLLVGANGSGKTTLLKILAGKHMVGGKNVVQVLDRSAFHDTELVCSGDLSYLGGSWSKTAGSAGDIPLQGDFSAEHMIFGVEGIDPFRREKLIDLLDINLQWRMHKVSDGQRRRVQICMGLLHPFKVLLLDEVTVDLDVVARMDLLEFFKEECEQRGATIVYATHIFDGLETWASHLAYINGGELKLSAKLDEIKDLKTSPNLLSVVEAWLRSETKVEKKTKKKPVVTSPFMSSRQMAYYR

SEQ ID NO: 22573 - protein, 265 aa, Arabidopsis thaliana
  peptide (1)..(265): Ceres Seq. ID no. 15221239
MQFSYDVQDPIFFDFNLDLPAGSRCLLVGANGSGKTTLLKILAGKHMVGGKNVVQVLDRSAFHDTELVCSGDLSYLGGSWSKTAGSAGDIPLQGDFSAEHMIFGVEGIDPFRREKLIDLLDINLQWRMHKVSDGQRRRVQICMGLLHPFKVLLLDEVTVDLDVVARMDLLEFFKEECEQRGATIVYATHIFDGLETWASHLAYINGGELKLSAKLDEIKDLKTSPNLLSVVEAWLRSETKVEKKTKKKPVVTSPFMSSRQMAYYR

SEQ ID NO: 22574 - protein, 219 aa, Arabidopsis thaliana
  peptide (1)..(219): Ceres Seq. ID no. 15221240
MVGGKNVVQVLDRSAFHDTELVCSGDLSYLGGSWSKTAGSAGDIPLQGDFSAEHMIFGVEGIDPFRREKLIDLLDINLQWRMHKVSDGQRRRVQICMGLLHPFKVLLLDEVTVDLDVVARMDLLEFFKEECEQRGATIVYATHIFDGLETWASHLAYINGGELKLSAKLDEIKDLKTSPNLLSVVEAWLRSETKVEKKTKKKPVVTSPFMSSRQMAYYR

SEQ ID NO: 22575 - DNA, 747 bp, Arabidopsis thaliana
  misc_feature (1)..(747): Ceres Seq. ID no. 13491892
  misc_feature (1)..(747): Ortholog of  Ceres SEQ ID NO 14314807 as cited in SEQ ID NO 52563
acaaaaacaacatagaacattaaatccatactctcttagaaaaagaaaaaaagaaatggcggatcatcaacaacatcagcaacaacaacaaccaataatgaggagtctccatgaatcatcaccatcgactcggcagatagtgagattcgtaacggcagctacgatcggcctatcactcctcgtgctctcaggactaacactaaccggaacggtgatcggtttgatcgtagcgacgccgttgatggttctgttcagcccggtgttggtaccggcagtgataacgatagggcttttgacgatgggattcctattctccggtggttgtggggtggcagcagctacggcgttaacgtggatttataagtacgttaccggaaaacacccgatgggagcggataaggtggattacgcgaggatgaggatagcggagaaagccaaagagttgggacattatacgcactcgcagccacaacaaacacaccaaaccacaacaactactcattagagtttaataattatatggatctatatgttgtattaagttttatgattatcctacgtatgtttttttaatactgttcttacctttttgaaaagatctatctaaaattttattttctattttccatacaattttttgtgtgtttaattgctgatcggtattttctgttttatgattgtgaaatagctagtgtaaggaaagatgataacgaattaagtaaattaatagatgccaattacttggcc

SEQ ID NO: 22576 - protein, 167 aa, Arabidopsis thaliana
  peptide (1)..(167): Ceres Seq. ID no. 13491893
QKQHRTLNPYSLRKRKKEMADHQQHQQQQQPIMRSLHESSPSTRQIVRFVTAATIGLSLLVLSGLTLTGTVIGLIVATPLMVLFSPVLVPAVITIGLLTMGFLFSGGCGVAAATALTWIYKYVTGKHPMGADKVDYARMRIAEKAKELGHYTHSQPQQTHQTTTTTH

SEQ ID NO: 22577 - protein, 149 aa, Arabidopsis thaliana
  peptide (1)..(149): Ceres Seq. ID no. 13491894
MADHQQHQQQQQPIMRSLHESSPSTRQIVRFVTAATIGLSLLVLSGLTLTGTVIGLIVATPLMVLFSPVLVPAVITIGLLTMGFLFSGGCGVAAATALTWIYKYVTGKHPMGADKVDYARMRIAEKAKELGHYTHSQPQQTHQTTTTTH

SEQ ID NO: 22578 - protein, 135 aa, Arabidopsis thaliana
  peptide (1)..(135): Ceres Seq. ID no. 13491895
MRSLHESSPSTRQIVRFVTAATIGLSLLVLSGLTLTGTVIGLIVATPLMVLFSPVLVPAVITIGLLTMGFLFSGGCGVAAATALTWIYKYVTGKHPMGADKVDYARMRIAEKAKELGHYTHSQPQQTHQTTTTTH

SEQ ID NO: 22579 - DNA, 1508 bp, Arabidopsis thaliana
  misc_feature (1)..(1508): Ceres Seq. ID no. 13609863
  misc_feature (1)..(1508): Ortholog of  Ceres SEQ ID NO 14314925 as cited in SEQ ID NO 57985
  misc_feature (1)..(1508): Ortholog of  Ceres SEQ ID NO 13591365 as cited in SEQ ID NO 62720
tcctcctcatttggagatgtcactaactcatcttctctgattcaccaacatcctaaaacccttttgatcaaaacatggcttccatttccagaatcttaccaacagatggcagattaagtcaatgcagaatcaacacctcgtgggttccttctacaaccagaactcaaactcacttagattttcccaagttagtttctgttagtaactctgggataagtttgaggattcagaatagtaaacctattagccctgtctttgctcttgaagcaacttcctccaggagggttgtttgcaaagctgctgctggtgtgtcaggtgacttacctgagagtactcctaaggaacttagtcagtatgagaagattattgagcttttgacaaccctttttccactttgggttattttgggaacacttgttggcatcttcaagccatccttggttacatggttggaaacagatctctttactctaggtcttggatttcttatgctttccatgggtttgactcttacgtttgaagatttcagaagatgtttacgtaatccatggacggtgggtgttggttttcttgctcaatatatgatcaagccaattctaggttttctcattgcaatgactcttaagctttcggcacctcttgcgactggccttatcctagtctcatgctgccctggaggacaggcgtcaaacgttgctacttacatttccaaggggaatgtagcgctctctgtactcatgacaacgtgttcaaccattggggctattataatgactcctcttcttactaagcttcttgctggtcagcttgttcccgttgacgctgctggacttgctcttagtacgttccaagtagtgttggttcctaccataattggagttctggcaaatgagttctttcctaaatttacgtctaagatcataacagtgacgcctctaatcggagtcattctgactactctgctctgtgccagccctattggacaagttgcagatgttttgaaaacccaaggagctcaacttatactcccggtggcactccttcatgctgcagcctttgctattggctattggatttcaaagttttctttcggcgagtccacttcgcgtaccatttctatagaatgtggaatgcaaagttcagcgctcgggttcttgcttgcacaaaagcatttcacaaaccctctagttgctgttccttctgcagtcagtgttgtctgtatggcgcttggcgggagcggcctggccgtgttctggagaaacctaccgattccggcagatgacaaggatgacttcaaagagtaaatgaagtaggaaaggcggtttgcatcttctccaaacgatgtgattgttttgttgtaatgttagtaaacattacaaaatttgtgttgaaaaacatgaaacaaaatgtgtttaagagacatagaaacaagggcgtgcatgatgacaactttgtggtcaaccttttttttatttctcaattaatggacaaatcttttttggcacacc

SEQ ID NO: 22580 - protein, 409 aa, Arabidopsis thaliana
  peptide (1)..(409): Ceres Seq. ID no. 13609864
MASISRILPTDGRLSQCRINTSWVPSTTRTQTHLDFPKLVSVSNSGISLRIQNSKPISPVFALEATSSRRVVCKAAAGVSGDLPESTPKELSQYEKIIELLTTLFPLWVILGTLVGIFKPSLVTWLETDLFTLGLGFLMLSMGLTLTFEDFRRCLRNPWTVGVGFLAQYMIKPILGFLIAMTLKLSAPLATGLILVSCCPGGQASNVATYISKGNVALSVLMTTCSTIGAIIMTPLLTKLLAGQLVPVDAAGLALSTFQVVLVPTIIGVLANEFFPKFTSKIITVTPLIGVILTTLLCASPIGQVADVLKTQGAQLILPVALLHAAAFAIGYWISKFSFGESTSRTISIECGMQSSALGFLLAQKHFTNPLVAVPSAVSVVCMALGGSGLAVFWRNLPIPADDKDDFKE

SEQ ID NO: 22581 - protein, 271 aa, Arabidopsis thaliana
  peptide (1)..(271): Ceres Seq. ID no. 13609865
MLSMGLTLTFEDFRRCLRNPWTVGVGFLAQYMIKPILGFLIAMTLKLSAPLATGLILVSCCPGGQASNVATYISKGNVALSVLMTTCSTIGAIIMTPLLTKLLAGQLVPVDAAGLALSTFQVVLVPTIIGVLANEFFPKFTSKIITVTPLIGVILTTLLCASPIGQVADVLKTQGAQLILPVALLHAAAFAIGYWISKFSFGESTSRTISIECGMQSSALGFLLAQKHFTNPLVAVPSAVSVVCMALGGSGLAVFWRNLPIPADDKDDFKE

SEQ ID NO: 22582 - protein, 268 aa, Arabidopsis thaliana
  peptide (1)..(268): Ceres Seq. ID no. 13609866
MGLTLTFEDFRRCLRNPWTVGVGFLAQYMIKPILGFLIAMTLKLSAPLATGLILVSCCPGGQASNVATYISKGNVALSVLMTTCSTIGAIIMTPLLTKLLAGQLVPVDAAGLALSTFQVVLVPTIIGVLANEFFPKFTSKIITVTPLIGVILTTLLCASPIGQVADVLKTQGAQLILPVALLHAAAFAIGYWISKFSFGESTSRTISIECGMQSSALGFLLAQKHFTNPLVAVPSAVSVVCMALGGSGLAVFWRNLPIPADDKDDFKE

SEQ ID NO: 22583 - DNA, 1776 bp, Arabidopsis thaliana
  misc_feature (1)..(1776): Ceres Seq. ID no. 12687631
  misc_feature (1)..(1776): Ortholog of  Ceres SEQ ID NO 14301920 as cited in SEQ ID NO 69277
atgacggggaagcgatcaaagactaattgcagatctgcttctcacaagctcttcaaggataaggctaagaaccgtgttgatgatttgcaaggcatgcttttggatcttcagtttgcgaggaaagagagtaggcctactgatgttactcttcttgaggagcaagtgaatcagatgcttcgtgagtggaaatctgagctcaatgagccttctccagcttcatccttgcaacaaggtggtactctggggtctttctcatcagatatttgtcggctgctgcagctctgtgatgaggaagatgatgctaccagcaaattagctgcccccaagcccgagcctgctgatcagaatctcgaagctggcaaagctgctgtcttccaaaggggatacaatttggttcaggggaagtcagaacatggattaccattggttgataattgcaaagatttgtccttagcagctggtaacaatttcgatggaacggctcctttggagtatcatcagcagtatgatctgcaacaagagtttgaaccaaacttcaatggtggtttcaacaattgtcccagttatggtgtagtagagggtcctatacatatctctaattttatcccgactatttgtcctccaccctctgcattcttgggtccaaaatgtgctctttgggattgccctaggccagctcagggatttgattggttccaggattactgcagcagcttccacgctgcactggctttcaatgaagggccaccaggtatgaatccggtggtgcgtcctggaggtatcggcctaaaagacggtctgctttttgctgctcttagtgcaaaggctggagggaaagatgttggtattcccgaatgtgaaggagctgcaactgctaaatctccatggaatgctccagagctctttgatctcacggttctggagagtgagacactaagggagtggctattctttgacaagccaaggagggcctttgagagcgggaacagaaagcaaagatctttaccagactacaatggtcgtggttggcacgagtcacgtaaacagatcatggtcgagtttggagggctgaagagatcttactacatggatccacagcctctgcaccatttcgaatggcatctttacgaatatgagatcaacaagtgtgatgcttgtgccttgtacaggctcgagctcaagcttgttgacgggaagaagacttcaaaaggcaaagtctcaaacgactcagtggctgatctgcagaagcagatgggaagactcacagctgagttccctccagaaaacaataccactaacaccaccaacaacaacaaacgctgcatcaaaggaagaccaaaagtgagcacaaaagtcgccaccgggaatgttcagaacacagtagagcaggcaaatgactatggagtaggtgaagagtttaactatctggtcggaaatctaagcgactattatatcccctgagacgaatgtggaaaaactcagttctctgtctatctatggagattatgtatatataacaagaagtggatgctgaagactgtcctggagttaggaatagtaaatgtgacgaaggagactgctttttaagattcagtctatggaggtgaagacatatttactgacattccggtttatatattttgatgcattttcgactctcttctgcgatataatgcagatgacaaattatgtaaccgatggggaaatacggttttgagtatcagtgttgttcttatagaatcaggaccttgttcaatgagatcattgctcttactt

SEQ ID NO: 22584 - protein, 486 aa, Arabidopsis thaliana
  peptide (1)..(486): Ceres Seq. ID no. 12687632
MTGKRSKTNCRSASHKLFKDKAKNRVDDLQGMLLDLQFARKESRPTDVTLLEEQVNQMLREWKSELNEPSPASSLQQGGTLGSFSSDICRLLQLCDEEDDATSKLAAPKPEPADQNLEAGKAAVFQRGYNLVQGKSEHGLPLVDNCKDLSLAAGNNFDGTAPLEYHQQYDLQQEFEPNFNGGFNNCPSYGVVEGPIHISNFIPTICPPPSAFLGPKCALWDCPRPAQGFDWFQDYCSSFHAALAFNEGPPGMNPVVRPGGIGLKDGLLFAALSAKAGGKDVGIPECEGAATAKSPWNAPELFDLTVLESETLREWLFFDKPRRAFESGNRKQRSLPDYNGRGWHESRKQIMVEFGGLKRSYYMDPQPLHHFEWHLYEYEINKCDACALYRLELKLVDGKKTSKGKVSNDSVADLQKQMGRLTAEFPPENNTTNTTNNNKRCIKGRPKVSTKVATGNVQNTVEQANDYGVGEEFNYLVGNLSDYYIP

SEQ ID NO: 22585 - protein, 455 aa, Arabidopsis thaliana
  peptide (1)..(455): Ceres Seq. ID no. 12687633
MLLDLQFARKESRPTDVTLLEEQVNQMLREWKSELNEPSPASSLQQGGTLGSFSSDICRLLQLCDEEDDATSKLAAPKPEPADQNLEAGKAAVFQRGYNLVQGKSEHGLPLVDNCKDLSLAAGNNFDGTAPLEYHQQYDLQQEFEPNFNGGFNNCPSYGVVEGPIHISNFIPTICPPPSAFLGPKCALWDCPRPAQGFDWFQDYCSSFHAALAFNEGPPGMNPVVRPGGIGLKDGLLFAALSAKAGGKDVGIPECEGAATAKSPWNAPELFDLTVLESETLREWLFFDKPRRAFESGNRKQRSLPDYNGRGWHESRKQIMVEFGGLKRSYYMDPQPLHHFEWHLYEYEINKCDACALYRLELKLVDGKKTSKGKVSNDSVADLQKQMGRLTAEFPPENNTTNTTNNNKRCIKGRPKVSTKVATGNVQNTVEQANDYGVGEEFNYLVGNLSDYYIP

SEQ ID NO: 22586 - protein, 429 aa, Arabidopsis thaliana
  peptide (1)..(429): Ceres Seq. ID no. 12687634
MLREWKSELNEPSPASSLQQGGTLGSFSSDICRLLQLCDEEDDATSKLAAPKPEPADQNLEAGKAAVFQRGYNLVQGKSEHGLPLVDNCKDLSLAAGNNFDGTAPLEYHQQYDLQQEFEPNFNGGFNNCPSYGVVEGPIHISNFIPTICPPPSAFLGPKCALWDCPRPAQGFDWFQDYCSSFHAALAFNEGPPGMNPVVRPGGIGLKDGLLFAALSAKAGGKDVGIPECEGAATAKSPWNAPELFDLTVLESETLREWLFFDKPRRAFESGNRKQRSLPDYNGRGWHESRKQIMVEFGGLKRSYYMDPQPLHHFEWHLYEYEINKCDACALYRLELKLVDGKKTSKGKVSNDSVADLQKQMGRLTAEFPPENNTTNTTNNNKRCIKGRPKVSTKVATGNVQNTVEQANDYGVGEEFNYLVGNLSDYYIP

SEQ ID NO: 22587 - DNA, 803 bp, Arabidopsis thaliana
  misc_feature (1)..(803): Ceres Seq. ID no. 12339062
  misc_feature (1)..(803): Ortholog of  Ceres SEQ ID NO 13638897 as cited in SEQ ID NO 55839
  misc_feature (1)..(803): Ortholog of  Ceres SEQ ID NO 15177758 as cited in SEQ ID NO 57504
  misc_feature (1)..(803): Ortholog of  Ceres SEQ ID NO 13624040 as cited in SEQ ID NO 0
acacaagcattttcaaggatatcaaatcacaatcccaagaagagcaataacaagagaagaagaagtagttcaagaattaaggaagagagcttctccgttaaagtatagtgagagaatatggaagtcaccaatgggcttaaccttaaggacacagagcttcgtttgggattacccggagcacaagaagaacaacaactagaactttcttgcgtcagaagcaacaacaagcgcaagaacaacgactcaacagaagaatctgctcctcctcctgcaaaaacacaaatcgttggatggcctccagtgagatctaaccgtaagaacaacaacaacaaaaacgtgagttatgtgaaagtgagtatggacggagctccatatctccgtaagatagatctcaagatgtacaaaaactatccagagcttctcaaagcactagagaacatgttcaagttcacagtaggtgaatattccgagagagaaggctacaaaggatctggatttgtacctacttatgaagacaaagatggagattggatgttggtcggtgatgttccatgggacatgttctcttcatcttgtcaaaaactcagaatcatgaaaggatccgaagctcctactgccttatgatccattgtctcaaaacaccttttggtcgaggcaaaaacaaattctactttgtttagataaaaaaaagtttggtgtaaagaaaagaaaaagcaatagggttacaaatacgttatatagatgtaaactagctttggttaattctgtaaaagatgagttttgattatacaaagtttatatgt

SEQ ID NO: 22588 - protein, 168 aa, Arabidopsis thaliana
  peptide (1)..(168): Ceres Seq. ID no. 12339063
MEVTNGLNLKDTELRLGLPGAQEEQQLELSCVRSNNKRKNNDSTEESAPPPAKTQIVGWPPVRSNRKNNNNKNVSYVKVSMDGAPYLRKIDLKMYKNYPELLKALENMFKFTVGEYSEREGYKGSGFVPTYEDKDGDWMLVGDVPWDMFSSSCQKLRIMKGSEAPTAL

SEQ ID NO: 22589 - protein, 88 aa, Arabidopsis thaliana
  peptide (1)..(88): Ceres Seq. ID no. 12339064
MDGAPYLRKIDLKMYKNYPELLKALENMFKFTVGEYSEREGYKGSGFVPTYEDKDGDWMLVGDVPWDMFSSSCQKLRIMKGSEAPTAL

SEQ ID NO: 22590 - DNA, 1528 bp, Arabidopsis thaliana
  misc_feature (1)..(1528): Ceres Seq. ID no. 13493893
  misc_feature (1)..(1528): Ortholog of  Ceres SEQ ID NO 14315430 as cited in SEQ ID NO 57618
  misc_feature (1)..(1528): Ortholog of  Ceres SEQ ID NO 13623344 as cited in SEQ ID NO 0
agttcgcaacaccgcaatagatcttttccccaagtttcagacaaacataaagcagcagagaaaattttcaagtttcaaagagcttttccctcaccaagcaaaatttggatatttgtcagcgaaatctgcagctaaattgggacttgtcttgttagttcaaagattgaaacttttttggttaattgtttggcggaagaagatttacaatgggagaggagcatccgagaaagcggtctagacaacattttgaagcggaggcgagaaacgtatcgttgtttgaatcccctcaatgcgaaacctccaagtggtatttcagcagggaagagattgagcgtttctctccatccagaaaagatgggattgatcttgtgaaggagtcgtttttacggtcttcgtattgcaccttcctgcaaagacttggcatgaagcttcatgtgtcccaggttacaatatcatgtgcaatggtgatgtgccacaggttttacatgcgccaatctcatgcaaaaaatgactggcagacaatagcgacttccagtctgttcctcgcttgcaaagctgaagatgagccatgtcaactgtccagtgtcgttgtagcgtcttatgaaataatttatgagtgggatccttctgcctcaattagaatccatcaaactgagtgttatcatgaatttaaagaaattattttgtccggggaaagtcttctgctgagcacaagtgctttccatttagacattgaacttccctacaaacctctggctgcggctttgaatagactgaacgcttggcctgaccttgcaacagctgcatggaattttgtgcatgactggattcgaaccacactatgcttgcagtacaaaccccatgttattgcaacagccactgtgcacctagctgctacgtttcagaatgcgaaagtaggcagcaggagagattggtggttggagtttggagttacaactaagctattaaaagaggtaatccaggagatgtgcacactgatagaagtggacagaaggaggaatatgccacctccacctccacctccaagaagagagttaagttgggcaatacctgcagccgtaaagccggtccatatggctagagcttatccgtttcacagctaccctttgcagtcctatagacaggctggcatctggtgagccattgttgagcagcatgaagatgtaatctctcttagagtcttgagttggtttagcaataaaagatttccgtagagactcatgagagaggcagtgtagcattatatagagatccgagtgaggtgcttctgtctaagttaagcgtctcatgtatgaccaaagtggattctctcgagattcttggtctctgttctcgatagagagagattatgtatagaagtgtcccattcacatgttataatactagctgactttatatcgtttgtatatctggaatctatgtttttggtttctttaaaaagtttaaagttgttttgattttgactaattctctcattgttaagtaatttggtttttgatgaagtgcc

SEQ ID NO: 22591 - protein, 317 aa, Arabidopsis thaliana
  peptide (1)..(317): Ceres Seq. ID no. 13493894
MGEEHPRKRSRQHFEAEARNVSLFESPQCETSKWYFSREEIERFSPSRKDGIDLVKESFLRSSYCTFLQRLGMKLHVSQVTISCAMVMCHRFYMRQSHAKNDWQTIATSSLFLACKAEDEPCQLSSVVVASYEIIYEWDPSASIRIHQTECYHEFKEIILSGESLLLSTSAFHLDIELPYKPLAAALNRLNAWPDLATAAWNFVHDWIRTTLCLQYKPHVIATATVHLAATFQNAKVGSRRDWWLEFGVTTKLLKEVIQEMCTLIEVDRRRNMPPPPPPPRRELSWAIPAAVKPVHMARAYPFHSYPLQSYRQAGIW

SEQ ID NO: 22592 - protein, 245 aa, Arabidopsis thaliana
  peptide (1)..(245): Ceres Seq. ID no. 13493895
MKLHVSQVTISCAMVMCHRFYMRQSHAKNDWQTIATSSLFLACKAEDEPCQLSSVVVASYEIIYEWDPSASIRIHQTECYHEFKEIILSGESLLLSTSAFHLDIELPYKPLAAALNRLNAWPDLATAAWNFVHDWIRTTLCLQYKPHVIATATVHLAATFQNAKVGSRRDWWLEFGVTTKLLKEVIQEMCTLIEVDRRRNMPPPPPPPRRELSWAIPAAVKPVHMARAYPFHSYPLQSYRQAGIW

SEQ ID NO: 22593 - protein, 232 aa, Arabidopsis thaliana
  peptide (1)..(232): Ceres Seq. ID no. 13493896
MVMCHRFYMRQSHAKNDWQTIATSSLFLACKAEDEPCQLSSVVVASYEIIYEWDPSASIRIHQTECYHEFKEIILSGESLLLSTSAFHLDIELPYKPLAAALNRLNAWPDLATAAWNFVHDWIRTTLCLQYKPHVIATATVHLAATFQNAKVGSRRDWWLEFGVTTKLLKEVIQEMCTLIEVDRRRNMPPPPPPPRRELSWAIPAAVKPVHMARAYPFHSYPLQSYRQAGIW

SEQ ID NO: 22594 - DNA, 1072 bp, Arabidopsis thaliana
  misc_feature (1)..(1072): Ceres Seq. ID no. 13613504
  misc_feature (1)..(1072): Ortholog of  Ceres SEQ ID NO 15177119 as cited in SEQ ID NO 51196
acaacggccactgaacactatcgatctaatcttttcagctctctccatcgtcgtcgtatctgtgactctcgtgatcatcgcctgaaaaaaatttgagataatggccagaaagttcttcgtcggaggcaactggaaatgtaacggaactgctgaggaggtgaagaagattgtgaacactcttaatgaagctcaggttccttcacaggatgttgtagaggttgtggttagccctccatatgtttttcttcccctggttaagagcacattgaggtctgacttttttgttgcggcacaaaactgttgggttaagaaaggaggtgctttcactggtgaagtgagtgcggagatgcttgtgaacttggatattccatgggttatccttggtcactctgaaaggagggcaatccttaatgaatcaagcgagttcgtcggagacaaggttgcctatgcacttgctcaaggtttgaaagtgattgcttgtgttggtgagactcttgaggagcgggaagctggatcgaccatggatgttgtggctgcccagaccaaggctattgccgatcgggtgacaaactggtcaaatgttgtcatagcctatgaaccagtgtgggccattggaaccggaaaggtcgctagcccagcccaagctcaagaagtacacgatgagctgaggaaatggctggccaagaacgtgagtgctgatgtcgctgctacaacccgcatcatttatggaggatccgtcaatggtggtaactgcaaggagctaggtggacaggccgatgttgatggtttcttggtcggtggtgcttctctaaagcctgagtttatcgacatcattaaggccgcagaggtgaagaaaagtgcctaatgagctcattaagcaatttaaaagtcctttgcttttccagtcgcaactctgaaaaaatgaataagttggtattatgatatgatacattttgcttcagttgtatttggcaaaagtttctctcttactatattgttttgagaacgcaacaatcattttcttcgccatttatttagctgtggacttgcaatttgcaaatcccttcctttt

SEQ ID NO: 22595 - protein, 254 aa, Arabidopsis thaliana; identical to SEQ ID NO: 21075
  peptide (1)..(254): Ceres Seq. ID no. 13613505

SEQ ID NO: 22596 - protein, 172 aa, Arabidopsis thaliana; identical to SEQ ID NO: 21076
  peptide (1)..(172): Ceres Seq. ID no. 13613506

SEQ ID NO: 22597 - DNA, 1465 bp, Arabidopsis thaliana
  misc_feature (1)..(1465): Ceres Seq. ID no. 12423211
  misc_feature (1)..(1465): Ortholog of  Ceres SEQ ID NO 14314464 as cited in SEQ ID NO 52405
  misc_feature (1)..(1465): Ortholog of  Ceres SEQ ID NO 15177592 as cited in SEQ ID NO 58436
  misc_feature (1)..(1465): Ortholog of  Ceres SEQ ID NO 13655251 as cited in SEQ ID NO 62888
  misc_feature (1)..(1465): Ortholog of  Ceres SEQ ID NO 13597194 as cited in SEQ ID NO 63661
  misc_feature (1)..(1465): Ortholog of  Ceres SEQ ID NO 14302883 as cited in SEQ ID NO 66384
  misc_feature (1)..(1465): Ortholog of  Ceres SEQ ID NO 13662855 as cited in SEQ ID NO 69059
atcgagtgtctcgcccagcttcttcagtcttcaccacataatattaataaaaagcattttcttctttcgattgcttcagattcgtcagctcactctttcctctccagaagaaaccctagacatctcatcgccaaaatgttcagatctatgctcgtccgatcttctgcctccgcgaagcaggcggttatccgccgtagcttctcctccggctccgtccccgagcgtaaagtcgccatccttggtgccgccggtggaattggtcagcctcttgctctcctcatgaagcttaatcctcttgtctcttccctctccctctacgatatcgctaacactcctggagttgctgctgatgttggtcacatcaacaccagatctgaggttgttggatacatgggcgatgataacttggccaaagctcttgaaggagctgatctcgttatcattccagctggtgtaccaaggaagcctggtatgacccgtgacgatcttttcaacattaatgctggaattgtcaagaacctttgcactgccatcgccaagtactgcccacatgcgcttattaatatgatcagcaaccctgtgaactctactgttccaattgcagctgagatatttaagaaggctggtatgtacgatgaaaagaaattgtttggtgttaccactcttgacgtcgtcagggccaggactttctatgctggaaaggcaaatgtcccagttgcagaagttaatgttccggtgattggtggtcatgctggggttactattctccctctcttctctcaggcaactcctcaagccaacttgtcaagtgacatacttaccgcccttactaagcgtacccaagatggaggtacagaagtcgtggaggcaaaagcaggaaaaggttcagctacattgtccatggcctatgccggagcattgttcgctgatgcatgcttgaaaggactcaacggtgttccagatgtcatagaatgctcatacgtgcaatctacaatcaccgagcttcctttctttgcctcgaaggtgaggttggggaagaatggtgtggaggaggttcttgacttgggaccactctcagactttgagaaggaaggcttggaagcattgaagccagaactcaagtcctccatagaaaagggagtcaagtttgccaaccagtgattaaaccgagtttactcggtaatttttccaattttccagctagagttgccacctcctccttcatcgggttgtatcaataaaaaatccatgtttgtgcctccattagtgaaaccataaggctctttttggttaatcaccaaactcaaagaaaaactgtaacatgtcaaagttgtaattctttcttcctttttggaaccatgcgacttttttttcatgaacaagagatcataagtgtgggttggttcctttttaatgctgcgtctgtgtcaccatactttctgtttctcagatattactttcttct

SEQ ID NO: 22598 - protein, 386 aa, Arabidopsis thaliana
  peptide (1)..(386): Ceres Seq. ID no. 12423212
IECLAQLLQSSPHNINKKHFLLSIASDSSAHSFLSRRNPRHLIAKMFRSMLVRSSASAKQAVIRRSFSSGSVPERKVAILGAAGGIGQPLALLMKLNPLVSSLSLYDIANTPGVAADVGHINTRSEVVGYMGDDNLAKALEGADLVIIPAGVPRKPGMTRDDLFNINAGIVKNLCTAIAKYCPHALINMISNPVNSTVPIAAEIFKKAGMYDEKKLFGVTTLDVVRARTFYAGKANVPVAEVNVPVIGGHAGVTILPLFSQATPQANLSSDILTALTKRTQDGGTEVVEAKAGKGSATLSMAYAGALFADACLKGLNGVPDVIECSYVQSTITELPFFASKVRLGKNGVEEVLDLGPLSDFEKEGLEALKPELKSSIEKGVKFANQ

SEQ ID NO: 22599 - protein, 341 aa, Arabidopsis thaliana
  peptide (1)..(341): Ceres Seq. ID no. 12423213
MFRSMLVRSSASAKQAVIRRSFSSGSVPERKVAILGAAGGIGQPLALLMKLNPLVSSLSLYDIANTPGVAADVGHINTRSEVVGYMGDDNLAKALEGADLVIIPAGVPRKPGMTRDDLFNINAGIVKNLCTAIAKYCPHALINMISNPVNSTVPIAAEIFKKAGMYDEKKLFGVTTLDVVRARTFYAGKANVPVAEVNVPVIGGHAGVTILPLFSQATPQANLSSDILTALTKRTQDGGTEVVEAKAGKGSATLSMAYAGALFADACLKGLNGVPDVIECSYVQSTITELPFFASKVRLGKNGVEEVLDLGPLSDFEKEGLEALKPELKSSIEKGVKFANQ

SEQ ID NO: 22600 - protein, 337 aa, Arabidopsis thaliana
  peptide (1)..(337): Ceres Seq. ID no. 12423214
MLVRSSASAKQAVIRRSFSSGSVPERKVAILGAAGGIGQPLALLMKLNPLVSSLSLYDIANTPGVAADVGHINTRSEVVGYMGDDNLAKALEGADLVIIPAGVPRKPGMTRDDLFNINAGIVKNLCTAIAKYCPHALINMISNPVNSTVPIAAEIFKKAGMYDEKKLFGVTTLDVVRARTFYAGKANVPVAEVNVPVIGGHAGVTILPLFSQATPQANLSSDILTALTKRTQDGGTEVVEAKAGKGSATLSMAYAGALFADACLKGLNGVPDVIECSYVQSTITELPFFASKVRLGKNGVEEVLDLGPLSDFEKEGLEALKPELKSSIEKGVKFANQ

SEQ ID NO: 22601 - DNA, 1067 bp, Arabidopsis thaliana
  misc_feature (1)..(1067): Ceres Seq. ID no. 12393102
  misc_feature (1)..(1067): Ortholog of  Ceres SEQ ID NO 15226473 as cited in SEQ ID NO 50919
  misc_feature (1)..(1067): Ortholog of  Ceres SEQ ID NO 13639704 as cited in SEQ ID NO 51325
  misc_feature (1)..(1067): Ortholog of  Ceres SEQ ID NO 13661747 as cited in SEQ ID NO 60578
  misc_feature (1)..(1067): Ortholog of  Ceres SEQ ID NO 13661672 as cited in SEQ ID NO 61462
  misc_feature (1)..(1067): Ortholog of  Ceres SEQ ID NO 13599646 as cited in SEQ ID NO 0
ttttcataacttaatcacacacaaggagagaagagagaaagagagaaagagagacagagataatggcgtacagtgcgtgtttcctacaccagagcgcattggcttcatcagccgcacgatcatcatcttcctcctcatcccagcgtcacgtgtcgctctccaaacctgttcagatcatctgtaaagctcaacagtctcatgaagacgataactccgccgtctcccgccgtcttgctctcactctcctcgtcggcgccgctgctgttggttccaaagtatctcctgctgatgccgcctacggtgaagctgcaaacgtgtttgggaagccaaagacgaacacagacttcttgccatacaatggagatgggttcaaagtgcaggttccagcaaaatggaacccaagcaaagagattgagtatccaggacaagtccttaggttcgaagacaacttcgatgctactagcaatctcaatgtcatggtcactcctaccgacaagaagtccatcactgattacggttctcccgaagagttcctctctcaggttaattacctcctagggaaacaagcttacttcggtgagactgcctctgagggaggctttgacaacaatgcagtggcaacagcaaacattctggagtcatcatctcaggaagttggtgggaaaccctactattacttgtctgtgttgacaagaacggctgatggagacgaaggtgggaagcatcagctgatcacagcaaccgtgaatggagggaagctttacatctgcaaagcacaagctggagacaagaggtggttcaagggagccaggaaatttgtcgagagcgcagccacttctttcagtgttgcttgagtgaaagcaacacaacgtaacaatgctctgcttgctttcttcatttgtctcttgtaaaaaatggaaaatgaaactgagcttttgagaactatcaagatgatgttaccttttcggcatcacttgtgtacctatgataccagactcgtttccaagttttcttaaaaaacaactatattcaatagatattttctcaaattaataagatattgactc

SEQ ID NO: 22602 - protein, 263 aa, Arabidopsis thaliana
  peptide (1)..(263): Ceres Seq. ID no. 12393103
MAYSACFLHQSALASSAARSSSSSSSQRHVSLSKPVQIICKAQQSHEDDNSAVSRRLALTLLVGAAAVGSKVSPADAAYGEAANVFGKPKTNTDFLPYNGDGFKVQVPAKWNPSKEIEYPGQVLRFEDNFDATSNLNVMVTPTDKKSITDYGSPEEFLSQVNYLLGKQAYFGETASEGGFDNNAVATANILESSSQEVGGKPYYYLSVLTRTADGDEGGKHQLITATVNGGKLYICKAQAGDKRWFKGARKFVESAATSFSVA

SEQ ID NO: 22603 - DNA, 1829 bp, Arabidopsis thaliana
  misc_feature (1)..(1829): Ceres Seq. ID no. 12422940
  misc_feature (1)..(1829): Ortholog of  Ceres SEQ ID NO 13594037 as cited in SEQ ID NO 55666
  misc_feature (1)..(1829): Ortholog of  Ceres SEQ ID NO 13657707 as cited in SEQ ID NO 66407
aacacaaagaatcattttacctctaaagccaaagaccaacatgtctaattcaaaccaaccacttctttccaaaccaaagtctcttaagcacaagaatctatgccttgtcctctccttcgtagccattcttggctctgtggctttcttcacagcccaattaatctccgttaacaccaacaataatgatgattccttattaactacgagccagatttgccatggagctcacgaccaagactcatgccaagctctcttgtccgaattcacgacgttgtcgctctcaaagctcaaccgccttgacctattgcacgtgtttttgaagaactcggtgtggcggcttgagagcacgatgaccatggtgagcgaggctaggatccgctcgaacggtgttagagacaaggcaggttttgctgactgcgaggagatgatggacgtatcaaaggatcggatgatgagttcgatggaggaacttcgcggaggaaactataatcttgagtcatactcaaacgttcatacttggctgagcagtgtgcttacaaactacatgacatgtttagaaagtattagtgatgtctccgtcaactctaagcaaatagtcaagccacaactcgaggacttggtttctagggcaagagtggctctagccatctttgtctccgtcttgcctgccagagacgatctcaaaatgatcatttccaatcgcttcccgtcgtggctaactgctcttgacagaaagcttttagaatcttctcccaagacacttaaggtgaccgcgaacgttgtggtggcaaaagacggcaccggaaagttcaaaacagtgaatgaggcagtggcggcagcaccggagaacagcaatacaagatacgttatatacgtaaagaaaggggtttacaaagaaactattgacataggaaagaaaaagaagaacttaatgcttgttggtgatggcaaagacgcaacgatcataaccggtagtttgaatgtcattgatggatccaccaccttcagatcagccactgttgctgccaatggagacgggtttatggcacaagacatatggttccaaaacactgcagggccggcaaagcaccaggctgtggctctacgagtgagtgctgatcaaactgttataaatcgttgtcgcatagatgcgtatcaagacacgctctacactcacacgttgagacaattctaccgcgacagctacatcaccggtaccgtagatttcatcttcggaaactctgctgtggtattccagaactgcgacatcgtggcacgaaatcctggagctgggcaaaagaacatgttaacggctcaaggacgggaggatcagaaccagaacaccgccatttcgatccaaaaatgtaagataacggctagttcggatcttgctcctgtaaaaggatctgtgaaaacgttccttggtcgaccgtggaagttgtactcaagaacagtgatcatgcagtctttcattgacaaccacattgacccggctggttggttcccatgggatggtgagtttgcgctctccacattgtattatggagagtatgcaaataccggtcctggagcggatacgagtaagagagtgaattggaagggatttaaagttattaaagactcaaaagaggccgaacaattcactgtggcgaagcttattcaaggaggattatggttgaaacccactggagttactttccaagagtggctttgattttaatgtctacttgttcttgtactttgtgttgtgttacctctgttttagtttgatgtattttttctggtttgttttgtatgacttacccaataaataacatgctctgtttcgc

SEQ ID NO: 22604 - protein, 570 aa, Arabidopsis thaliana
  peptide (1)..(570): Ceres Seq. ID no. 12422941
TQRIILPLKPKTNMSNSNQPLLSKPKSLKHKNLCLVLSFVAILGSVAFFTAQLISVNTNNNDDSLLTTSQICHGAHDQDSCQALLSEFTTLSLSKLNRLDLLHVFLKNSVWRLESTMTMVSEARIRSNGVRDKAGFADCEEMMDVSKDRMMSSMEELRGGNYNLESYSNVHTWLSSVLTNYMTCLESISDVSVNSKQIVKPQLEDLVSRARVALAIFVSVLPARDDLKMIISNRFPSWLTALDRKLLESSPKTLKVTANVVVAKDGTGKFKTVNEAVAAAPENSNTRYVIYVKKGVYKETIDIGKKKKNLMLVGDGKDATIITGSLNVIDGSTTFRSATVAANGDGFMAQDIWFQNTAGPAKHQAVALRVSADQTVINRCRIDAYQDTLYTHTLRQFYRDSYITGTVDFIFGNSAVVFQNCDIVARNPGAGQKNMLTAQGREDQNQNTAISIQKCKITASSDLAPVKGSVKTFLGRPWKLYSRTVIMQSFIDNHIDPAGWFPWDGEFALSTLYYGEYANTGPGADTSKRVNWKGFKVIKDSKEAEQFTVAKLIQGGLWLKPTGVTFQEWL

SEQ ID NO: 22605 - protein, 557 aa, Arabidopsis thaliana
  peptide (1)..(557): Ceres Seq. ID no. 12422942
MSNSNQPLLSKPKSLKHKNLCLVLSFVAILGSVAFFTAQLISVNTNNNDDSLLTTSQICHGAHDQDSCQALLSEFTTLSLSKLNRLDLLHVFLKNSVWRLESTMTMVSEARIRSNGVRDKAGFADCEEMMDVSKDRMMSSMEELRGGNYNLESYSNVHTWLSSVLTNYMTCLESISDVSVNSKQIVKPQLEDLVSRARVALAIFVSVLPARDDLKMIISNRFPSWLTALDRKLLESSPKTLKVTANVVVAKDGTGKFKTVNEAVAAAPENSNTRYVIYVKKGVYKETIDIGKKKKNLMLVGDGKDATIITGSLNVIDGSTTFRSATVAANGDGFMAQDIWFQNTAGPAKHQAVALRVSADQTVINRCRIDAYQDTLYTHTLRQFYRDSYITGTVDFIFGNSAVVFQNCDIVARNPGAGQKNMLTAQGREDQNQNTAISIQKCKITASSDLAPVKGSVKTFLGRPWKLYSRTVIMQSFIDNHIDPAGWFPWDGEFALSTLYYGEYANTGPGADTSKRVNWKGFKVIKDSKEAEQFTVAKLIQGGLWLKPTGVTFQEWL

SEQ ID NO: 22606 - protein, 454 aa, Arabidopsis thaliana
  peptide (1)..(454): Ceres Seq. ID no. 12422943
MTMVSEARIRSNGVRDKAGFADCEEMMDVSKDRMMSSMEELRGGNYNLESYSNVHTWLSSVLTNYMTCLESISDVSVNSKQIVKPQLEDLVSRARVALAIFVSVLPARDDLKMIISNRFPSWLTALDRKLLESSPKTLKVTANVVVAKDGTGKFKTVNEAVAAAPENSNTRYVIYVKKGVYKETIDIGKKKKNLMLVGDGKDATIITGSLNVIDGSTTFRSATVAANGDGFMAQDIWFQNTAGPAKHQAVALRVSADQTVINRCRIDAYQDTLYTHTLRQFYRDSYITGTVDFIFGNSAVVFQNCDIVARNPGAGQKNMLTAQGREDQNQNTAISIQKCKITASSDLAPVKGSVKTFLGRPWKLYSRTVIMQSFIDNHIDPAGWFPWDGEFALSTLYYGEYANTGPGADTSKRVNWKGFKVIKDSKEAEQFTVAKLIQGGLWLKPTGVTFQEWL

SEQ ID NO: 22607 - DNA, 1124 bp, Arabidopsis thaliana
  misc_feature (1)..(1124): Ceres Seq. ID no. 12340331
  misc_feature (1)..(1124): Ortholog of  Ceres SEQ ID NO 14310460 as cited in SEQ ID NO 55105
  misc_feature (1)..(1124): Ortholog of  Ceres SEQ ID NO 15179888 as cited in SEQ ID NO 66879
  misc_feature (1)..(1124): Ortholog of  Ceres SEQ ID NO 13596056 as cited in SEQ ID NO 68307
  misc_feature (1)..(1124): Ortholog of  Ceres SEQ ID NO 12388689 as cited in SEQ ID NO 0
ataaaaagtagtactcgtgtcttactcgtgccagccactcgcatttctccagattttattatccttcctcgaaacaagtagatccacgattcgttgctgcgatcggcgttattatcgtcagctctctcgtttctgttctgtgagcttagctaagatgacgaagaactacccaaccgtgagcgaagattacaagaaagctgttgagaagtgcaggaggaagctcagaggtttgatcgctgagaagaactgtgcacccatcatggtccgactcgcatggcactctgctggaactttcgattgtcaatcaaggactggaggtccattcggaacaatgaggtttgacgctgagcaagctcatggagccaacagtggtatccacattgctcttaggttgttggaccccatcagggagcaattccctaccatctcttttgctgatttccatcagcttgctggtgttgtggccgttgaagttactggtggccctgacattcctttccaccctggaagagaggacaagccccaaccacctccagagggtcgtcttcctgatgctaccaagggttgtgaccatttgagagatgtctttgctaagcagatgggcttatctgacaaagacattgtcgctttatctggtgcccacactctgggacgatgccacaaggataggtctggcttcgaaggtgcatggacatcaaaccctctaatcttcgacaactcttacttcaaggaactcttgagcggagagaaggaaggccttcttcagcttgtctctgacaaagcactattggacgaccctgttttccgtcctttggtcgagaaatacgctgctgatgaagatgcctttttcgctgattacgctgaggcccacatgaagctttctgagcttgggtttgctgatgcttaagctgtgacgtatgctctgtgtgtgtgtgtgtgtctccccgagagtcatggctgtttttggttgggggctggaggggtcgcattgcatttgaactttgtcatatgattgcttaatgtactctcggatttacgtatctgtttttttcggtgggttgtgatttgaacacatccgttgcgcttttgctgcttagacacattaataaaattaatttctctcg

SEQ ID NO: 22608 - protein, 250 aa, Arabidopsis thaliana
  peptide (1)..(250): Ceres Seq. ID no. 12340332
MTKNYPTVSEDYKKAVEKCRRKLRGLIAEKNCAPIMVRLAWHSAGTFDCQSRTGGPFGTMRFDAEQAHGANSGIHIALRLLDPIREQFPTISFADFHQLAGVVAVEVTGGPDIPFHPGREDKPQPPPEGRLPDATKGCDHLRDVFAKQMGLSDKDIVALSGAHTLGRCHKDRSGFEGAWTSNPLIFDNSYFKELLSGEKEGLLQLVSDKALLDDPVFRPLVEKYAADEDAFFADYAEAHMKLSELGFADA

SEQ ID NO: 22609 - protein, 215 aa, Arabidopsis thaliana
  peptide (1)..(215): Ceres Seq. ID no. 12340333
MVRLAWHSAGTFDCQSRTGGPFGTMRFDAEQAHGANSGIHIALRLLDPIREQFPTISFADFHQLAGVVAVEVTGGPDIPFHPGREDKPQPPPEGRLPDATKGCDHLRDVFAKQMGLSDKDIVALSGAHTLGRCHKDRSGFEGAWTSNPLIFDNSYFKELLSGEKEGLLQLVSDKALLDDPVFRPLVEKYAADEDAFFADYAEAHMKLSELGFADA

SEQ ID NO: 22610 - protein, 191 aa, Arabidopsis thaliana
  peptide (1)..(191): Ceres Seq. ID no. 12340334
MRFDAEQAHGANSGIHIALRLLDPIREQFPTISFADFHQLAGVVAVEVTGGPDIPFHPGREDKPQPPPEGRLPDATKGCDHLRDVFAKQMGLSDKDIVALSGAHTLGRCHKDRSGFEGAWTSNPLIFDNSYFKELLSGEKEGLLQLVSDKALLDDPVFRPLVEKYAADEDAFFADYAEAHMKLSELGFADA

SEQ ID NO: 22611 - DNA, 1431 bp, Arabidopsis thaliana
  misc_feature (1)..(1431): Ceres Seq. ID no. 12396135
  misc_feature (1)..(1431): Ortholog of  Ceres SEQ ID NO 15177012 as cited in SEQ ID NO 56256
  misc_feature (1)..(1431): Ortholog of  Ceres SEQ ID NO 14311993 as cited in SEQ ID NO 60371
  misc_feature (1)..(1431): Ortholog of  Ceres SEQ ID NO 13596509 as cited in SEQ ID NO 62004
  misc_feature (1)..(1431): Ortholog of  Ceres SEQ ID NO 13500385 as cited in SEQ ID NO 67583
attttattttctcgaatcttcttcttcttcctagattccagcgacttaacaacaacaacaacaacatattctctgctgggtattagattcgaatttctctttttgtgatcagaaatggatcgagctccggtgaccacaggaccgttggatatgccgattatgcacgacagtgatcgatatgacttcgttaaggatattggttctggtaatttcggtgttgctcgtcttatgagagataaactcactaaagagcttgttgctgtcaagtacatcgagagaggagacaagattgatgaaaatgttcaaagggagatcattaaccacaggtcactaaggcatcctaatattgtcagatttaaagaggtcattttgacgccgactcatctggctatcataatggaatatgcttctggcggtgaactttacgagcggatttgcaatgcaggacggtttagtgaagatgaggctcggttcttctttcagcagcttctatctggagtcagttattgtcatgcgatgcaaatttgccatcgtgacctgaagctagagaatacattgttggatggaagtcctgctcctcgattaaaaatttgtgattttggatattcaaagtcttctgttcttcattcacaaccaaagtcaactgttggtactcctgcatacatcgctccagaggtactgcttcgtcaggaatatgatggcaagattgcagatgtatggtcatgtggtgtgaccttatacgtcatgttggttggagcgtatccgttcgaagatccagaagagccaagagactatcggaaaacaatacagagaatccttagcgttaaatactcaatccctgatgacatacggatatcacctgaatgctgtcatcttatttcaagaatcttcgtggctgatcccgctaccagaataagcataccagagatcaaaacccatagttggttcttgaagaatctccctgctgatctaatgaacgagagcaacacaggaagccagttccaggagcctgaacaaccaatgcaaagccttgacacaatcatgcaaatcatctctgaagccacaattcccgctgttcgaaaccgttgcctagacgatttcatgactgacaatcttgatcttgacgatgacatggatgactttgactctgaatctgaaatcgacattgacagtagcggagagatagtttacgctctctaataaaaagccttttttaacaaccaaaacacttctctatctgttctaagaccagtagtgttctgatcctctggtttcaaattctaccaatttttgtattgtctctgtttgtttcttgttttcttcatgcacacatatatcatatatgtaatgtaaaatatcatctgtgtatatatattccaatgtcacacaaaagcaaattagcagttaaaacagttgaagcaagttgaggtc

SEQ ID NO: 22612 - protein, 361 aa, Arabidopsis thaliana
  peptide (1)..(361): Ceres Seq. ID no. 12396136
MDRAPVTTGPLDMPIMHDSDRYDFVKDIGSGNFGVARLMRDKLTKELVAVKYIERGDKIDENVQREIINHRSLRHPNIVRFKEVILTPTHLAIIMEYASGGELYERICNAGRFSEDEARFFFQQLLSGVSYCHAMQICHRDLKLENTLLDGSPAPRLKICDFGYSKSSVLHSQPKSTVGTPAYIAPEVLLRQEYDGKIADVWSCGVTLYVMLVGAYPFEDPEEPRDYRKTIQRILSVKYSIPDDIRISPECCHLISRIFVADPATRISIPEIKTHSWFLKNLPADLMNESNTGSQFQEPEQPMQSLDTIMQIISEATIPAVRNRCLDDFMTDNLDLDDDMDDFDSESEIDIDSSGEIVYAL

SEQ ID NO: 22613 - protein, 349 aa, Arabidopsis thaliana
  peptide (1)..(349): Ceres Seq. ID no. 12396137
MPIMHDSDRYDFVKDIGSGNFGVARLMRDKLTKELVAVKYIERGDKIDENVQREIINHRSLRHPNIVRFKEVILTPTHLAIIMEYASGGELYERICNAGRFSEDEARFFFQQLLSGVSYCHAMQICHRDLKLENTLLDGSPAPRLKICDFGYSKSSVLHSQPKSTVGTPAYIAPEVLLRQEYDGKIADVWSCGVTLYVMLVGAYPFEDPEEPRDYRKTIQRILSVKYSIPDDIRISPECCHLISRIFVADPATRISIPEIKTHSWFLKNLPADLMNESNTGSQFQEPEQPMQSLDTIMQIISEATIPAVRNRCLDDFMTDNLDLDDDMDDFDSESEIDIDSSGEIVYAL

SEQ ID NO: 22614 - protein, 346 aa, Arabidopsis thaliana
  peptide (1)..(346): Ceres Seq. ID no. 12396138
MHDSDRYDFVKDIGSGNFGVARLMRDKLTKELVAVKYIERGDKIDENVQREIINHRSLRHPNIVRFKEVILTPTHLAIIMEYASGGELYERICNAGRFSEDEARFFFQQLLSGVSYCHAMQICHRDLKLENTLLDGSPAPRLKICDFGYSKSSVLHSQPKSTVGTPAYIAPEVLLRQEYDGKIADVWSCGVTLYVMLVGAYPFEDPEEPRDYRKTIQRILSVKYSIPDDIRISPECCHLISRIFVADPATRISIPEIKTHSWFLKNLPADLMNESNTGSQFQEPEQPMQSLDTIMQIISEATIPAVRNRCLDDFMTDNLDLDDDMDDFDSESEIDIDSSGEIVYAL

SEQ ID NO: 22615 - DNA, 1213 bp, Arabidopsis thaliana
  misc_feature (1)..(1213): Ceres Seq. ID no. 12334662
  misc_feature (1)..(1213): Ortholog of  Ceres SEQ ID NO 14306201 as cited in SEQ ID NO 59956
atccacttctctctcaccatctcacgtccgatctctcctctctgagctctcatcacgagtcaacccctttctccgtcgaaattcgcatgcttaaactctgagagaagaagatgactatgacggaggagaaaccaacttccgacggcaaaggaggttggggtttcttcaagattccatttcgtaactcaagcggtcacagaaacgccgcttcaagtgctgctacttctccgtttccatctggagcttcttcttcttctacttcttctcatctacataaccatcatcaacatcatcatcaacatcaccatcagcaccatcatcagcttggttataacggtcctcacggtgatggatcgggtcaaaatcaacatccgactccttctccttcagtttcatctgttgctaagtcttttcttcctactaaacgaagattgaagcttgatccttctgagaaactctattttccttatgagcctgggaagcaagttaggagtgctattaagattaaaaatacaagcaaatcacatgtagccttcaagtttcaaacaactgcgccgaagagttgctttatgcgtccacctggtgctattcttgctcctggagagactattattgctactgtgtttaaatttgttgagcctcctgagaataatgagaagccaatggatcaaaggagcagagtgaagtttaaaatcatgagcctgaaggtgaaaggtccaatggactatgtgcctgagctgttcgatgagcaaaaggatgatgtctctaaggagcaaatattgcgtgtgattttcttggatcctgagcgctccaaccctgcattggaaaaactgaagcgtcaattagcagaagcggatgcagcggtggaggcacgaaagaaacctccagaggaaacaggtccaaagatgattggagaagggcttgtgatcgatgaatggaaggagcgtagagagagatatcttgcacagcaacaaggcgaaggagctgactctgtctgagagactaaaagagttttctcaggacaaaaacaagtgcgcttgtgaagatgaagaagaagggaccgctatattgaatttatatgctaacttctagattcatgatgcaatatataaggatcatgctggtaaaaaaaaaagacaatgaaggaaacttttttcatgtaaaaaagaaatgtaaacttgggtttgatgataatgaattgttcatgttaagg

SEQ ID NO: 22616 - protein, 295 aa, Arabidopsis thaliana
  peptide (1)..(295): Ceres Seq. ID no. 12334663
MTMTEEKPTSDGKGGWGFFKIPFRNSSGHRNAASSAATSPFPSGASSSSTSSHLHNHHQHHHQHHHQHHHQLGYNGPHGDGSGQNQHPTPSPSVSSVAKSFLPTKRRLKLDPSEKLYFPYEPGKQVRSAIKIKNTSKSHVAFKFQTTAPKSCFMRPPGAILAPGETIIATVFKFVEPPENNEKPMDQRSRVKFKIMSLKVKGPMDYVPELFDEQKDDVSKEQILRVIFLDPERSNPALEKLKRQLAEADAAVEARKKPPEETGPKMIGEGLVIDEWKERRERYLAQQQGEGADSV

SEQ ID NO: 22617 - protein, 293 aa, Arabidopsis thaliana
  peptide (1)..(293): Ceres Seq. ID no. 12334664
MTEEKPTSDGKGGWGFFKIPFRNSSGHRNAASSAATSPFPSGASSSSTSSHLHNHHQHHHQHHHQHHHQLGYNGPHGDGSGQNQHPTPSPSVSSVAKSFLPTKRRLKLDPSEKLYFPYEPGKQVRSAIKIKNTSKSHVAFKFQTTAPKSCFMRPPGAILAPGETIIATVFKFVEPPENNEKPMDQRSRVKFKIMSLKVKGPMDYVPELFDEQKDDVSKEQILRVIFLDPERSNPALEKLKRQLAEADAAVEARKKPPEETGPKMIGEGLVIDEWKERRERYLAQQQGEGADSV

SEQ ID NO: 22618 - DNA, 1276 bp, Arabidopsis thaliana
  misc_feature (1)..(1276): Ceres Seq. ID no. 13492437
  misc_feature (1)..(1276): Ortholog of  Ceres SEQ ID NO 13598495 as cited in SEQ ID NO 63939
acttatacctcactgacttactacaaatcagatatgtggaagattgggcagagaggagttccctatttccagagactcattgctgcgccgttcacgaccttgcggtccttgccaacttctttggtcgagacagggcagaaccgtgtcattgatgcttcgttaactctcatccgtgaaagggcaaaactcaaaggagagttagtgcgactcataggaggagcaaaagctacaacagctcttcttggagtaccacttggtcacaactcttcttttcttgaaggcccagccttggctcctcctcatgtaagggaagctatttggtgtggtagtacaaactccaccactgaagaagggaaggagctaaaagatccacgtgttctaagtgatgttggtgatattccggtacaagagattagagaaatgggggttgatgatgatagacttatgaaagtagtaagtgaatctgtgaagctggtgatggaagaggaaccattgcgcccgctggtcataggtggagaccattccatatcttatcctgttgtgagagctgtttcggagaaacttggaggacccgtggatattcttcatcttgatgcacatcccgatatatatgaccgttttgaaggcaattattactctcatgcatcttcttttgctcgtatcatggaaggtggctatgcgcggcggcttttacaggttgggatcagatccataaacaaagaaggacgggaacaaggcaagaggtttggagtagaacagtatgagatgcgaaccttctcaaaagatcgccaaatgttggaaaacttgaaactaggggaaggagtgaagggcgtgtatatctcgatcgatgttgactgtctcgatccgggattcgcgcacggagtgtcccacttcgaaccaggaggtctttctttccgagacgtccttaacatattacacaaccttcagggagatttggtgggggctgatgttgttgagtacaatccacagcgtgataccgctgatgacatgacggcaatggtcgcggctaagtttgttagagagctagccgcaaaaatgtcaaaatgaatttaaatggtactttggagtttaatcgttgaagcttgtaatatgcaataagtgtggtctcatagacatggtatcgaataagcttaatatcaattgggtttttaggcccaaatatcaatgtataatttattaaattatgataagatgcattgtaataagttgtaaaaataatttatcatattgcaatatatgtaaacattaatttagc

SEQ ID NO: 22619 - protein, 355 aa, Arabidopsis thaliana
  peptide (1)..(355): Ceres Seq. ID no. 13492438
TYTSLTYYKSDMWKIGQRGVPYFQRLIAAPFTTLRSLPTSLVETGQNRVIDASLTLIRERAKLKGELVRLIGGAKATTALLGVPLGHNSSFLEGPALAPPHVREAIWCGSTNSTTEEGKELKDPRVLSDVGDIPVQEIREMGVDDDRLMKVVSESVKLVMEEEPLRPLVIGGDHSISYPVVRAVSEKLGGPVDILHLDAHPDIYDRFEGNYYSHASSFARIMEGGYARRLLQVGIRSINKEGREQGKRFGVEQYEMRTFSKDRQMLENLKLGEGVKGVYISIDVDCLDPGFAHGVSHFEPGGLSFRDVLNILHNLQGDLVGADVVEYNPQRDTADDMTAMVAAKFVRELAAKMSK

SEQ ID NO: 22620 - protein, 344 aa, Arabidopsis thaliana
  peptide (1)..(344): Ceres Seq. ID no. 13492439
MWKIGQRGVPYFQRLIAAPFTTLRSLPTSLVETGQNRVIDASLTLIRERAKLKGELVRLIGGAKATTALLGVPLGHNSSFLEGPALAPPHVREAIWCGSTNSTTEEGKELKDPRVLSDVGDIPVQEIREMGVDDDRLMKVVSESVKLVMEEEPLRPLVIGGDHSISYPVVRAVSEKLGGPVDILHLDAHPDIYDRFEGNYYSHASSFARIMEGGYARRLLQVGIRSINKEGREQGKRFGVEQYEMRTFSKDRQMLENLKLGEGVKGVYISIDVDCLDPGFAHGVSHFEPGGLSFRDVLNILHNLQGDLVGADVVEYNPQRDTADDMTAMVAAKFVRELAAKMSK

SEQ ID NO: 22621 - protein, 215 aa, Arabidopsis thaliana
  peptide (1)..(215): Ceres Seq. ID no. 13492440
MGVDDDRLMKVVSESVKLVMEEEPLRPLVIGGDHSISYPVVRAVSEKLGGPVDILHLDAHPDIYDRFEGNYYSHASSFARIMEGGYARRLLQVGIRSINKEGREQGKRFGVEQYEMRTFSKDRQMLENLKLGEGVKGVYISIDVDCLDPGFAHGVSHFEPGGLSFRDVLNILHNLQGDLVGADVVEYNPQRDTADDMTAMVAAKFVRELAAKMSK

SEQ ID NO: 22622 - DNA, 707 bp, Arabidopsis thaliana
  misc_feature (1)..(707): Ceres Seq. ID no. 12322487
  misc_feature (1)..(707): Ortholog of  Ceres SEQ ID NO 15174240 as cited in SEQ ID NO 61866
  misc_feature (1)..(707): Ortholog of  Ceres SEQ ID NO 13596039 as cited in SEQ ID NO 62117
tttcttctcaccacttaaagagtttccccagaaattttcttccgccgtaaaagcaaaaaaagatgcagatcttcgtgaaaaccctaacggggaagacgatcactctcgaggtcgagtcctctgacaccatcgacaatgtcaaggccaagatccaagacaaggaaggaatcccaccggaccagcagcgattgattttcgccggaaagcagctcgaagacggacgtaccttagccgattacaacatccagaaggaatcaacgcttcaccttgtccttcgtctccgtggaggtgctaagaagaggaagaagaagacctacaccaagcctaagaagatcaagcacaagcacaagaaggtcaagctcgctgttcttcagttctacaaggttgatggttcaggtaaggttcagcgtttgaggaaggagtgccctaacgcaacctgtggtgctgggactttcatggcgagtcatttcgatcgtcactactgtggtaagtgtggtctcacctacgtttaccagaaagaaggagctcaggaatgattttcatctcgatctctatcattttgaattgaatactgctttttttttggaatttggaagttgtttttggatgttgtggatcttatgttgaacttgtttgaatttcatatctaggtttttcttatggatatttttatgctctttatttgaattactttcaaatcttattgc

SEQ ID NO: 22623 - protein, 157 aa, Arabidopsis thaliana
  peptide (1)..(157): Ceres Seq. ID no. 12322488
MQIFVKTLTGKTITLEVESSDTIDNVKAKIQDKEGIPPDQQRLIFAGKQLEDGRTLADYNIQKESTLHLVLRLRGGAKKRKKKTYTKPKKIKHKHKKVKLAVLQFYKVDGSGKVQRLRKECPNATCGAGTFMASHFDRHYCGKCGLTYVYQKEGAQE

SEQ ID NO: 22624 - DNA, 616 bp, Arabidopsis thaliana
  misc_feature (1)..(616): Ceres Seq. ID no. 12330185
  misc_feature (1)..(616): Ortholog of  Ceres SEQ ID NO 15173480 as cited in SEQ ID NO 63586
gcttaaagtctctggtcaaatgggaaatagtgtaagaagcaatctaagagacatcagaggacgacgatcgatggatcctcggatgtggcacaaagtcgccgctatttccggtatggctgctcttggtttgggaacttatggtgctcatgtctttaaaccagagaacccttcttacaaacaggtgtggcaaacggcttcactttaccatttggttcacactgctgctcttgtttctgctcctagcaccaaatatcccaacatttttggtggcttgttgactgctggaattgtagccttttccggcacgtgttatatggtagcgctgcgggaggacagaaagttttcgacattggcaccattcggaggctttgcgttcattgctgcatgggcaactttacttttctaaacaatctcataaccatctatattgtcaagtttgtggtcaagcttatcctacatatgaactcactgtttttttttgtttacctaagagattgcttaataacaattctgtgtcgacaaccattaagcatcttcctttacttgttcagtttgttgctaaagggattatgtaaatgacgaccatattaatgtaatcttattaccatacaattta

SEQ ID NO: 22625 - protein, 134 aa, Arabidopsis thaliana
  peptide (1)..(134): Ceres Seq. ID no. 12330186
LKVSGQMGNSVRSNLRDIRGRRSMDPRMWHKVAAISGMAALGLGTYGAHVFKPENPSYKQVWQTASLYHLVHTAALVSAPSTKYPNIFGGLLTAGIVAFSGTCYMVALREDRKFSTLAPFGGFAFIAAWATLLF

SEQ ID NO: 22626 - protein, 128 aa, Arabidopsis thaliana
  peptide (1)..(128): Ceres Seq. ID no. 12330187
MGNSVRSNLRDIRGRRSMDPRMWHKVAAISGMAALGLGTYGAHVFKPENPSYKQVWQTASLYHLVHTAALVSAPSTKYPNIFGGLLTAGIVAFSGTCYMVALREDRKFSTLAPFGGFAFIAAWATLLF

SEQ ID NO: 22627 - protein, 111 aa, Arabidopsis thaliana
  peptide (1)..(111): Ceres Seq. ID no. 12330188
MDPRMWHKVAAISGMAALGLGTYGAHVFKPENPSYKQVWQTASLYHLVHTAALVSAPSTKYPNIFGGLLTAGIVAFSGTCYMVALREDRKFSTLAPFGGFAFIAAWATLLF

SEQ ID NO: 22628 - DNA, 766 bp, Arabidopsis thaliana
  misc_feature (1)..(766): Ceres Seq. ID no. 12338430
  misc_feature (1)..(766): Ortholog of  Ceres SEQ ID NO 13662677 as cited in SEQ ID NO 63824
atggtaacgtgtctttttcattaggcgagactagccaatctaagcaaacagagtcgtctttatatctaaacgaacattttgtgaaagaaagagagactaaggtgaatccatggcgtccaagattgtctcagccatagtatttgtgtttaacctcattgcctttggtttagccgttgctgctgaacaaagaagaagcactgcaagggttgtgcaggacactgaggtgcaatataactactgtgtgtatgactcggacagagctacagggtatggagttggagcctttttgttctcagtggctagtcaaatccttatcatgctcgttagccgttgcttctgttgtggaaagcctctcaagcctggcggttcacgcgctcttgccctcattctcttcattgttagctggatgttcttcttgatagcggagatatgtctattagctggatcggtagagaatgcataccacacaaagtacaggacaatgttcatggacaatcctcctgattgtcaaactctacgtaaaggcgtctttgcagcaggcgcctcattcgtcttcttcaacgccattgtctctcagttctactatttcttctatttctctgctgctgaggcctctctttcaccttactagaggttcttaaccaacaaataagttttattttttttctctctaaatgtgctatttgatatgctaatatcatattttgaggtgggttttctatgtacaactatgatgaaatgttacaactatgacaaaattatttgg

SEQ ID NO: 22629 - protein, 173 aa, Arabidopsis thaliana
  peptide (1)..(173): Ceres Seq. ID no. 12338431
MASKIVSAIVFVFNLIAFGLAVAAEQRRSTARVVQDTEVQYNYCVYDSDRATGYGVGAFLFSVASQILIMLVSRCFCCGKPLKPGGSRALALILFIVSWMFFLIAEICLLAGSVENAYHTKYRTMFMDNPPDCQTLRKGVFAAGASFVFFNAIVSQFYYFFYFSAAEASLSPY

SEQ ID NO: 22630 - protein, 104 aa, Arabidopsis thaliana
  peptide (1)..(104): Ceres Seq. ID no. 12338432
MLVSRCFCCGKPLKPGGSRALALILFIVSWMFFLIAEICLLAGSVENAYHTKYRTMFMDNPPDCQTLRKGVFAAGASFVFFNAIVSQFYYFFYFSAAEASLSPY

SEQ ID NO: 22631 - DNA, 922 bp, Arabidopsis thaliana
  misc_feature (1)..(922): Ceres Seq. ID no. 12421023
  misc_feature (1)..(922): Ortholog of  Ceres SEQ ID NO 13594248 as cited in SEQ ID NO 57340
agtgccgagaaagataaacaaaatggcggcaatcagaacgatgacgaacatgattctacgcgagttcatccatcatccacttctccttcactcttcatcgaaatcgtgtcaatctcttttaccatgtctccgtctcactcccctaatttctccaattcaccctaattcccggttcgtatccgtccgatgtgcggcatcgacctccggtggaagcggtggtgatcggaaagtctcttcacggttgtcgcaggtgcaacagatgcttcatgaagccgaagagagagctagttccgctggcaatgagcctactcctcaaatcactctagacaatgttacacttaactttgctagaagtggtggtcctggaggccagaatgtgaacaaattgaataccaaagtagatatgcgcttcaatgttaagaacgcgtattggctgagtgacaggatcagagagaaaatcttactgacggagaagaatcggatcaacaaggatggtgaacttgtgatatcttcaaccaaaaccagaacgcagaaaggcaacatcgacgatgcacttgaaaaactacaggcgatcattgatgcggcttcttatgttccacctccaccatcagaagaacagaagaagaaaatagtaaagctggctgcgaaagctgacaataaacgacttaaaagcaaaaaagttctgtcagacaagaaatctgcgagaagaagccgcggtagttacgatgattaaacttaaaaccatacaatggagtccaggttgattctaaagcttttaacttaaaatgattgttattttcttggaatttaatgtaacacaacaatcaaatcatccaataaaaattgcagtatattggattttatgtacaaaccactcttatacaaattatgaacaaaaaaagtatcaaacataacattcctc

SEQ ID NO: 22632 - protein, 243 aa, Arabidopsis thaliana
  peptide (1)..(243): Ceres Seq. ID no. 12421024
VPRKINKMAAIRTMTNMILREFIHHPLLLHSSSKSCQSLLPCLRLTPLISPIHPNSRFVSVRCAASTSGGSGGDRKVSSRLSQVQQMLHEAEERASSAGNEPTPQITLDNVTLNFARSGGPGGQNVNKLNTKVDMRFNVKNAYWLSDRIREKILLTEKNRINKDGELVISSTKTRTQKGNIDDALEKLQAIIDAASYVPPPPSEEQKKKIVKLAAKADNKRLKSKKVLSDKKSARRSRGSYDD

SEQ ID NO: 22633 - protein, 236 aa, Arabidopsis thaliana
  peptide (1)..(236): Ceres Seq. ID no. 12421025
MAAIRTMTNMILREFIHHPLLLHSSSKSCQSLLPCLRLTPLISPIHPNSRFVSVRCAASTSGGSGGDRKVSSRLSQVQQMLHEAEERASSAGNEPTPQITLDNVTLNFARSGGPGGQNVNKLNTKVDMRFNVKNAYWLSDRIREKILLTEKNRINKDGELVISSTKTRTQKGNIDDALEKLQAIIDAASYVPPPPSEEQKKKIVKLAAKADNKRLKSKKVLSDKKSARRSRGSYDD

SEQ ID NO: 22634 - protein, 230 aa, Arabidopsis thaliana
  peptide (1)..(230): Ceres Seq. ID no. 12421026
MTNMILREFIHHPLLLHSSSKSCQSLLPCLRLTPLISPIHPNSRFVSVRCAASTSGGSGGDRKVSSRLSQVQQMLHEAEERASSAGNEPTPQITLDNVTLNFARSGGPGGQNVNKLNTKVDMRFNVKNAYWLSDRIREKILLTEKNRINKDGELVISSTKTRTQKGNIDDALEKLQAIIDAASYVPPPPSEEQKKKIVKLAAKADNKRLKSKKVLSDKKSARRSRGSYDD

SEQ ID NO: 22635 - DNA, 843 bp, Arabidopsis thaliana
  misc_feature (1)..(843): Ceres Seq. ID no. 13499553
  misc_feature (1)..(843): Ortholog of  Ceres SEQ ID NO 14316326 as cited in SEQ ID NO 55584
attggaggagagaatgagttggtctctctgcagcacccatggggtctcctcttccatagctctcacttatggctttcgccatagaagaagatccaccttccgtattttcgccacctctgacggattagaacccaaggacgacccgccggaatctcctctcccttcctcatcctctgctctcggtaaagacttgaaaaaggttgttaacaagactgctgcaacctttgcccctagagcttccaccgccagtaaaaaccctgctctccctggaactactctttacaaagtttttgaggttcaaggctatgcatcgatgttcctcggaggtgtcctttctttcaacctcctctttccctccagcgaacctgatttatggaggttgatgggcatgtggtccatttggatgttcactattccttctcttcgggcacgagactgtccaagtaaagagaaagaggctcttaactacctctttctcatcgtccccttgctcaatgttgctattcccttcttttggaaatcatttgctcttgtctggtctgctgacacggttgccttctttgctatgtatgcctggaagcttggatggctggaaagaacagagtagggactactcgtgaatcatgatgggattagagcatgaagattctttgtcttttcttccttagaatggtacttcattcagcttatcgtgttaggtacgtgggtttaaggcaaatgaatgtgaacattgctctagaatgatatatgaactagccccttaaggaatatttcttgtaaatcttaaagttctgagatgaattattgttcaaaatacaagtgggagtacatatacgttttgtt

SEQ ID NO: 22636 - protein, 201 aa, Arabidopsis thaliana
  peptide (1)..(201): Ceres Seq. ID no. 13499554
LEERMSWSLCSTHGVSSSIALTYGFRHRRRSTFRIFATSDGLEPKDDPPESPLPSSSSALGKDLKKVVNKTAATFAPRASTASKNPALPGTTLYKVFEVQGYASMFLGGVLSFNLLFPSSEPDLWRLMGMWSIWMFTIPSLRARDCPSKEKEALNYLFLIVPLLNVAIPFFWKSFALVWSADTVAFFAMYAWKLGWLERTE

SEQ ID NO: 22637 - protein, 197 aa, Arabidopsis thaliana
  peptide (1)..(197): Ceres Seq. ID no. 13499555
MSWSLCSTHGVSSSIALTYGFRHRRRSTFRIFATSDGLEPKDDPPESPLPSSSSALGKDLKKVVNKTAATFAPRASTASKNPALPGTTLYKVFEVQGYASMFLGGVLSFNLLFPSSEPDLWRLMGMWSIWMFTIPSLRARDCPSKEKEALNYLFLIVPLLNVAIPFFWKSFALVWSADTVAFFAMYAWKLGWLERTE

SEQ ID NO: 22638 - DNA, 1035 bp, Arabidopsis thaliana
  misc_feature (1)..(1035): Ceres Seq. ID no. 13509220
  misc_feature (1)..(1035): Ortholog of  Ceres SEQ ID NO 13595072 as cited in SEQ ID NO 55971
accacccatttcttggcttacaacaacaaatcttaaacgttttactttgtgctgcactactcaacctcaatggccgcctcaacaatggctctctcctcccctgccttcgccggtaaggccgtcaagctttcccccgcggcatctgaagtccttggaagcggccgtgtgacaatgaggaagactgttgccaagccaaagggcccatcaggcagcccatggtacggatctgaccgtgtcaagtacttgggtccattctctggcgaatcaccgagctaccttaccggagagttccccggagactacggatgggacaccgccggactttcagctgaccccgagacattcgcaaggaaccgtgagctagaagttatccacagcaggtgggcaatgctcggagccctaggctgcgtcttccctgagcttttggctaggaacggagtcaagttcggagaggcggtttggttcaaggccggttcacagatcttcagcgatggagggctcgattacttgggaaaccctagcttagttcacgctcagagcattttggccatttgggccactcaagttatcttgatgggagctgttgaaggctacagagtcgcaggaaatgggccattgggagaggccgaggacttgctttaccccggtggcagcttcgacccattgggtcttgctaccgacccagaggctttcgcggagttgaaggtgaaggagctcaagaacggaagattggctatgttctctatgtttggattcttcgttcaagccattgtcactggtaagggaccgatagagaaccttgctgaccatttggccgatccagtcaacaacaacgcatgggccttcgcaaccaactttgttcccggaaagtgagccaagttttatcagtttgtattttgcttttctttcagtcttttgaattcgagtgagagacatgaggagaaagagaaggttgtatgtgatggtttgagactttcagatgtaaatttgcaagactttgtatgatttgtcattaatcaaactcatttttctcta

SEQ ID NO: 22639 - protein, 267 aa, Arabidopsis thaliana
  peptide (1)..(267): Ceres Seq. ID no. 13509221
MAASTMALSSPAFAGKAVKLSPAASEVLGSGRVTMRKTVAKPKGPSGSPWYGSDRVKYLGPFSGESPSYLTGEFPGDYGWDTAGLSADPETFARNRELEVIHSRWAMLGALGCVFPELLARNGVKFGEAVWFKAGSQIFSDGGLDYLGNPSLVHAQSILAIWATQVILMGAVEGYRVAGNGPLGEAEDLLYPGGSFDPLGLATDPEAFAELKVKELKNGRLAMFSMFGFFVQAIVTGKGPIENLADHLADPVNNNAWAFATNFVPGK

SEQ ID NO: 22640 - protein, 262 aa, Arabidopsis thaliana
  peptide (1)..(262): Ceres Seq. ID no. 13509222
MALSSPAFAGKAVKLSPAASEVLGSGRVTMRKTVAKPKGPSGSPWYGSDRVKYLGPFSGESPSYLTGEFPGDYGWDTAGLSADPETFARNRELEVIHSRWAMLGALGCVFPELLARNGVKFGEAVWFKAGSQIFSDGGLDYLGNPSLVHAQSILAIWATQVILMGAVEGYRVAGNGPLGEAEDLLYPGGSFDPLGLATDPEAFAELKVKELKNGRLAMFSMFGFFVQAIVTGKGPIENLADHLADPVNNNAWAFATNFVPGK

SEQ ID NO: 22641 - protein, 233 aa, Arabidopsis thaliana; identical to SEQ ID NO: 21214
  peptide (1)..(233): Ceres Seq. ID no. 13509223

SEQ ID NO: 22642 - DNA, 1076 bp, Arabidopsis thaliana
  misc_feature (1)..(1076): Ceres Seq. ID no. 13588829
  misc_feature (1)..(1076): Ortholog of  Ceres SEQ ID NO 14313662 as cited in SEQ ID NO 54162
  misc_feature (1)..(1076): Ortholog of  Ceres SEQ ID NO 14302123 as cited in SEQ ID NO 0
  misc_feature (1)..(1076): Ortholog of  Ceres SEQ ID NO 15179452 as cited in SEQ ID NO 0
aacacgagcttaccgattctcttcgtctcaacatttagggtttcagagatcggctgattttcacatccacaagtatggcgactcaaatcagcaagaagagaaagtttgtagcggatggtgtattctacgctgaattgaatgaggttctcacaagagagctagcagaggatggttactctggtgttgaggttagggttactccaatgaggactgagattatcatcagagctactcgtactcagaatgttcttggtgagaaggggaggagaattagggaattgacatctcttgtccagaagagattcaagtttccagttgacagtgttgagctctatgctgagaaggttaacaacagaggtctctgtgccattgctcaggctgagtctctacgttacaagcttctcggtggtcttgctgttcgcagggcctgttatggtgttttgagatttgttatggagagtggagctaagggatgtgaggtcatcgtgagtggaaagctccgtgctgcacgtgctaagtccatgaagttcaaggatggttacatggtttcatctggtcaaccaactaaggaatacatcgatgctgcagtgagacatgttttgctcagacagggggtgttgggaatcaaggtgaagatcatgcttgactgggaccctacgggcaaatcaggaccaaagacaccattgcctgatgttgtgatcattcatgctcctaaagatgatgttgtctactctgcacctgctcaggctgctgctccagttactcttgtgcaagaagctccactcacaaccgtagattaccctgagatgattcctccagtggcctagagaagaccttttttactattactccatgggattttgttctttttgttataacttttctacttttgacactctctagtcgtatctcttatatcctccaagcagacaagttttttctcatgttgtttcttaacctatgtcaagttttctggaggttgaatgcttttagttccatgatttttttgttcttaagactcgtaataagaaaaagaatgacgacaacaatgcctggtatttgatgttgttactttg

SEQ ID NO: 22643 - protein, 250 aa, Arabidopsis thaliana [sequence omitted]

SEQ ID NO: 22644 - protein, 207 aa, Arabidopsis thaliana
  peptide (1)..(207): Ceres Seq. ID no. 15220913
MRTEIIIRATRTQNVLGEKGRRIRELTSLVQKRFKFPVDSVELYAEKVNNRGLCAIAQAESLRYKLLGGLAVRRACYGVLRFVMESGAKGCEVIVSGKLRAARAKSMKFKDGYMVSSGQPTKEYIDAAVRHVLLRQGVLGIKVKIMLDWDPTGKSGPKTPLPDVVIIHAPKDDVVYSAPAQAAAPVTLVQEAPLTTVDYPEMIPPVA

SEQ ID NO: 22645 - DNA, 1710 bp, Arabidopsis thaliana
  misc_feature (1)..(1710): Ceres Seq. ID no. 13494221
  misc_feature (1)..(1710): Ortholog of  Ceres SEQ ID NO 13590904 as cited in SEQ ID NO 66072
tgaaccttgtagatggtatattctttgaggatattttgatttacttttacttgttcttttgagagagacttcaataaagtttaagtttatatcttttttttttctatttatatttccttgtccccatgtgatttcatttatccccttttcttggaatttacaagcttaatcaaccgagaggcatatcatcaataaggattaaacctgtgtggaaattttgttacaatctactctgtattgaaacttgtttcggtatagtttcctcgtatcaaaggttataccaccatctctctggtatcaggtttctgatcagaagcagcttaaagagcatagtggtgttgcagtttagatggcagtatcagctgattaccaagttaagtttcctgaaagtggtgatctctactctatactagcagctgaagggattgagtttcttttgtcgcatagtggagaggtgccgttggaatatattcatggtaagacgatttgtctcttcttctctgcaatctggtgcaggccctgcaaggacttcactccagagctgataaaactctacgaaaatcttcagaaccgaggagaagaactcgagatcatctttgtctcatttgatcatgatatgacttcattctatgaacatttctggtgcatgccatggcttgcagttcccttcaatttaagcctactcaacaaattaagggacaagtacggaatttctcgtatcccgtcactggttcctctatattcagatgaaatctcagtcgctgaagatgtaattggtctaattgaagactatggttctgaagcctttcctttcactaaaaagcgaaaagaagaactcaaagccatcgatgactccaaacgccttggaggacagttggagaaactccttactcacgagtcccgaaattacgttgttgccagaaatggaagcaaggtgctagtttctaaacttgtgggaaagaccatagggttgtactttggtgcacactggtgtccgcctttccgatctttcacttctcaactcgtagatgtgtacaatgagctggcgactacagataaaggctcctttgaagtcatcttaatttcaacagacagagactcaagagagtttaacatcaacatgaccaacatgccatggcttgcaataccttatgaggacagaacaagacaagatctttgtagaatcttcaacgtcaaactcatacctgcattggtcatcataggacccgaagagaaaacagtgaccacaaacgcgagagagatggtatcattgtatggatcaaggagttttccgttcacggaatcaaggattgttgagttaaaagcttgtttgaagaaggaaggtgattcacttccaaggaaagtgaaagataacaagcatgaacacgagctaaaactggatatggcgaaagcttatgtgtgtgatttctgtaagaagcaaggcaggttttgggcgttttcttgcaatgcttgtgattatgatcttcatcctacatgtgtggaagaagaagaagcattattggtttagcaaaagagacggtcgtcgtgatttgtctgaaagattttgtaatattagtagacaaagaatcgtgatatgtaatgttgtcatgtaaaactcaaagttgaggaattaggatcaacattgtaattatatcttctgtttgtacaattaacatgcttatttcattaataaaattatattctgttttt

SEQ ID NO: 22646 - protein, 392 aa, Arabidopsis thaliana
  peptide (1)..(392): Ceres Seq. ID no. 13494222
MAVSADYQVKFPESGDLYSILAAEGIEFLLSHSGEVPLEYIHGKTICLFFSAIWCRPCKDFTPELIKLYENLQNRGEELEIIFVSFDHDMTSFYEHFWCMPWLAVPFNLSLLNKLRDKYGISRIPSLVPLYSDEISVAEDVIGLIEDYGSEAFPFTKKRKEELKAIDDSKRLGGQLEKLLTHESRNYVVARNGSKVLVSKLVGKTIGLYFGAHWCPPFRSFTSQLVDVYNELATTDKGSFEVILISTDRDSREFNINMTNMPWLAIPYEDRTRQDLCRIFNVKLIPALVIIGPEEKTVTTNAREMVSLYGSRSFPFTESRIVELKACLKKEGDSLPRKVKDNKHEHELKLDMAKAYVCDFCKKQGRFWAFSCNACDYDLHPTCVEEEEALLV

SEQ ID NO: 22647 - protein, 303 aa, Arabidopsis thaliana
  peptide (1)..(303): Ceres Seq. ID no. 13494223
MTSFYEHFWCMPWLAVPFNLSLLNKLRDKYGISRIPSLVPLYSDEISVAEDVIGLIEDYGSEAFPFTKKRKEELKAIDDSKRLGGQLEKLLTHESRNYVVARNGSKVLVSKLVGKTIGLYFGAHWCPPFRSFTSQLVDVYNELATTDKGSFEVILISTDRDSREFNINMTNMPWLAIPYEDRTRQDLCRIFNVKLIPALVIIGPEEKTVTTNAREMVSLYGSRSFPFTESRIVELKACLKKEGDSLPRKVKDNKHEHELKLDMAKAYVCDFCKKQGRFWAFSCNACDYDLHPTCVEEEEALLV

SEQ ID NO: 22648 - protein, 293 aa, Arabidopsis thaliana
  peptide (1)..(293): Ceres Seq. ID no. 13494224
MPWLAVPFNLSLLNKLRDKYGISRIPSLVPLYSDEISVAEDVIGLIEDYGSEAFPFTKKRKEELKAIDDSKRLGGQLEKLLTHESRNYVVARNGSKVLVSKLVGKTIGLYFGAHWCPPFRSFTSQLVDVYNELATTDKGSFEVILISTDRDSREFNINMTNMPWLAIPYEDRTRQDLCRIFNVKLIPALVIIGPEEKTVTTNAREMVSLYGSRSFPFTESRIVELKACLKKEGDSLPRKVKDNKHEHELKLDMAKAYVCDFCKKQGRFWAFSCNACDYDLHPTCVEEEEALLV

SEQ ID NO: 22649 - DNA, 873 bp, Arabidopsis thaliana
  misc_feature (1)..(873): Ceres Seq. ID no. 12322589
  misc_feature (1)..(873): Ortholog of  Ceres SEQ ID NO 15176177 as cited in SEQ ID NO 0
aaaaaattagttcgtcgaagcatcgagaaaatgatcgtactttctgttggttccgcttcttcatctccgatcgtcgtcgtcttttccgtcgcgcttcttctgttctacttctctgaaacttctctaggagctccttgtcccatcaatggcttgccaatcgtgaggaatattagtgaccttcctcaggataactatggaagaccaggtctttcccacatgactgttgctggctccgtattgcatggaatgaaagaggttgaaatatggcttcagacatttgctccaggttcagagacaccaattcacaggcactcctgtgaagaggtttttgttgtcctaaagggcagtggtactctgtatctcgctgaaacacatggaaatttccctgggaaaccaatcgaatttccaatctttgccaacagtacaattcatattccgatcaatgatgctcatcaggtcaaaaacaccggtcatgaggacctgcaggtgttggttatcatatctcggccgcctattaaaatcttcatctacgaagactggtttatgccacacactgctgcaaggctgaagttcccttactattgggatgagcaatgcattcaagaatcacaaaaagacgagctttaaagcaaagtccgaggctaaaagcaagcacaacctttagatagtaaaatcatagttgaggttttgtgacactacgtagatactggtaaattggcaaggattttacatgaatgttgttgttaccagaaagtaaataaatgttcaatctttgatgttcttaagtaagtgagtcctattggtcatgaaaatatgtaagtgtgcacatcttgattgcatttgcgataaatttatagagtttcactcacttct

SEQ ID NO: 22650 - protein, 208 aa, Arabidopsis thaliana
  peptide (1)..(208): Ceres Seq. ID no. 12322590
KKLVRRSIEKMIVLSVGSASSSPIVVVFSVALLLFYFSETSLGAPCPINGLPIVRNISDLPQDNYGRPGLSHMTVAGSVLHGMKEVEIWLQTFAPGSETPIHRHSCEEVFVVLKGSGTLYLAETHGNFPGKPIEFPIFANSTIHIPINDAHQVKNTGHEDLQVLVIISRPPIKIFIYEDWFMPHTAARLKFPYYWDEQCIQESQKDEL

SEQ ID NO: 22651 - protein, 198 aa, Arabidopsis thaliana
  peptide (1)..(198): Ceres Seq. ID no. 12322591
MIVLSVGSASSSPIVVVFSVALLLFYFSETSLGAPCPINGLPIVRNISDLPQDNYGRPGLSHMTVAGSVLHGMKEVEIWLQTFAPGSETPIHRHSCEEVFVVLKGSGTLYLAETHGNFPGKPIEFPIFANSTIHIPINDAHQVKNTGHEDLQVLVIISRPPIKIFIYEDWFMPHTAARLKFPYYWDEQCIQESQKDEL

SEQ ID NO: 22652 - protein, 136 aa, Arabidopsis thaliana
  peptide (1)..(136): Ceres Seq. ID no. 12322592
MTVAGSVLHGMKEVEIWLQTFAPGSETPIHRHSCEEVFVVLKGSGTLYLAETHGNFPGKPIEFPIFANSTIHIPINDAHQVKNTGHEDLQVLVIISRPPIKIFIYEDWFMPHTAARLKFPYYWDEQCIQESQKDEL

SEQ ID NO: 22653 - DNA, 700 bp, Arabidopsis thaliana
  misc_feature (1)..(700): Ceres Seq. ID no. 12385656
  misc_feature (1)..(700): Ortholog of  Ceres SEQ ID NO 15174151 as cited in SEQ ID NO 0
cagagaaaaagtttgcagtgagaaggagattgattaatcgatctgagaaagatgggagattcggagtcatttgttgggaaaaattggaatggattgaaggatttctggagtgataggttatcatttttcgaaaattacaccagattcaccaaacgcgacgcgcctcttccttcttggtcttcctccgacgtcgaggaattcattgcctccgatcccgttcatggacccaccctgaaaacggctagggaagctgtgacgtttggtgttaccggagctgcacttggagctgtctctactgctgcttttgcctggaaatactccaggagtccacatggtgctgcattgtccttcttaggaggaggtgtttttggttggacctttgggcaagaggtcgccaaccacacactgcaactctacaagttggacacaatggcagcccaagttaagttcatggaatggtgggaacgtaagtctcaataaaggtcctgaatctaaaacgaagacgtgtgctgctttctcgtccagagtatcttcttgggaacaacatgaaatgctgattatccatccatttccagactttcgcctttgaaactttttctattctcactcttggaacatgtttgccttgtcttaataatacaacatgcctcatgaatgttttgaagatttgagaaaatgaattcaaagaaaccaaatggtc

SEQ ID NO: 22654 - protein, 142 aa, Arabidopsis thaliana
  peptide (1)..(142): Ceres Seq. ID no. 12385657
MGDSESFVGKNWNGLKDFWSDRLSFFENYTRFTKRDAPLPSWSSSDVEEFIASDPVHGPTLKTAREAVTFGVTGAALGAVSTAAFAWKYSRSPHGAALSFLGGGVFGWTFGQEVANHTLQLYKLDTMAAQVKFMEWWERKSQ

SEQ ID NO: 22655 - DNA, 1371 bp, Arabidopsis thaliana
  misc_feature (1)..(1371): Ceres Seq. ID no. 12330189
  misc_feature (1)..(1371): Ortholog of  Ceres SEQ ID NO 14311596 as cited in SEQ ID NO 51728
  misc_feature (1)..(1371): Ortholog of  Ceres SEQ ID NO 14307004 as cited in SEQ ID NO 59551
  misc_feature (1)..(1371): Ortholog of  Ceres SEQ ID NO 13661504 as cited in SEQ ID NO 61294
  misc_feature (1)..(1371): Ortholog of  Ceres SEQ ID NO 12617197 as cited in SEQ ID NO 63406
  misc_feature (1)..(1371): Ortholog of  Ceres SEQ ID NO 13597804 as cited in SEQ ID NO 64182
  misc_feature (1)..(1371): Ortholog of  Ceres SEQ ID NO 14302768 as cited in SEQ ID NO 64889
  misc_feature (1)..(1371): Ortholog of  Ceres SEQ ID NO 13598565 as cited in SEQ ID NO 65250
  misc_feature (1)..(1371): Ortholog of  Ceres SEQ ID NO 13598597 as cited in SEQ ID NO 65496
  misc_feature (1)..(1371): Ortholog of  Ceres SEQ ID NO 13596284 as cited in SEQ ID NO 68273
  misc_feature (1)..(1371): Ortholog of  Ceres SEQ ID NO 13596227 as cited in SEQ ID NO 68750
  misc_feature (1)..(1371): Ortholog of  Ceres SEQ ID NO 14308995 as cited in SEQ ID NO 0
aatatatacgaaacgtaccacaaatttctaactaaagcattcatagtctctcgaaagcctcttttcagaaccgaagctctttactttcgtccaccgggaaatatgccagtcgacgtagcctcaccggccggaaaaaccgtctgcgtcaccggagctggtggatacatcgcttcttggattgttaagatacttctcgagagaggttacacagtcaaaggaaccgtacggaatccagatgatccgaagaacacacatttgagagaactagaaggaggaaaggagagactgattctgtgcaaagcagatcttcaggactacgaggctcttaaggcggcgattgatggttgcgacggcgtctttcacacggcttctcctgtcaccgacgatccggaacaaatggtggagccggccgtgaatggagccaagtttgtaattaatgctgcggctgaggccaaggtcaagcgcgtggtcatcacctcctccattggtgccgtctacatggacccgaaccgtgaccctgaggctgtcgttgacgaaagttgttggagtgatcttgacttctgcaaaaacaccaagaattggtattgttacggcaagatggtggcggaacaagcggcgtgggagacagcaaaggagaaaggtgttgacttggtggtgttgaatccggtgctggttcttggaccgccgttacagccgacgatcaacgccagtctttaccacgtcctcaaatatctaaccggctcggctaagacttatgctaatttgactcaagcttatgtggatgttcgcgatgtcgcgctggctcatgttctggtctatgaggcaccctcggcctccggacgttatctcctagccgagagtgctcgccaccgcggggaagttgttgagattctggctaagctattcccggagtatcctcttccgaccaagtgcaaggacgagaagaaccctagagccaagccatacaaattcactaaccagaagattaaggacttaggcttagagttcacttccaccaagcaaagcctctacgacacagtcaagagcttacaagagaaaggccatcttgctcctcctcctcctcctccttcagcatcgcaagaatccgtggaaaatggcattaagatcgggtcttgaaaagcttattaattccctcaagtatcccccttaagtatccttaaccattgaagttgcttttgtttgttgtctctggttatgtgaaacctctgtttcaatatgtctcgtctggttatgaatctgtacactcagttctttggccaaaccgtttgatggattttgtagtcaagtcttcatgtttgatcctatgtaatagattacacttaagtaaacaacttcatttttattctatgc

SEQ ID NO: 22656 - protein, 378 aa, Arabidopsis thaliana
  peptide (1)..(378): Ceres Seq. ID no. 12330190
NIYETYHKFLTKAFIVSRKPLFRTEALYFRPPGNMPVDVASPAGKTVCVTGAGGYIASWIVKILLERGYTVKGTVRNPDDPKNTHLRELEGGKERLILCKADLQDYEALKAAIDGCDGVFHTASPVTDDPEQMVEPAVNGAKFVINAAAEAKVKRVVITSSIGAVYMDPNRDPEAVVDESCWSDLDFCKNTKNWYCYGKMVAEQAAWETAKEKGVDLVVLNPVLVLGPPLQPTINASLYHVLKYLTGSAKTYANLTQAYVDVRDVALAHVLVYEAPSASGRYLLAESARHRGEVVEILAKLFPEYPLPTKCKDEKNPRAKPYKFTNQKIKDLGLEFTSTKQSLYDTVKSLQEKGHLAPPPPPPSASQESVENGIKIGS

SEQ ID NO: 22657 - protein, 344 aa, Arabidopsis thaliana
  peptide (1)..(344): Ceres Seq. ID no. 12330191
MPVDVASPAGKTVCVTGAGGYIASWIVKILLERGYTVKGTVRNPDDPKNTHLRELEGGKERLILCKADLQDYEALKAAIDGCDGVFHTASPVTDDPEQMVEPAVNGAKFVINAAAEAKVKRVVITSSIGAVYMDPNRDPEAVVDESCWSDLDFCKNTKNWYCYGKMVAEQAAWETAKEKGVDLVVLNPVLVLGPPLQPTINASLYHVLKYLTGSAKTYANLTQAYVDVRDVALAHVLVYEAPSASGRYLLAESARHRGEVVEILAKLFPEYPLPTKCKDEKNPRAKPYKFTNQKIKDLGLEFTSTKQSLYDTVKSLQEKGHLAPPPPPPSASQESVENGIKIGS

SEQ ID NO: 22658 - protein, 246 aa, Arabidopsis thaliana
  peptide (1)..(246): Ceres Seq. ID no. 12330192
MVEPAVNGAKFVINAAAEAKVKRVVITSSIGAVYMDPNRDPEAVVDESCWSDLDFCKNTKNWYCYGKMVAEQAAWETAKEKGVDLVVLNPVLVLGPPLQPTINASLYHVLKYLTGSAKTYANLTQAYVDVRDVALAHVLVYEAPSASGRYLLAESARHRGEVVEILAKLFPEYPLPTKCKDEKNPRAKPYKFTNQKIKDLGLEFTSTKQSLYDTVKSLQEKGHLAPPPPPPSASQESVENGIKIGS

SEQ ID NO: 22659 - DNA, 1367 bp, Arabidopsis thaliana
  misc_feature (1)..(1367): Ceres Seq. ID no. 12334633
  misc_feature (1)..(1367): Ortholog of  Ceres SEQ ID NO 13586135 as cited in SEQ ID NO 1210
  misc_feature (1)..(1367): Ortholog of  Ceres SEQ ID NO 13654329 as cited in SEQ ID NO 68717
aagcctctctctgtctcttcctagaaaagaaaactttgtaccttttccaaagtctaagcaaatcattgtttttgattactggaactcgttgagggattgagaaaaaaataatcagaagagaaagatccatggctgataattgtatcagacttcttcactcagcctctgttttcttctgtttagggcttctaatttcatccttcaacttgttgcagggtattgcagctgaaaatctttccaagcagaaactgacctcatggattcttcagaatgagattgtaaaggaagtcaatgagaatccaaacgctggatggaaagcttctttcaatgatcggtttgcaaacgccactgttgcagagtttaagcgccttcttggtgttaaaccaacaccaaagacggaatttttgggtgtgcctattgtaagccatgatatatctttgaagcttccaaaagaatttgatgctagaaccgcttggtcacagtgcaccagtattggaaggatcttagatcagggtcactgtggttcttgctgggcctttggtgctgttgaatcactgtctgacagattctgcatcaaatataacatgaatgtttctttatctgtcaatgatcttttagcatgttgtggattcctttgcggtcaaggttgtaatggtggatacccaattgctgcgtggcggtactttaagcaccacggtgtagtcactgaagagtgtgatccatacttcgacaatactggttgctcgcacccgggatgtgaacccgcttaccctacaccaaaatgtgcaaggaaatgtgttagcggaaaccagctttggcgtgaatcaaaacattatggtgttagtgcgtacaaggtcagatctcaccctgatgacattatggcagaagtttacaaaaatggacctgttgaggttgccttcactgtttacgaggactttgcgcattacaaatctggagtgtacaagcacataacaggtactaacattggaggtcatgctgttaaacttattggctggggaacttctgatgacggtgaagattattggttgcttgcaaatcaatggaaccgaagctggggtgatgatgggtacttcaagatcaggagaggaacaaacgaatgtggcattgaacatggtgttgtagctggtttaccttcagacaggaacgtagttaaaggtattactacttcagatgatcttcttgtttcctcattttaaacaggaatatgtgtctctactctgtaatacataatttcccactgtgttgttgttaccaatgaaataaaacgactttcaacccaaaaagaagtctattgtatataccatttagctttttgttcatattcaatataatgtgttgttgttttc

SEQ ID NO: 22660 - protein, 362 aa, Arabidopsis thaliana
  peptide (1)..(362): Ceres Seq. ID no. 12334634
MADNCIRLLHSASVFFCLGLLISSFNLLQGIAAENLSKQKLTSWILQNEIVKEVNENPNAGWKASFNDRFANATVAEFKRLLGVKPTPKTEFLGVPIVSHDISLKLPKEFDARTAWSQCTSIGRILDQGHCGSCWAFGAVESLSDRFCIKYNMNVSLSVNDLLACCGFLCGQGCNGGYPIAAWRYFKHHGVVTEECDPYFDNTGCSHPGCEPAYPTPKCARKCVSGNQLWRESKHYGVSAYKVRSHPDDIMAEVYKNGPVEVAFTVYEDFAHYKSGVYKHITGTNIGGHAVKLIGWGTSDDGEDYWLLANQWNRSWGDDGYFKIRRGTNECGIEHGVVAGLPSDRNVVKGITTSDDLLVSSF

SEQ ID NO: 22661 - protein, 210 aa, Arabidopsis thaliana
  peptide (1)..(210): Ceres Seq. ID no. 12334635
MNVSLSVNDLLACCGFLCGQGCNGGYPIAAWRYFKHHGVVTEECDPYFDNTGCSHPGCEPAYPTPKCARKCVSGNQLWRESKHYGVSAYKVRSHPDDIMAEVYKNGPVEVAFTVYEDFAHYKSGVYKHITGTNIGGHAVKLIGWGTSDDGEDYWLLANQWNRSWGDDGYFKIRRGTNECGIEHGVVAGLPSDRNVVKGITTSDDLLVSSF

SEQ ID NO: 22662 - DNA, 1576 bp, Arabidopsis thaliana
  misc_feature (1)..(1576): Ceres Seq. ID no. 13487662
  misc_feature (1)..(1576): Ortholog of  Ceres SEQ ID NO 14301471 as cited in SEQ ID NO 68064
  misc_feature (1)..(1576): Ortholog of  Ceres SEQ ID NO 13574418 as cited in SEQ ID NO 0
  misc_feature (1)..(1576): Ortholog of  Ceres SEQ ID NO 13600272 as cited in SEQ ID NO 0
acaaagatcatcacagccaattttagaaaacttctgacggaaaataaaaagagaggatttatttttatctttctgtgttaccggagaatagagacggtaccttttcactgttgacttaacggagaagatggcgactgtgccggagataaagataatgagaagcgagagcttaggtcatcggagtgacgtgtcgagcccggaagctaagctagggatgcgtgtggaagatctctgggatgagcagaaaccacagctcagtcctaacgagaagctcaacgcttgctttgagagcatccctgtctctgctttccctctctcttctgattcacaagatattgagataagatcagacacaagtttggctgaagctgttcagacactatcgaaattcaaggtcttgagcgcgcctgttgtagatgttgatgcgcctgaagatgccagttggattgatcgctacatcggtattgtggaatttccaggcattgttgtctggcttttgcatcagttggagccaccatctccaaggagccctgctgttgcagcttcaaatggattttctcatgatttcaccaccgatgttctggataacggagattcagcagtaacttctggaaacttctttgaggtccttacttcttcagagctatacgagaacaccaaggttcgagatatctctggaacattccgctgggcaccgttcctggctctgcagaaagagaactcctttttgaccatgctgttacttctttctaagtacaaaatgaagagcatcccggtggttgatttaggtgtagctaagattgagaacattatcacacaatcaggagttatacatatgctggcagaatgcgcggggcttctctggtttgaggattggggaatcaaaactctctctgaagtaggtcttcccattatgtcaaaggatcatatcataaagatctatgaggatgaaccagttcttcaggcattcaagctgatgaggagaaagagaatcggaggcatacctgtcattgaaaggaatagcgagaagccagtaggcaacattagccttagagatgttcaatttctcctcactgcacctgagatttaccatgactacaggtcaatcacaacgaagaacttcttagtatctgttagagagcatcttgagaagtgcggggatacatcagctcctatcatgagtggtgtgattgcttgcacgaagaaccatacactaaaggaactgatcttgatgttagacgccgagaagatccataggatatatgttgtggatgagtttggtaaccttgaaggactcatcactcttagagacatcattgcaagacttgtccatgagccatccggctattttggagatttctttgatggcgttatgcctcttcccgaaaactaccgagtctgagaggaaagtggtagtctttcttcggtaaattgtcttttgtttggtgataatgcttctgtctgtttgtgctaaagttctcgaaattgtgttatattaaacgttaagagaaataagaaaagaagaaagagcctgtctttgagtgaatttgtctgaaatacagtaactcttaagatt

SEQ ID NO: 22663 - protein, 424 aa, Arabidopsis thaliana
  peptide (1)..(424): Ceres Seq. ID no. 15220484
MATVPEIKIMRSESLGHRSDVSSPEAKLGMRVEDLWDEQKPQLSPNEKLNACFESIPVSAFPLSSDSQDIEIRSDTSLAEAVQTLSKFKVLSAPVVDVDAPEDASWIDRYIGIVEFPGIVVWLLHQLEPPSPRSPAVAASNGFSHDFTTDVLDNGDSAVTSGNFFEVLTSSELYENTKVRDISGTFRWAPFLALQKENSFLTMLLLLSKYKMKSIPVVDLGVAKIENIITQSGVIHMLAECAGLLWFEDWGIKTLSEVGLPIMSKDHIIKIYEDEPVLQAFKLMRRKRIGGIPVIERNSEKPVGNISLRDVQFLLTAPEIYHDYRSITTKNFLVSVREHLEKCGDTSAPIMSGVIACTKNHTLKELILMLDAEKIHRIYVVDEFGNLEGLITLRDIIARLVHEPSGYFGDFFDGVMPLPENYRV

SEQ ID NO: 22664 - protein, 415 aa, Arabidopsis thaliana
  peptide (1)..(415): Ceres Seq. ID no. 15220485
MRSESLGHRSDVSSPEAKLGMRVEDLWDEQKPQLSPNEKLNACFESIPVSAFPLSSDSQDIEIRSDTSLAEAVQTLSKFKVLSAPVVDVDAPEDASWIDRYIGIVEFPGIVVWLLHQLEPPSPRSPAVAASNGFSHDFTTDVLDNGDSAVTSGNFFEVLTSSELYENTKVRDISGTFRWAPFLALQKENSFLTMLLLLSKYKMKSIPVVDLGVAKIENIITQSGVIHMLAECAGLLWFEDWGIKTLSEVGLPIMSKDHIIKIYEDEPVLQAFKLMRRKRIGGIPVIERNSEKPVGNISLRDVQFLLTAPEIYHDYRSITTKNFLVSVREHLEKCGDTSAPIMSGVIACTKNHTLKELILMLDAEKIHRIYVVDEFGNLEGLITLRDIIARLVHEPSGYFGDFFDGVMPLPENYRV

SEQ ID NO: 22665 - protein, 395 aa, Arabidopsis thaliana
  peptide (1)..(395): Ceres Seq. ID no. 15220486
MRVEDLWDEQKPQLSPNEKLNACFESIPVSAFPLSSDSQDIEIRSDTSLAEAVQTLSKFKVLSAPVVDVDAPEDASWIDRYIGIVEFPGIVVWLLHQLEPPSPRSPAVAASNGFSHDFTTDVLDNGDSAVTSGNFFEVLTSSELYENTKVRDISGTFRWAPFLALQKENSFLTMLLLLSKYKMKSIPVVDLGVAKIENIITQSGVIHMLAECAGLLWFEDWGIKTLSEVGLPIMSKDHIIKIYEDEPVLQAFKLMRRKRIGGIPVIERNSEKPVGNISLRDVQFLLTAPEIYHDYRSITTKNFLVSVREHLEKCGDTSAPIMSGVIACTKNHTLKELILMLDAEKIHRIYVVDEFGNLEGLITLRDIIARLVHEPSGYFGDFFDGVMPLPENYRV

SEQ ID NO: 22666 - DNA, 1066 bp, Arabidopsis thaliana
  misc_feature (1)..(1066): Ceres Seq. ID no. 12334585
  misc_feature (1)..(1066): Ortholog of  Ceres SEQ ID NO 14311392 as cited in SEQ ID NO 58307
  misc_feature (1)..(1066): Ortholog of  Ceres SEQ ID NO 13599348 as cited in SEQ ID NO 0
acttaaagatgataagtactgtactgtactgtctaatgtctatcctctcttaaggcttcgtttcaaattcttcaatcgtcctttagaaatcctcaaaatatccacaattttcctctctttacccagaagatttcatcagaacctcttcgccattaatggttacagcgatgttttgtgcatcatcttctccaattacatctcctctctacccaaaagcttataaattttctcaaacaaaatcgaattcgaagagattttcctctctgcgtgcttcgttgcctgtttctgataacaagcttcttaaatttgaatacacaccatggcttattgttggacttggtaaccctggattaaagtattacggaacaaggcataatattggttttgagatgattgatcatatagctcgagcaacggatatttctatgaacacaattcagtccaaggctttagttgggataggttctgttggagaagttccgattttgttggttaaacctcaaggatacatgaatttcagtggtgaatcggttgggccgttagctgcttactaccaaatacccttacgtcacattcttatgatatatgatgacatgggtttgtctaatggtgtcttgagacttcaaccaaaaggtgggcatagccaacacaatggattgaagaatgtgacagaacatttaaatggttgtcgcggctatccccgcttatcaatcggaattggaaatccaccaggtaacatggatatgaaagcgtttcttctccagaaattcagccccttggagcgcaaacagatggatgagggactggaacaaggtgttgaaggtgtgaagacacttgttgaagagggatttagtgactcaatatctcgattcaatttggggcagaaatacaagtttcacacagtttgattccttgacatttgcctcatcatgatacctcctgtcacagcaacagtagtaacacccatagtccaacattgttcttatccttggtctttgtttagctgataggtaatattgtaacatttgtattctctaagatcaattttatttatttatattttgtc

SEQ ID NO: 22667 - protein, 250 aa, Arabidopsis thaliana
  peptide (1)..(250): Ceres Seq. ID no. 12334586
MVTAMFCASSSPITSPLYPKAYKFSQTKSNSKRFSSLRASLPVSDNKLLKFEYTPWLIVGLGNPGLKYYGTRHNIGFEMIDHIARATDISMNTIQSKALVGIGSVGEVPILLVKPQGYMNFSGESVGPLAAYYQIPLRHILMIYDDMGLSNGVLRLQPKGGHSQHNGLKNVTEHLNGCRGYPRLSIGIGNPPGNMDMKAFLLQKFSPLERKQMDEGLEQGVEGVKTLVEEGFSDSISRFNLGQKYKFHTV

SEQ ID NO: 22668 - protein, 246 aa, Arabidopsis thaliana
  peptide (1)..(246): Ceres Seq. ID no. 12334587
MFCASSSPITSPLYPKAYKFSQTKSNSKRFSSLRASLPVSDNKLLKFEYTPWLIVGLGNPGLKYYGTRHNIGFEMIDHIARATDISMNTIQSKALVGIGSVGEVPILLVKPQGYMNFSGESVGPLAAYYQIPLRHILMIYDDMGLSNGVLRLQPKGGHSQHNGLKNVTEHLNGCRGYPRLSIGIGNPPGNMDMKAFLLQKFSPLERKQMDEGLEQGVEGVKTLVEEGFSDSISRFNLGQKYKFHTV

SEQ ID NO: 22669 - protein, 172 aa, Arabidopsis thaliana
  peptide (1)..(172): Ceres Seq. ID no. 12334588
MIDHIARATDISMNTIQSKALVGIGSVGEVPILLVKPQGYMNFSGESVGPLAAYYQIPLRHILMIYDDMGLSNGVLRLQPKGGHSQHNGLKNVTEHLNGCRGYPRLSIGIGNPPGNMDMKAFLLQKFSPLERKQMDEGLEQGVEGVKTLVEEGFSDSISRFNLGQKYKFHTV

SEQ ID NO: 22670 - DNA, 1236 bp, Arabidopsis thaliana
  misc_feature (1)..(1236): Ceres Seq. ID no. 12334589
  misc_feature (1)..(1236): Ortholog of  Ceres SEQ ID NO 13639619 as cited in SEQ ID NO 58000
ctctcttctttttttctctctttctcataacaacaaaaaaacaaaaaaaaaacctaattagttttttctttctgcagagattatggaggtaccggtgattaatagaataagagatttcgaagttggtataaactcgattaatgatccttcgtttctttctcgatctgttgctgtttccggaatcggaaagctacaccaagcttatggtttttggaaatggggagctttgattatcgcatttctagcttatttcaccaactttgttagtaaactcaacagtctagttgttaggttaagaaaaatagatgtctctgtttcctctccaactctttttgatgattacgatagcgattccgatgtttcttgttcctctaccgtctcctctgacgatgaaaaagacgaagaagatgaggctgatgatgaagatgaggatgttgactcgatctttaatcgaagacgagtcaacggaggtttccgcgttagaggatctgattattacgatgatgatgatgatcagggagacaatggtaattgcacatggatggggaggcgatatagtggtagttttggagatttgttctcatggcctgatcttggtgggattggttcgagtggagtcgtgaagctttgggatcatttagatatcgatggcgatgatcatgagaatgttgtggcaacgtttctcaagaactataactcaacctcgtcaccgtttttttgggcggcggagaaaaaaggtgttgacgccgttaaagtgaaggcgtgtgatccacgcgccggttttcggatgccggctttgctcgcggagtggaggcagccggggcggttgttagggaatataatcggagttgataccggtggtgtggagaaagtatacgtcagggatgatgttagcggagagatagccgtgggagatttgaggaagtttaacggtgtgttgacggacttgacggaatgtgaggctgagacttggtgggacgctgacgtccttatctcgggctgatggaatccttgacgagagaaaatattggttgggacggttttgtcttaaagttaagaggacggacgaaagattcaacgccaaaaagaagtgttaaagattaatgagaacgacgcaacgttttgtaaataatttgtctgtttgcttctctgcgatttttattttaaaattttagttttgattgaataaaaatcagcgtcagattaataaaagtgtttgtgtgtttggtcggttac

SEQ ID NO: 22671 - protein, 306 aa, Arabidopsis thaliana
  peptide (1)..(306): Ceres Seq. ID no. 12334590
MEVPVINRIRDFEVGINSINDPSFLSRSVAVSGIGKLHQAYGFWKWGALIIAFLAYFTNFVSKLNSLVVRLRKIDVSVSSPTLFDDYDSDSDVSCSSTVSSDDEKDEEDEADDEDEDVDSIFNRRRVNGGFRVRGSDYYDDDDDQGDNGNCTWMGRRYSGSFGDLFSWPDLGGIGSSGVVKLWDHLDIDGDDHENVVATFLKNYNSTSSPFFWAAEKKGVDAVKVKACDPRAGFRMPALLAEWRQPGRLLGNIIGVDTGGVEKVYVRDDVSGEIAVGDLRKFNGVLTDLTECEAETWWDADVLISG

SEQ ID NO: 22672 - protein, 153 aa, Arabidopsis thaliana
  peptide (1)..(153): Ceres Seq. ID no. 12334591
MGRRYSGSFGDLFSWPDLGGIGSSGVVKLWDHLDIDGDDHENVVATFLKNYNSTSSPFFWAAEKKGVDAVKVKACDPRAGFRMPALLAEWRQPGRLLGNIIGVDTGGVEKVYVRDDVSGEIAVGDLRKFNGVLTDLTECEAETWWDADVLISG

SEQ ID NO: 22673 - DNA, 1192 bp, Arabidopsis thaliana
  misc_feature (1)..(1192): Ceres Seq. ID no. 13497443
  misc_feature (1)..(1192): Ortholog of  Ceres SEQ ID NO 14302919 as cited in SEQ ID NO 20338
  misc_feature (1)..(1192): Ortholog of  Ceres SEQ ID NO 13595497 as cited in SEQ ID NO 51127
  misc_feature (1)..(1192): Ortholog of  Ceres SEQ ID NO 14314046 as cited in SEQ ID NO 59316
atttcacatctctctctctctataagaaccctagaagaaggtttctcttgtcctccatacacttagcacaactgataaatcttttgaggtaaaatcagctttagatcaaggtttttctagtcatctctactcataaagatcaaagcttttgctattctcattttctaccaagagacaatatcatgatgatgggtaaagaggatttgggtttaagtcttagcttgggatttgcacaaaaccatcctctccagctaaatcttaaacccacttcttcaccaatgtccaatctccagatgtttccatggaaccaaacccttgtttcttcctcagatcaacaaaagcaacagtttcttaggaaaatcgacgtgaacagcttgccaacaacggtggatttggaagaggagacaggagtttcgtctccaaacagtacgatctcgagcacagtgagtggaaagaggaggagtactgaaagagaaggtacctccggtggtggttgcggagatgaccttgacatcactctagatagatcttcctcacgtggaacctccgatgaagaggaagattacggaggtgagacttgtaggaagaagcttagactatccaaagatcaatccgcagttctcgaagacactttcaaagagcacaatactctcaatcccaaacagaagctggctttggctaagaagctaggtttaacagcaagacaagtggaagtgtggttccaaaacagaagagcaaggacaaagttaaagcagaccgaagtggattgcgagtatttgaaaagatgtgttgagaaattaacggaagagaatcggcggctcgagaaagaggcagcggaactaagagcattaaagctttcaccgcggttgtatggtcagatgagtccaccgaccacacttttgatgtgtccatcgtgtgaacgtgtggccggaccatcctcatctaaccacaaccagcgatctgtctcattgagtccatggctccaaatggcccatgggtcaacctttgatgtgatgcgtcctaggtcttaactttaatgctgcttctatgggttgtgtgtgggtcattgtactttttagattattgactctcagctaatgtatccttaaaagcctttttctacttttaaatttactttaatctaattaaattagttgtccatgtcttcttgataacaaaaaaatttataatt

SEQ ID NO: 22674 - protein, 282 aa, Arabidopsis thaliana
  peptide (1)..(282): Ceres Seq. ID no. 13497444
MMMGKEDLGLSLSLGFAQNHPLQLNLKPTSSPMSNLQMFPWNQTLVSSSDQQKQQFLRKIDVNSLPTTVDLEEETGVSSPNSTISSTVSGKRRSTEREGTSGGGCGDDLDITLDRSSSRGTSDEEEDYGGETCRKKLRLSKDQSAVLEDTFKEHNTLNPKQKLALAKKLGLTARQVEVWFQNRRARTKLKQTEVDCEYLKRCVEKLTEENRRLEKEAAELRALKLSPRLYGQMSPPTTLLMCPSCERVAGPSSSNHNQRSVSLSPWLQMAHGSTFDVMRPRS

SEQ ID NO: 22675 - protein, 281 aa, Arabidopsis thaliana
  peptide (1)..(281): Ceres Seq. ID no. 13497445
MMGKEDLGLSLSLGFAQNHPLQLNLKPTSSPMSNLQMFPWNQTLVSSSDQQKQQFLRKIDVNSLPTTVDLEEETGVSSPNSTISSTVSGKRRSTEREGTSGGGCGDDLDITLDRSSSRGTSDEEEDYGGETCRKKLRLSKDQSAVLEDTFKEHNTLNPKQKLALAKKLGLTARQVEVWFQNRRARTKLKQTEVDCEYLKRCVEKLTEENRRLEKEAAELRALKLSPRLYGQMSPPTTLLMCPSCERVAGPSSSNHNQRSVSLSPWLQMAHGSTFDVMRPRS

SEQ ID NO: 22676 - protein, 280 aa, Arabidopsis thaliana
  peptide (1)..(280): Ceres Seq. ID no. 13497446
MGKEDLGLSLSLGFAQNHPLQLNLKPTSSPMSNLQMFPWNQTLVSSSDQQKQQFLRKIDVNSLPTTVDLEEETGVSSPNSTISSTVSGKRRSTEREGTSGGGCGDDLDITLDRSSSRGTSDEEEDYGGETCRKKLRLSKDQSAVLEDTFKEHNTLNPKQKLALAKKLGLTARQVEVWFQNRRARTKLKQTEVDCEYLKRCVEKLTEENRRLEKEAAELRALKLSPRLYGQMSPPTTLLMCPSCERVAGPSSSNHNQRSVSLSPWLQMAHGSTFDVMRPRS

SEQ ID NO: 22677 - DNA, 1044 bp, Arabidopsis thaliana
  misc_feature (1)..(1044): Ceres Seq. ID no. 12338802
  misc_feature (1)..(1044): Ortholog of  Ceres SEQ ID NO 14308099 as cited in SEQ ID NO 58651
  misc_feature (1)..(1044): Ortholog of  Ceres SEQ ID NO 13596893 as cited in SEQ ID NO 62932
aatataataatataaccattactgaaacaaagaaaagacggataagactctttttgtgaccagccaatgttaaagaaaaacaatgtgtttgaatctttttgatctttttctttgacactatattttgtaaattgaattggtaattattagtttgtgtttctttgatttataacaagagaaattatcttctttttttctttgacaccagatcttgatttcactttcttggagatgaatcctttcacattggttgatggaaagccttatcctctggatatgaggggtgagcttgatgacaccgctgctttcaaaaactttaagaagtggggcgacattgaatttcccatgccatttggaagagtgatgagttcaacagagagcttcatccacggtctagatgagaagacaagtgcctctttgaagttcactgttctgaatcccaagggaagaatttggactatggtagctggaggaggtgcaagtgtcatctatgctgataccgttggagatctcgggtatgcatctgagcttggcaattatgctgaatacagtggagcacccaaagaagacgaggttttgcagtatgccagagttgtcattgattgtgctacagcgaatccggatggaaaaagcagggctctggtaattggaggtggaattgctaacttcaccgatgttgctgctaccttcaatggcataatccgagctctcaaggaaaaagaagcaaagctgaaagcagcaaggatgcatatatttgtgaggagaggaggaccaaactaccaaaagggacttgctaaaatgagatcacttggagatgaaatcggtgtccccatcgaggtgtatggtcctgaagcaacaatgacaggtatctgcaaggaggcaatccagtacatcaccgcggctgcataagcctttacaatcttatcatttactttcataatactctttagcgtttcttgagtttgagacttgtgtttagattatgtttcacttctaatgtattttactattcataaataaagaacaagtatcttcttttttctt

SEQ ID NO: 22678 - protein, 225 aa, Arabidopsis thaliana; identical to SEQ ID NO: 22087
  peptide (1)..(225): Ceres Seq. ID no. 12338803

SEQ ID NO: 22679 - protein, 210 aa, Arabidopsis thaliana; identical to SEQ ID NO: 22088
  peptide (1)..(210): Ceres Seq. ID no. 12338805

SEQ ID NO: 22680 - protein, 187 aa, Arabidopsis thaliana; identical to SEQ ID NO: 22089
  peptide (1)..(187): Ceres Seq. ID no. 12338806

SEQ ID NO: 22681 - DNA, 1376 bp, Arabidopsis thaliana
  misc_feature (1)..(1376): Ceres Seq. ID no. 12334629
  misc_feature (1)..(1376): Ortholog of  Ceres SEQ ID NO 14311961 as cited in SEQ ID NO 51512
atctgcgatttgatcatcaacaacaatcactccaaattttgtctgctcaccatttttccacaaagccaattctcttgtatccaatgcctatgttctactcctctcgttttctcttcttcttcaccatcgtccccttactcgtctctatcgctctctaccaactcgacacatttgacccagctccggttccttccgaggcatacgcctcctctactacttcaatcccgccgcttatcagcgacaaatatctcaccggagctgagtttattggcgtcggtcttctcgataaacccgaagatatcgcctatcatcaagactctaatctcatatatactggctgcatagatggatgggtgaaacgagtcagtgtccacgactcagctaatgactcagtcgttgaggattgggtcaataccggtggtagaccgctcggaatcgctttcggagtccacggcgaagtcattgtggcagacgcatacaagggactgttgaacataagtggtgacgggaagaagacggaattattgacggatcaagcggaaggcgttaaatttaagctgactgatgtagtcgccgttgcagataacggcgttttgtatttcactgatgcttcttacaagtacactctgcatcaagtcaagtttgacattttggaaggtaaaccacatggccgtctcatgagctttgatcccaccacacgtgttacacgtgtacttctcaaagacctttacttcgctaatggcgtctccatgtctcctgatcaaacgcatctcatcttctgtgaaactcccatgagacgatgcagcaagtattacattaatgaagagcgtgtagaggtgtttattcaaggcttaccaggttatccagataacattcggtacgacggagatggccattactggattgctatggtttcgggagcatcaacgttgtggaggctctcgatgaaataccctttcttgaggaaaatcacagccatagcggctaagtatggcgtggaacttatgttcatgaagaatgcaggtgttctgcaggtggatttggatgggaatcccatcgcttactaccatgatcagagactctctcacattaccaccggtatcaagattgggaactatctctattgtggaaatatcttgcattcgtacattatccgactcgatctcctgaagtatcctgcacagaagaagaagctttgaaacatcaaagtttatacaagcactaaaaatttccactttaggagtatgcactttcacaaaaatgtaaacgtatcgtcccttagaataaatgtatgataatgtctcttaaggagtacatagtagcctgaaacaatgaatacaaaaccaatcaaccatacaagccattccaatgtgtca

SEQ ID NO: 22682 - protein, 398 aa, Arabidopsis thaliana
  peptide (1)..(398): Ceres Seq. ID no. 12334630
LRFDHQQQSLQILSAHHFSTKPILLYPMPMFYSSRFLFFFTIVPLLVSIALYQLDTFDPAPVPSEAYASSTTSIPPLISDKYLTGAEFIGVGLLDKPEDIAYHQDSNLIYTGCIDGWVKRVSVHDSANDSVVEDWVNTGGRPLGIAFGVHGEVIVADAYKGLLNISGDGKKTELLTDQAEGVKFKLTDVVAVADNGVLYFTDASYKYTLHQVKFDILEGKPHGRLMSFDPTTRVTRVLLKDLYFANGVSMSPDQTHLIFCETPMRRCSKYYINEERVEVFIQGLPGYPDNIRYDGDGHYWIAMVSGASTLWRLSMKYPFLRKITAIAAKYGVELMFMKNAGVLQVDLDGNPIAYYHDQRLSHITTGIKIGNYLYCGNILHSYIIRLDLLKYPAQKKKL

SEQ ID NO: 22683 - protein, 371 aa, Arabidopsis thaliana
  peptide (1)..(371): Ceres Seq. ID no. 12334631
MPMFYSSRFLFFFTIVPLLVSIALYQLDTFDPAPVPSEAYASSTTSIPPLISDKYLTGAEFIGVGLLDKPEDIAYHQDSNLIYTGCIDGWVKRVSVHDSANDSVVEDWVNTGGRPLGIAFGVHGEVIVADAYKGLLNISGDGKKTELLTDQAEGVKFKLTDVVAVADNGVLYFTDASYKYTLHQVKFDILEGKPHGRLMSFDPTTRVTRVLLKDLYFANGVSMSPDQTHLIFCETPMRRCSKYYINEERVEVFIQGLPGYPDNIRYDGDGHYWIAMVSGASTLWRLSMKYPFLRKITAIAAKYGVELMFMKNAGVLQVDLDGNPIAYYHDQRLSHITTGIKIGNYLYCGNILHSYIIRLDLLKYPAQKKKL

SEQ ID NO: 22684 - protein, 369 aa, Arabidopsis thaliana
  peptide (1)..(369): Ceres Seq. ID no. 12334632
MFYSSRFLFFFTIVPLLVSIALYQLDTFDPAPVPSEAYASSTTSIPPLISDKYLTGAEFIGVGLLDKPEDIAYHQDSNLIYTGCIDGWVKRVSVHDSANDSVVEDWVNTGGRPLGIAFGVHGEVIVADAYKGLLNISGDGKKTELLTDQAEGVKFKLTDVVAVADNGVLYFTDASYKYTLHQVKFDILEGKPHGRLMSFDPTTRVTRVLLKDLYFANGVSMSPDQTHLIFCETPMRRCSKYYINEERVEVFIQGLPGYPDNIRYDGDGHYWIAMVSGASTLWRLSMKYPFLRKITAIAAKYGVELMFMKNAGVLQVDLDGNPIAYYHDQRLSHITTGIKIGNYLYCGNILHSYIIRLDLLKYPAQKKKL

SEQ ID NO: 22685 - DNA, 895 bp, Arabidopsis thaliana
  misc_feature (1)..(895): Ceres Seq. ID no. 12326430
  misc_feature (1)..(895): Ortholog of  Ceres SEQ ID NO 15179952 as cited in SEQ ID NO 1063
ctaaaaattctccaggaaaatcgaaaacttttctcgggaaaatctttaaactttttgcttttcgaagaaacatgactggtgttaatgatgatgatgataagaacttcaaagaagaaccagagattcaagttttaagcgacgacgatagtgatgaagaacaagttaaagacgtaggtgaagaagttagcgacgaagacgatgatgatggaagtgaaggagatgatgatgatgatgatgaggaggaagaagcagaagaagatgatgacgatgatgatgttcaggttttgcagtctttaggtggtcctcctgtacaatctgcggaagatgaagatgaagaaggtgatgaagatggaaacggtgatgacgatgataatgatggagatgatgatgatgacgacgatgatgatgatgatgatgaggatgctgaagatgagggggatcttgggacagagtacttagtgaggccagttggtagagctgaagatgaagaggatgcaagtgattttgagccggaagagaatggtgtggaagaggatatagacgaaggagaagacgatgagaatgataactcgggtggtgctgggaagtcagaggctccgccgaagaggaagagagcacctgaagaagatgaagaggatagtggtgatgaagatgatgacagacctccaaagaggtagtttttggatctgacaacaacacaatgagaccagagagctttttatgtttttttttttaaaaaaaaaaattggtgttgtgagatttgaatcattggttggggtttatgtaagtttattatggagcaactaagtagtagttttaagtttaagtaggggctcttttttttctatgcattgctatttcttttttttttttctttgtagtgagtcaataaccg

SEQ ID NO: 22686 - protein, 224 aa, Arabidopsis thaliana
  peptide (1)..(224): Ceres Seq. ID no. 12326431
KNSPGKSKTFLGKIFKLFAFRRNMTGVNDDDDKNFKEEPEIQVLSDDDSDEEQVKDVGEEVSDEDDDDGSEGDDDDDDEEEEAEEDDDDDDVQVLQSLGGPPVQSAEDEDEEGDEDGNGDDDDNDGDDDDDDDDDDDDEDAEDEGDLGTEYLVRPVGRAEDEEDASDFEPEENGVEEDIDEGEDDENDNSGGAGKSEAPPKRKRAPEEDEEDSGDEDDDRPPKR

SEQ ID NO: 22687 - protein, 201 aa, Arabidopsis thaliana
  peptide (1)..(201): Ceres Seq. ID no. 12326432
MTGVNDDDDKNFKEEPEIQVLSDDDSDEEQVKDVGEEVSDEDDDDGSEGDDDDDDEEEEAEEDDDDDDVQVLQSLGGPPVQSAEDEDEEGDEDGNGDDDDNDGDDDDDDDDDDDDEDAEDEGDLGTEYLVRPVGRAEDEEDASDFEPEENGVEEDIDEGEDDENDNSGGAGKSEAPPKRKRAPEEDEEDSGDEDDDRPPKR

SEQ ID NO: 22688 - DNA, 1531 bp, Arabidopsis thaliana
  misc_feature (1)..(1531): Ceres Seq. ID no. 12334621
  misc_feature (1)..(1531): Ortholog of  Ceres SEQ ID NO 15176325 as cited in SEQ ID NO 52802
  misc_feature (1)..(1531): Ortholog of  Ceres SEQ ID NO 15176313 as cited in SEQ ID NO 52831
aatattgattatagaaaagtgaatccacttgacctcctcttggaacgcggctatgtctcttgtgcgtccgatctatcctttcttggccagaagcaagagatggtttccggttcgaaccggattaaaatcggtttgcttaacaacgaccagagccgaaacaagcggtgttgacagagaggagaaagtagtgattgttgggggcgggattggcggacttgccactgccgttgctcttcaccggcttggaatccggtcggtggtgttggagcaggcagagtcgcttcggacaggaggagcatcgctgacgctatccaagaatgggtggcgtgttcttgacgccatctccatcggacctcaactccgaaagcagtttcttgaaatgcaaggggtggtattgaagaaggaagatggaagagagcttcgttctttcaaatttaaagacaatgatcaaagccaagaagttcggggggtggagaggcgagtactcttggaaacacttgcaagccagcttcctccacagaccattcggttttcttcaaaactggaaagtatacaaagcaatgatgccaatggtgacactctccttcaacttaaagatggaactcggtttcttgcaaatattgttataggttgtgatggtatccggtctaaggttgcaacttggatggggttcagtgagccgaaatatgttggttattgcgctttccgtggccttgggttctttccaaatggacagccatttcagcaaaaggtgaactacatattcggtagagggcttcgagctggatatgtacctgtatctgcaacaaaagtctactggttcatcactttcaacagcccttctctagggcctcaaatgatggatccagctatcctaagaaaagaagccaaggaactggttagtacctggccagaagatctgcaaaacctcattgatctaacacctgatgaagcaatcagtagaactcctcttgcggaccggtggctttggcctggcattgctccttcagcatcaaaaggtagggttgttcttgttggagatgcttggcacccaatgactccaaatcttggacaaggtgcttgctgtgccttggaagattcagttcttctggcaaataaacttgccagtgcaataaatggagggaccgaatcagttgaaggggcgatggaatcatataggagtgagagatggtctcaggtattccggttgacagtacttgcaaacctagtcggaaaacttctgcaatcagacaatcctcttgtgtgttccgttagagacaatattgtcagtgcaatgggaaaatcctctcggaccaacgatggaacacacaaactttgagtgtgagcctctctatgtttcaatattgtctatgtaatgagatgtaaaagcatatgctccattggatagaggacttagacaatgtatcatcagaggaataatatcaaagaagataatataaactctgattgaatgtaaaagaataatacaatgtaattcgtttatgctatgaaagggaatgactctagagcg

SEQ ID NO: 22689 - protein, 428 aa, Arabidopsis thaliana
  peptide (1)..(428): Ceres Seq. ID no. 12334622
MSLVRPIYPFLARSKRWFPVRTGLKSVCLTTTRAETSGVDREEKVVIVGGGIGGLATAVALHRLGIRSVVLEQAESLRTGGASLTLSKNGWRVLDAISIGPQLRKQFLEMQGVVLKKEDGRELRSFKFKDNDQSQEVRGVERRVLLETLASQLPPQTIRFSSKLESIQSNDANGDTLLQLKDGTRFLANIVIGCDGIRSKVATWMGFSEPKYVGYCAFRGLGFFPNGQPFQQKVNYIFGRGLRAGYVPVSATKVYWFITFNSPSLGPQMMDPAILRKEAKELVSTWPEDLQNLIDLTPDEAISRTPLADRWLWPGIAPSASKGRVVLVGDAWHPMTPNLGQGACCALEDSVLLANKLASAINGGTESVEGAMESYRSERWSQVFRLTVLANLVGKLLQSDNPLVCSVRDNIVSAMGKSSRTNDGTHKL

SEQ ID NO: 22690 - protein, 319 aa, Arabidopsis thaliana
  peptide (1)..(319): Ceres Seq. ID no. 12334623
MQGVVLKKEDGRELRSFKFKDNDQSQEVRGVERRVLLETLASQLPPQTIRFSSKLESIQSNDANGDTLLQLKDGTRFLANIVIGCDGIRSKVATWMGFSEPKYVGYCAFRGLGFFPNGQPFQQKVNYIFGRGLRAGYVPVSATKVYWFITFNSPSLGPQMMDPAILRKEAKELVSTWPEDLQNLIDLTPDEAISRTPLADRWLWPGIAPSASKGRVVLVGDAWHPMTPNLGQGACCALEDSVLLANKLASAINGGTESVEGAMESYRSERWSQVFRLTVLANLVGKLLQSDNPLVCSVRDNIVSAMGKSSRTNDGTHKL

SEQ ID NO: 22691 - protein, 224 aa, Arabidopsis thaliana
  peptide (1)..(224): Ceres Seq. ID no. 12334624
MGFSEPKYVGYCAFRGLGFFPNGQPFQQKVNYIFGRGLRAGYVPVSATKVYWFITFNSPSLGPQMMDPAILRKEAKELVSTWPEDLQNLIDLTPDEAISRTPLADRWLWPGIAPSASKGRVVLVGDAWHPMTPNLGQGACCALEDSVLLANKLASAINGGTESVEGAMESYRSERWSQVFRLTVLANLVGKLLQSDNPLVCSVRDNIVSAMGKSSRTNDGTHKL

SEQ ID NO: 22692 - DNA, 1069 bp, Arabidopsis thaliana
  misc_feature (1)..(1069): Ceres Seq. ID no. 12335511
  misc_feature (1)..(1069): Ortholog of  Ceres SEQ ID NO 12609177 as cited in SEQ ID NO 55753
  misc_feature (1)..(1069): Ortholog of  Ceres SEQ ID NO 12609935 as cited in SEQ ID NO 55757
  misc_feature (1)..(1069): Ortholog of  Ceres SEQ ID NO 13594206 as cited in SEQ ID NO 59075
  misc_feature (1)..(1069): Ortholog of  Ceres SEQ ID NO 13654038 as cited in SEQ ID NO 69261
  misc_feature (1)..(1069): Ortholog of  Ceres SEQ ID NO 14309346 as cited in SEQ ID NO 0
aattctaaattaagaatctctctaatctcttcccaaagaagaatcatcactgaggaagaataaaacatttggggagtttcttcgctaatccttcaaggtgtgacctgagaatcacaacacaaaacaatctcactcgaaattcctttgactcatcatcatcaccatgtggagaagaatcgtctcctctcagctcaaaaccctagccgccgatgtcgtcgctgcttctcctcgtcgatcgatagccgccaccaccagacctgtcggtttctatctcgccgccaatcgatcagccatttccgcatcttctttcgttatccctcgtcgtttcagctccgattcagtagagactcctgcgacgaagaaggtggaggatgtaatgcccattgcgactggacacgagaaggaagagcttgaagctgaacttgagggaaggaggctggatgatattgacttccctgaaggtccttttggaactaaggaagctcctgctattgtgaagtcctactatgacaagcgaattgtgggctgccctggtggtgaaggcgaggacgagcacgatgttgtctggttctggctggagaaaggaaagtcctttgaatgcccggtttgcactcagtactttgagctggaagtggttggtcctggtggtcctccggatggtcacggtgacgaagacgatgagcaccaccactgattccggcctctcccttgccgcaaatttttctttttttatttgcacattttcatatctttaaaaattttatgaatggaataaaacaaaatatctaccgttttggtgaaacacagttgaaaatgttttttgatctttttagaacaagactcggcatcagagtttcccaagtgccaaaactcttatgaccgttgtttttatttttgtaacactcttgaatcagaatcagaatcattcttggcttttgcttattatatgattcaccttttatttatttttatggttcgatgtcttttcatatagggacgttttgatcgtgtccttgattccttgtgaacggtcatataattcaatagattatagaaattccaattttcg

SEQ ID NO: 22693 - protein, 176 aa, Arabidopsis thaliana
  peptide (1)..(176): Ceres Seq. ID no. 12335512
MWRRIVSSQLKTLAADVVAASPRRSIAATTRPVGFYLAANRSAISASSFVIPRRFSSDSVETPATKKVEDVMPIATGHEKEELEAELEGRRLDDIDFPEGPFGTKEAPAIVKSYYDKRIVGCPGGEGEDEHDVVWFWLEKGKSFECPVCTQYFELEVVGPGGPPDGHGDEDDEHHH

SEQ ID NO: 22694 - protein, 105 aa, Arabidopsis thaliana
  peptide (1)..(105): Ceres Seq. ID no. 12335513
MPIATGHEKEELEAELEGRRLDDIDFPEGPFGTKEAPAIVKSYYDKRIVGCPGGEGEDEHDVVWFWLEKGKSFECPVCTQYFELEVVGPGGPPDGHGDEDDEHHH

SEQ ID NO: 22695 - DNA, 983 bp, Arabidopsis thaliana
  misc_feature (1)..(983): Ceres Seq. ID no. 12338048
  misc_feature (1)..(983): Ortholog of  Ceres SEQ ID NO 15226238 as cited in SEQ ID NO 68840
  misc_feature (1)..(983): Ortholog of  Ceres SEQ ID NO 12635175 as cited in SEQ ID NO 0
  misc_feature (1)..(983): Ortholog of  Ceres SEQ ID NO 14306100 as cited in SEQ ID NO 0
acatgtaaattcacatatctctctctcttatttgatcataaagatattattgcttcttcaagtaaacaaaaaatgggaagctttctctacctcatcgtagtcatcttcctcttctcttcatccgttaacgcttgtgatcgatgtcttcaccgttctaaagcagcttatttctcctctgcctctgctctctcttctggagcttgtgcttatggctctatggctacgagtttcttcgccggacatatcgctgcagctatcccttctatctacaaagacggtgctggctgtggagcttgctttcaattcagatgcaagaaccctaagctgtgtagcactaaaggaaccattgtgatgatcacagacttaaacaagagtaaccaaaccgatcttgtccttagtagcagagcttttagagctatggctaaacctattgttggtgctgacaaagaccttctcaaacaaggcattgtcgacatcgaataccaaagagttccttgcgattacggcaacaagaacatgaacgtgagcgtagaagaagcaagcaagaaaccaaactacttagagataaagcttttataccaaggaggtcaaacagaagtagtatccatcgacattgctcaagtcggttcatcgccaaattggggttacatgacaagaagccacggagctgtttgggtaactgacaaagtacccaccggagctatccagttcaggttcgtagtaaccggtggatacgacggtaaaatgatttggtcacagagtgttcttccatccaattgggaagctgggaaaatttacgacgccggtgttcaaatcactgacattgctcaagaaggttgtgatccttgcgatgctcacatctggaactaagttatttagtggcacacaaacaaacatctttcataggtttatatataatgtgtgacagaggttattaatgaacatagttaaagaatgcttaatctaatgattctcatgattct

SEQ ID NO: 22696 - protein, 289 aa, Arabidopsis thaliana
  peptide (1)..(289): Ceres Seq. ID no. 12338049
TCKFTYLSLLFDHKDIIASSSKQKMGSFLYLIVVIFLFSSSVNACDRCLHRSKAAYFSSASALSSGACAYGSMATSFFAGHIAAAIPSIYKDGAGCGACFQFRCKNPKLCSTKGTIVMITDLNKSNQTDLVLSSRAFRAMAKPIVGADKDLLKQGIVDIEYQRVPCDYGNKNMNVSVEEASKKPNYLEIKLLYQGGQTEVVSIDIAQVGSSPNWGYMTRSHGAVWVTDKVPTGAIQFRFVVTGGYDGKMIWSQSVLPSNWEAGKIYDAGVQITDIAQEGCDPCDAHIWN

SEQ ID NO: 22697 - protein, 265 aa, Arabidopsis thaliana
  peptide (1)..(265): Ceres Seq. ID no. 12338050
MGSFLYLIVVIFLFSSSVNACDRCLHRSKAAYFSSASALSSGACAYGSMATSFFAGHIAAAIPSIYKDGAGCGACFQFRCKNPKLCSTKGTIVMITDLNKSNQTDLVLSSRAFRAMAKPIVGADKDLLKQGIVDIEYQRVPCDYGNKNMNVSVEEASKKPNYLEIKLLYQGGQTEVVSIDIAQVGSSPNWGYMTRSHGAVWVTDKVPTGAIQFRFVVTGGYDGKMIWSQSVLPSNWEAGKIYDAGVQITDIAQEGCDPCDAHIWN

SEQ ID NO: 22698 - protein, 217 aa, Arabidopsis thaliana
  peptide (1)..(217): Ceres Seq. ID no. 12338051
MATSFFAGHIAAAIPSIYKDGAGCGACFQFRCKNPKLCSTKGTIVMITDLNKSNQTDLVLSSRAFRAMAKPIVGADKDLLKQGIVDIEYQRVPCDYGNKNMNVSVEEASKKPNYLEIKLLYQGGQTEVVSIDIAQVGSSPNWGYMTRSHGAVWVTDKVPTGAIQFRFVVTGGYDGKMIWSQSVLPSNWEAGKIYDAGVQITDIAQEGCDPCDAHIWN

SEQ ID NO: 22699 - DNA, 1162 bp, Arabidopsis thaliana
  misc_feature (1)..(1162): Ceres Seq. ID no. 12684881
  misc_feature (1)..(1162): Ortholog of  Ceres SEQ ID NO 15227018 as cited in SEQ ID NO 0
aaaaaaccagaaaatggggttgcatccaatttccgacgccaatgaacacaatcccttcggctctctcaccgccgacgaattctacgccaaacattccgttagccactcctccgctttcatcaccaaccctcgcggtctcaaactcttcactcaatggtggtcaccactccctccaactaaaccaatcggtatcatcgctgtcgttcatggcttcaccggcgaatccagttggttccttcagctcacatcaatcctcttcgctaaatccggtttcataacctgcgcaattgatcaccaaggccatggattctccgatggactcatcgctcatatccctgacatcaatcccgtcgtcgatgactgtatctctttcttcgatgacttccgtagccgtcaaacaccgtcagatctgccgtgttttctctactctgaatccctaggcggcgcgattgctctctacatctcgcttcgtcagagaggtgtttgggatggacttatcctcaacggagctatgtgtggaatcagcgataaattcaaaccgccgtggccgttggagcatttgctattcgtcgtcgcgaatcttatccctacttggcgcgttatccccactcgcggatctattcccgatgtttcgttcaaggagccgtggaagaggaagcttgccatggctagcccaaggaggacggtggcgaaaccacgggccgctactgcttatgagctgattcgtgtttgtaaggatctgcaggggaggtttgaggaagtggaggttccgcttctgattgtgcacggcggaggtgatgttgtatgcgacgtagcgtgtgttgaggagcttcatcggagagcgattagtgaggataagacgatcaagatctaccctgagttgtggcatcagatgattggggaatcggaggagaaagtcgatctggtttacggtgatatgctgagctggctcaagagtcgagctgaaaggaaggcacgcgccgccgttgatggaggagcagcttagagtcccttttgagtctttgggtgttgtattgtagtccaataggactgtgccatctggcaagaaactatttatggttttactgtttcgtaatcgtagcacatggtttacagttaaaccaatacctttgggtatcatcaataatataaaaaatcgttg

SEQ ID NO: 22700 - protein, 334 aa, Arabidopsis thaliana
  peptide (1)..(334): Ceres Seq. ID no. 12684882
KNQKMGLHPISDANEHNPFGSLTADEFYAKHSVSHSSAFITNPRGLKLFTQWWSPLPPTKPIGIIAVVHGFTGESSWFLQLTSILFAKSGFITCAIDHQGHGFSDGLIAHIPDINPVVDDCISFFDDFRSRQTPSDLPCFLYSESLGGAIALYISLRQRGVWDGLILNGAMCGISDKFKPPWPLEHLLFVVANLIPTWRVIPTRGSIPDVSFKEPWKRKLAMASPRRTVAKPRAATAYELIRVCKDLQGRFEEVEVPLLIVHGGGDVVCDVACVEELHRRAISEDKTIKIYPELWHQMIGESEEKVDLVYGDMLSWLKSRAERKARAAVDGGAA

SEQ ID NO: 22701 - protein, 330 aa, Arabidopsis thaliana
  peptide (1)..(330): Ceres Seq. ID no. 12684883
MGLHPISDANEHNPFGSLTADEFYAKHSVSHSSAFITNPRGLKLFTQWWSPLPPTKPIGIIAVVHGFTGESSWFLQLTSILFAKSGFITCAIDHQGHGFSDGLIAHIPDINPVVDDCISFFDDFRSRQTPSDLPCFLYSESLGGAIALYISLRQRGVWDGLILNGAMCGISDKFKPPWPLEHLLFVVANLIPTWRVIPTRGSIPDVSFKEPWKRKLAMASPRRTVAKPRAATAYELIRVCKDLQGRFEEVEVPLLIVHGGGDVVCDVACVEELHRRAISEDKTIKIYPELWHQMIGESEEKVDLVYGDMLSWLKSRAERKARAAVDGGAA

SEQ ID NO: 22702 - DNA, 1405 bp, Arabidopsis thaliana
  misc_feature (1)..(1405): Ceres Seq. ID no. 13494273
  misc_feature (1)..(1405): Ortholog of  Ceres SEQ ID NO 13596370 as cited in SEQ ID NO 68071
tggcatcaacgaagaagaagaagaaaaggacgagtagattgatttcttagacgacggagaaatgcgagtgatgagatcattgcgcggtaattccggtgctggattggttttccggccggcgaggttaaattctcttcggagcgtctttaccggttgccgtgctgtgattttgccccgctttggtggtccggaggtttttgagctccgggagaatgttccggtgccgaatctgaatccaaatgaggttcttgtcaaggcgaaagctgtctccgttaatcctcttgattgcagaatacgagctggatatggacgttctgtattccaaccgcatctacctattatagttggacgtgatgtcagtggtgaagttgcggcaattgggacttcagtaaagtcacttaaagtaggacaagaagtttttggtgcgttgcatccgacggcgttaagaggtacttatactgactatggaattctttcggaagacgaactcacggaaaagccatcatcaatttcacatgtggaagcaagtgccattccttttgcagctttgactgcttggcgtgctttgaagagtaatgcaaggataactgaaggacaaagactattagtctttggaggaggaggagcagtaggtttttctgcaatccagcttgcggtagcatctgggtgtcatgttacagcctcttgtgttggtcagactaaagacagaatacttgcagctggggccgagcaagctgttgactacacaaccgaggacattgagttggcggtaaaaggaaaatttgatgccgtgttagatactattggtgggcctgaaacggagagaataggcattaacttcttaaggaagggtggaaactatatgactcttcagggtgaggctgcatcgttgactgataaatacggttttgtggttgggcttccccttgcaacatcgctcttgatgaagaaaaagatacaatatcagtattctcatggaatagactattggtggacgtatatgagggctgatcctgaaggtctagccgagattcagcgtttagttggagctggaaagctaaaaatacctgttgaaaaaacatttccaataaccgatgttgtagcagctcatgaagccaaggagaagaaacagattccgggtaaggtggttctagagttctgaactacatatacatagtagaaataataacacctgcatagttctctagcagttgttctttctagaatttacacgcagagaaacaaatgtttcgcgtctggagttttctgtaaatgagatctatcaggcttagattcagatcaagaacttgaagtgtctgtatagactttccaaagggttcgtttttatttggattttgtctgtgttgcaaactactaagccaagtaatggaaatggtttagaaag

SEQ ID NO: 22703 - protein, 366 aa, Arabidopsis thaliana
  peptide (1)..(366): Ceres Seq. ID no. 13494274
MRVMRSLRGNSGAGLVFRPARLNSLRSVFTGCRAVILPRFGGPEVFELRENVPVPNLNPNEVLVKAKAVSVNPLDCRIRAGYGRSVFQPHLPIIVGRDVSGEVAAIGTSVKSLKVGQEVFGALHPTALRGTYTDYGILSEDELTEKPSSISHVEASAIPFAALTAWRALKSNARITEGQRLLVFGGGGAVGFSAIQLAVASGCHVTASCVGQTKDRILAAGAEQAVDYTTEDIELAVKGKFDAVLDTIGGPETERIGINFLRKGGNYMTLQGEAASLTDKYGFVVGLPLATSLLMKKKIQYQYSHGIDYWWTYMRADPEGLAEIQRLVGAGKLKIPVEKTFPITDVVAAHEAKEKKQIPGKVVLEF

SEQ ID NO: 22704 - protein, 363 aa, Arabidopsis thaliana
  peptide (1)..(363): Ceres Seq. ID no. 13494275
MRSLRGNSGAGLVFRPARLNSLRSVFTGCRAVILPRFGGPEVFELRENVPVPNLNPNEVLVKAKAVSVNPLDCRIRAGYGRSVFQPHLPIIVGRDVSGEVAAIGTSVKSLKVGQEVFGALHPTALRGTYTDYGILSEDELTEKPSSISHVEASAIPFAALTAWRALKSNARITEGQRLLVFGGGGAVGFSAIQLAVASGCHVTASCVGQTKDRILAAGAEQAVDYTTEDIELAVKGKFDAVLDTIGGPETERIGINFLRKGGNYMTLQGEAASLTDKYGFVVGLPLATSLLMKKKIQYQYSHGIDYWWTYMRADPEGLAEIQRLVGAGKLKIPVEKTFPITDVVAAHEAKEKKQIPGKVVLEF

SEQ ID NO: 22705 - DNA, 1312 bp, Arabidopsis thaliana
  misc_feature (1)..(1312): Ceres Seq. ID no. 12322145
  misc_feature (1)..(1312): Ortholog of  Ceres SEQ ID NO 14312208 as cited in SEQ ID NO 54845
  misc_feature (1)..(1312): Ortholog of  Ceres SEQ ID NO 15171755 as cited in SEQ ID NO 57047
  misc_feature (1)..(1312): Ortholog of  Ceres SEQ ID NO 13597613 as cited in SEQ ID NO 65334
  misc_feature (1)..(1312): Ortholog of  Ceres SEQ ID NO 13655958 as cited in SEQ ID NO 65456
  misc_feature (1)..(1312): Ortholog of  Ceres SEQ ID NO 14303664 as cited in SEQ ID NO 65892
  misc_feature (1)..(1312): Ortholog of  Ceres SEQ ID NO 15178832 as cited in SEQ ID NO 0
tcctctgacggttcttttcttccttcgtcctctcgttttttttgtttcgtcgtctctctctcgcgctctgaaaaattcgcagaatccgtcatgtcttccggcgtaaattcaactggctccgccgcagcagcaccggaggttgacaagatgttcttctgctaccagtgcaatcaaacagtcacaatctcaatttcctcatccgctgatcctttttgtccaatttgtaaccaagggtttcttgaagaatacgaagaccctaaccctaatcaatccctcaatttcaaccctaactcttctgattcctttttccccatggccgatcctttctccaccttgctcccgctcatattcggctcttccgctgccgctccttccggcatggacttcatgagcttattcggtccttcgatgcaaccacaggctcgttccactcagcagaatcctcagtctgacgcgtttgatccgtttacgtttcttcagaatcatctccagactttgcgatctagcggtacgcactttgagttcgtgatcgagaatcatccttcggatccaggtaatcgtatgcctgggaatttcggtgattacttctttggtccaggtcttgagcagttgattcagcaactagctgagaatgatcctaatcgttacggaactcctcctgcttccaaatccgccattgatgctcttcctactgttaaggtaacgaaggatatgttgaaatcggagatgaaccaatgcgcggtgtgtatggatgagtttgaggatggtagcgatgttaagcagatgccttgtaagcacgtctttcatcaggactgtttgctcccttggctggagttgcataattcgtgtcctgtttgtcgattcgagttgcctacggatgatcctgattatgagaacaggagtcaaggaagtcaggggagtggtgatggacaaggatcggttgagggtcagcagacgccgaggtttagtatacaacttccttggccgttcaggagacaagatggctctggttcaggctcgggagcacctggtactggtggaggtaatcttgagaccaggggtgaagatttggattgagaatgtgttggccagtcattgcttggaaactggatcagaaggatatctatcccaagttctccaacaaaaaatgaaaaaacagttttattagggaaacaaaagtgacattgaggtcttaccatattttgtacatttaaaaaaagttatttttttcgttgttattttgggattatataacgaatgtgaaagtttttaaaaatcgcaaattttcaattgagtgttgtttatttttctc

SEQ ID NO: 22706 - protein, 358 aa, Arabidopsis thaliana
  peptide (1)..(358): Ceres Seq. ID no. 12322146
SSDGSFLPSSSRFFCFVVSLSRSEKFAESVMSSGVNSTGSAAAAPEVDKMFFCYQCNQTVTISISSSADPFCPICNQGFLEEYEDPNPNQSLNFNPNSSDSFFPMADPFSTLLPLIFGSSAAAPSGMDFMSLFGPSMQPQARSTQQNPQSDAFDPFTFLQNHLQTLRSSGTHFEFVIENHPSDPGNRMPGNFGDYFFGPGLEQLIQQLAENDPNRYGTPPASKSAIDALPTVKVTKDMLKSEMNQCAVCMDEFEDGSDVKQMPCKHVFHQDCLLPWLELHNSCPVCRFELPTDDPDYENRSQGSQGSGDGQGSVEGQQTPRFSIQLPWPFRRQDGSGSGSGAPGTGGGNLETRGEDLD

SEQ ID NO: 22707 - protein, 328 aa, Arabidopsis thaliana
  peptide (1)..(328): Ceres Seq. ID no. 12322147
MSSGVNSTGSAAAAPEVDKMFFCYQCNQTVTISISSSADPFCPICNQGFLEEYEDPNPNQSLNFNPNSSDSFFPMADPFSTLLPLIFGSSAAAPSGMDFMSLFGPSMQPQARSTQQNPQSDAFDPFTFLQNHLQTLRSSGTHFEFVIENHPSDPGNRMPGNFGDYFFGPGLEQLIQQLAENDPNRYGTPPASKSAIDALPTVKVTKDMLKSEMNQCAVCMDEFEDGSDVKQMPCKHVFHQDCLLPWLELHNSCPVCRFELPTDDPDYENRSQGSQGSGDGQGSVEGQQTPRFSIQLPWPFRRQDGSGSGSGAPGTGGGNLETRGEDLD

SEQ ID NO: 22708 - protein, 309 aa, Arabidopsis thaliana
  peptide (1)..(309): Ceres Seq. ID no. 12322148
MFFCYQCNQTVTISISSSADPFCPICNQGFLEEYEDPNPNQSLNFNPNSSDSFFPMADPFSTLLPLIFGSSAAAPSGMDFMSLFGPSMQPQARSTQQNPQSDAFDPFTFLQNHLQTLRSSGTHFEFVIENHPSDPGNRMPGNFGDYFFGPGLEQLIQQLAENDPNRYGTPPASKSAIDALPTVKVTKDMLKSEMNQCAVCMDEFEDGSDVKQMPCKHVFHQDCLLPWLELHNSCPVCRFELPTDDPDYENRSQGSQGSGDGQGSVEGQQTPRFSIQLPWPFRRQDGSGSGSGAPGTGGGNLETRGEDLD

SEQ ID NO: 22709 - DNA, 1220 bp, Arabidopsis thaliana
  misc_feature (1)..(1220): Ceres Seq. ID no. 12489325
  misc_feature (1)..(1220): Ortholog of  Ceres SEQ ID NO 14301526 as cited in SEQ ID NO 68130
actacttcagtcttcaagcttcacttctcagaagaaagtaagatctgcgaatctctctcactctcacaaatggcaacgcttttaggtttctctcagactaagtttcaccattgcggcgtctggatttctacgccgccgtgctcatcttcttccacggtagtctcaatggtgggcttgaatcggactgattcgaaaaagctccgttcagatttcctcggccagattggttacgaagatcggagacaagtaagacacagttactgtagaagctcattagctgtgaaaatgtcgtgggacggtcctcttgcttccgtcaagttgatcatccaaggaaaaaacctcgagttatcagagccaattaagcagcatgttgaagagaaagtaggcaaatctgttcagaaacacagtcatcttgtgagagaagttgatgtaagactctctgttcgtggtggagagtttggtaaaggccctaggattcgaagatgtgaggtgacattgtttacaaagaagcatggtgttgtgcgtgctgaggaagatgctgagacagtatacgcttgtatcgacttggtatcaacgataatacagaggaagctgaggaagatcaaggagaaggactcagaccatggaaggcacatgaaaggtttcaacagattgaaggtaagggaaccagtgattgagccggttgtggaggatgttgaggacagtactgactcgagcgtaggagaagaagaagaagaggatgatttgatcaaggagattgtccgtaccaagactttcgagatgccaccattgactgtcgctgaggcagtcgagcagctggaactagtcagtcacgacttctatggcttccaaaatgaagaaactggtgagataaacatagtgtacaagagaaaagaaggaggttacggtctgataatcccaaagaaagacgggaaggccgagaaggttgagccgcttccaaccgagcaattgaatgaacactctttcgccgagtagactgcctctgctcacaccaaaaccgataagctcatctctccttacagtttacctgtgtaggagttagggttcttgaataaacaatgcaacaaagattgtagaagtcagtgtacataaaaaaatggccaaccactctttgttacttttgtggtgaaaaggaagatcttaattctctttccatcagatgatagcaatacattttttcataaacaagaatgttacat

SEQ ID NO: 22710 - protein, 331 aa, Arabidopsis thaliana
  peptide (1)..(331): Ceres Seq. ID no. 12489326
TTSVFKLHFSEESKICESLSLSQMATLLGFSQTKFHHCGVWISTPPCSSSSTVVSMVGLNRTDSKKLRSDFLGQIGYEDRRQVRHSYCRSSLAVKMSWDGPLASVKLIIQGKNLELSEPIKQHVEEKVGKSVQKHSHLVREVDVRLSVRGGEFGKGPRIRRCEVTLFTKKHGVVRAEEDAETVYACIDLVSTIIQRKLRKIKEKDSDHGRHMKGFNRLKVREPVIEPVVEDVEDSTDSSVGEEEEEDDLIKEIVRTKTFEMPPLTVAEAVEQLELVSHDFYGFQNEETGEINIVYKRKEGGYGLIIPKKDGKAEKVEPLPTEQLNEHSFAE

SEQ ID NO: 22711 - protein, 308 aa, Arabidopsis thaliana
  peptide (1)..(308): Ceres Seq. ID no. 12489327
MATLLGFSQTKFHHCGVWISTPPCSSSSTVVSMVGLNRTDSKKLRSDFLGQIGYEDRRQVRHSYCRSSLAVKMSWDGPLASVKLIIQGKNLELSEPIKQHVEEKVGKSVQKHSHLVREVDVRLSVRGGEFGKGPRIRRCEVTLFTKKHGVVRAEEDAETVYACIDLVSTIIQRKLRKIKEKDSDHGRHMKGFNRLKVREPVIEPVVEDVEDSTDSSVGEEEEEDDLIKEIVRTKTFEMPPLTVAEAVEQLELVSHDFYGFQNEETGEINIVYKRKEGGYGLIIPKKDGKAEKVEPLPTEQLNEHSFAE

SEQ ID NO: 22712 - protein, 276 aa, Arabidopsis thaliana
  peptide (1)..(276): Ceres Seq. ID no. 12489328
MVGLNRTDSKKLRSDFLGQIGYEDRRQVRHSYCRSSLAVKMSWDGPLASVKLIIQGKNLELSEPIKQHVEEKVGKSVQKHSHLVREVDVRLSVRGGEFGKGPRIRRCEVTLFTKKHGVVRAEEDAETVYACIDLVSTIIQRKLRKIKEKDSDHGRHMKGFNRLKVREPVIEPVVEDVEDSTDSSVGEEEEEDDLIKEIVRTKTFEMPPLTVAEAVEQLELVSHDFYGFQNEETGEINIVYKRKEGGYGLIIPKKDGKAEKVEPLPTEQLNEHSFAE

SEQ ID NO: 22713 - DNA, 1254 bp, Arabidopsis thaliana
  misc_feature (1)..(1254): Ceres Seq. ID no. 12726211
  misc_feature (1)..(1254): Ortholog of  Ceres SEQ ID NO 15177104 as cited in SEQ ID NO 56048
gactggattactcacctactcgagagtggtttagcttttttgtaccgtacatcttcttcccagaaacatggctgaggcttctgatttgttggaatggcctaagaaggataaccgtcgttttctccatgttgtctaccgcgttggtgatcttgatcgcaccattgagttttacactgaggtctttggtatgaagctgttgaggaaaagagatatccctgaggagaagtattctaatgcttttcttggttttggacctgaaacatctaactttgttgtggagctcacatataactatggtgttagctcatatgatattggaactggctttgggcattttgccatttcaactcaagatgtttccaaactggttgagaacgtccgtgccaagggtggaaatgtgactagggaacctggtccagtcaaaggtggaggcagtgtcattgcgtttgtgaaggaccctgatggctacacttttgagctcatccagagaggtccaactcctgaacctttctgccaagtcatgcttcgtgttggtgatctcgaccgtgccatcaaattctatgaaaaggccctcgggatgagactcttgagaaagattgagagacctgagtacaagtacaccataggcatgatggggtatgctgaagaatacgagtcgatagttttggagctgacctataactacgacgtgactgagtacacaaagggcaatgcatatgcacagattgcaataggcacagatgatgtgtacaaaagcggtgaagttattaagatagtcaaccaagagctaggaggaaagatcactagagaagccggacctcttcctggactcggcaccaagattgtctcattccttgatccagatggctggaaaacggttttggtggacaacaaagattttctcaaggaactggaatgagaagagcgatgaatgaaggtcgagatcacaaaaccataataataaaaatgtgatcataaaataaaaggaagacttagagtttgatctaaaataagaagatgtggtttagtttgtgtcgtgctatgtgtgtgtgctcgtttcttttgtctttgagcttaaaagttaaaactctagtctatatggacctgaataaaaatatttccaccaccttgaggttttggtgtttgcggttatggacggtttattgaatgtaatattttcgtaccaaatcggtttactagatttgagacggatcatatggctcttcttggaaaaagagacggtttaaatcggtt

SEQ ID NO: 22714 - protein, 283 aa, Arabidopsis thaliana
  peptide (1)..(283): Ceres Seq. ID no. 12726212
MAEASDLLEWPKKDNRRFLHVVYRVGDLDRTIEFYTEVFGMKLLRKRDIPEEKYSNAFLGFGPETSNFVVELTYNYGVSSYDIGTGFGHFAISTQDVSKLVENVRAKGGNVTREPGPVKGGGSVIAFVKDPDGYTFELIQRGPTPEPFCQVMLRVGDLDRAIKFYEKALGMRLLRKIERPEYKYTIGMMGYAEEYESIVLELTYNYDVTEYTKGNAYAQIAIGTDDVYKSGEVIKIVNQELGGKITREAGPLPGLGTKIVSFLDPDGWKTVLVDNKDFLKELE

SEQ ID NO: 22715 - protein, 243 aa, Arabidopsis thaliana
  peptide (1)..(243): Ceres Seq. ID no. 12726213
MKLLRKRDIPEEKYSNAFLGFGPETSNFVVELTYNYGVSSYDIGTGFGHFAISTQDVSKLVENVRAKGGNVTREPGPVKGGGSVIAFVKDPDGYTFELIQRGPTPEPFCQVMLRVGDLDRAIKFYEKALGMRLLRKIERPEYKYTIGMMGYAEEYESIVLELTYNYDVTEYTKGNAYAQIAIGTDDVYKSGEVIKIVNQELGGKITREAGPLPGLGTKIVSFLDPDGWKTVLVDNKDFLKELE

SEQ ID NO: 22716 - DNA, 1318 bp, Arabidopsis thaliana
  misc_feature (1)..(1318): Ceres Seq. ID no. 12370474
  misc_feature (1)..(1318): Ortholog of  Ceres SEQ ID NO 15179641 as cited in SEQ ID NO 56414
  misc_feature (1)..(1318): Ortholog of  Ceres SEQ ID NO 14316049 as cited in SEQ ID NO 67036
  misc_feature (1)..(1318): Ortholog of  Ceres SEQ ID NO 14313252 as cited in SEQ ID NO 67134
  misc_feature (1)..(1318): Ortholog of  Ceres SEQ ID NO 14302220 as cited in SEQ ID NO 69121
aaaacccaaaccctcactcactattttcacattcttcttctctctcgatatcatctaaatctctctcttgatctcaatttcgcaaaatggctgacaagaagatcagaatcggaatcaacggtttcggaagaatcggtcgtttggttgctagagttgttcttcagagggatgatgttgagctcgtcgctgttaacgatcctttcatcaccaccgagtacatgacatacatgtttaagtatgacagtgttcacggtcagtggaagcaccatgagcttaaggtgaaggatgacaaaactcttctcttcggtgagaagccagtcactgttttcggcatcaggaaccctgaggacatcccatggggtgaggctggagctgactttgttgttgagtctactggtgtcttcactgacaaagacaaggctgctgctcacttgaagggtggtgctaaaaaggttgtcatctctgccccaagcaaagatgcgcccatgttcgttgttggtgtcaacgagcacgagtacaagtctgaccttgacattgtttccaacgctagttgcaccactaactgccttgctcctcttgccaaggttattaatgacaggtttggcattgttgagggactcatgaccactgtccactctatcactgctactcagaagacagttgatggtccatcaatgaaggactggagaggtggaagagctgcttccttcaacattattcctagcagcactggtgccgccaaggctgttgggaaagtgttgccatccctcaatggaaaattgaccggaatgtctttccgtgttccaaccgttgatgtctcagttgttgatctcaccgttagacttgagaaagctgcaacatacgacgaaatcaagaaggccatcaaggaggaatctgaaggcaaaatgaagggaattttgggatacactgaggatgatgttgtgtctaccgactttgttggtgacaacaggtcaagcattttcgatgccaaggctgggattgcattgagcgacaagtttgtgaagttggtgtcatggtacgacaacgaatggggttacagttctcgtgtcgttgaccttatcgttcacatgtcaaaggcctaagcttacaccggcgagagtttgtgtgtggttgagttcgtactgttctgaataaaaaaaaggagaaaagaaaactcgagttgttatgttttttcactgattccatgcgcagtcatgagagtttgtagcttttgtctttttgctttctcttaatgtttccctgctttatttactgaaaccattggtttggttttttatgttaattaagtttttagtcc

SEQ ID NO: 22717 - protein, 338 aa, Arabidopsis thaliana
  peptide (1)..(338): Ceres Seq. ID no. 12370475
MADKKIRIGINGFGRIGRLVARVVLQRDDVELVAVNDPFITTEYMTYMFKYDSVHGQWKHHELKVKDDKTLLFGEKPVTVFGIRNPEDIPWGEAGADFVVESTGVFTDKDKAAAHLKGGAKKVVISAPSKDAPMFVVGVNEHEYKSDLDIVSNASCTTNCLAPLAKVINDRFGIVEGLMTTVHSITATQKTVDGPSMKDWRGGRAASFNIIPSSTGAAKAVGKVLPSLNGKLTGMSFRVPTVDVSVVDLTVRLEKAATYDEIKKAIKEESEGKMKGILGYTEDDVVSTDFVGDNRSSIFDAKAGIALSDKFVKLVSWYDNEWGYSSRVVDLIVHMSKA

SEQ ID NO: 22718 - protein, 294 aa, Arabidopsis thaliana
  peptide (1)..(294): Ceres Seq. ID no. 12370476
MTYMFKYDSVHGQWKHHELKVKDDKTLLFGEKPVTVFGIRNPEDIPWGEAGADFVVESTGVFTDKDKAAAHLKGGAKKVVISAPSKDAPMFVVGVNEHEYKSDLDIVSNASCTTNCLAPLAKVINDRFGIVEGLMTTVHSITATQKTVDGPSMKDWRGGRAASFNIIPSSTGAAKAVGKVLPSLNGKLTGMSFRVPTVDVSVVDLTVRLEKAATYDEIKKAIKEESEGKMKGILGYTEDDVVSTDFVGDNRSSIFDAKAGIALSDKFVKLVSWYDNEWGYSSRVVDLIVHMSKA

SEQ ID NO: 22719 - protein, 291 aa, Arabidopsis thaliana
  peptide (1)..(291): Ceres Seq. ID no. 12370477
MFKYDSVHGQWKHHELKVKDDKTLLFGEKPVTVFGIRNPEDIPWGEAGADFVVESTGVFTDKDKAAAHLKGGAKKVVISAPSKDAPMFVVGVNEHEYKSDLDIVSNASCTTNCLAPLAKVINDRFGIVEGLMTTVHSITATQKTVDGPSMKDWRGGRAASFNIIPSSTGAAKAVGKVLPSLNGKLTGMSFRVPTVDVSVVDLTVRLEKAATYDEIKKAIKEESEGKMKGILGYTEDDVVSTDFVGDNRSSIFDAKAGIALSDKFVKLVSWYDNEWGYSSRVVDLIVHMSKA

SEQ ID NO: 22720 - DNA, 1612 bp, Arabidopsis thaliana
  misc_feature (1)..(1612): Ceres Seq. ID no. 13490680
  misc_feature (1)..(1612): Ortholog of  Ceres SEQ ID NO 12625388 as cited in SEQ ID NO 63299
  misc_feature (1)..(1612): Ortholog of  Ceres SEQ ID NO 15179860 as cited in SEQ ID NO 66716
cgctacttctctctctatatataaactccttaccactctctttttctgattttttgacgttaagagatagaaacagagagagatagagagatagagttatggctttggcgatgatgatccgaaacgcagcttcgaagcgaggaatgactccgatctccggtcatttcggtggtttgagatctatgtcttcatggtggaagagcgttgagcctgctcctaaagatccgatcctcggagttaccgaagcttttctcgctgatcctagtcctgaaaaagttaatgttggtgtgggagcatatcgtgatgataatgggaagcctgttgtcttggaatgtgtcagagaagctgagaaaaggcttgctgggagcactttcatggagtaccttcctatgggaggaagtgccaaaatggtggacctaacattgaagcttgcctatggggacaatagtgaatttatcaaagataaaagaattgctgcagttcagactctgtctggcactggagcctgccggctctttgcagacttccagaaacgtttttctcctggttcacagatctacattcctgttccaacctggtccaaccaccacaacatctggaaagatgcacaagtccctcaaaagacatatcattactatcatccagaaaccaagggcttggatttctcagcattgatggatgatgtgaagaatgctccggaagggtcattcttccttcttcatgcttgtgctcataatcctactggagtagaccctacagaggaacaatggagagagatatcacagctattcaaggctaaaaagcatttcgcattcttcgatatggcttaccaaggttttgctagtggagatccagcgagagatgccaagtccatcaggatctttcttgaagatggtcatcatattggaatttctcagtcctatgcaaaaaacatgggactctacggccagagggtgggatgtctcagtgtgctttgtgaagatccgaagcaagccgtggctgtgaaaagtcaattgcagcagctagctagaccaatgtacagcaacccacctttgcatggtgctcagctggtctcaaccattcttgaagacccagagttaaagagtctgtggctaaaagaagttaaggtcatggctgataggatcatcggcatgagaactactttgcgagaaagccttgagaagttaggatcgcctttgtcatgggagcacgttaccaaacagattggaatgttctgctacagtgggttaacaccagaacaggttgaccgcttaacaagcgaatatcacatctatatgacccgtaacggccgtatcagtatggctggtgttacaacaggaaacgtgggataccttgcgaatgctatacatgaagtcaccaagtcatcttaaatcatttacttacatgtttcagccaaacatacaaattttgtttgaagagtcaataagacaggaggctagatttgtacttctgcaattggttttgtgggaactgaaagtttacccataaacagtaatttattagcgcattttttcgttagctgggcaataaaagcaaagcctaaacgatggatttttggatatacaaaattcggattgttttctttcttctc

SEQ ID NO: 22721 - protein, 430 aa, Arabidopsis thaliana
  peptide (1)..(430): Ceres Seq. ID no. 13490681
MALAMMIRNAASKRGMTPISGHFGGLRSMSSWWKSVEPAPKDPILGVTEAFLADPSPEKVNVGVGAYRDDNGKPVVLECVREAEKRLAGSTFMEYLPMGGSAKMVDLTLKLAYGDNSEFIKDKRIAAVQTLSGTGACRLFADFQKRFSPGSQIYIPVPTWSNHHNIWKDAQVPQKTYHYYHPETKGLDFSALMDDVKNAPEGSFFLLHACAHNPTGVDPTEEQWREISQLFKAKKHFAFFDMAYQGFASGDPARDAKSIRIFLEDGHHIGISQSYAKNMGLYGQRVGCLSVLCEDPKQAVAVKSQLQQLARPMYSNPPLHGAQLVSTILEDPELKSLWLKEVKVMADRIIGMRTTLRESLEKLGSPLSWEHVTKQIGMFCYSGLTPEQVDRLTSEYHIYMTRNGRISMAGVTTGNVGYLANAIHEVTKSS

SEQ ID NO: 22722 - protein, 426 aa, Arabidopsis thaliana
  peptide (1)..(426): Ceres Seq. ID no. 13490682
MMIRNAASKRGMTPISGHFGGLRSMSSWWKSVEPAPKDPILGVTEAFLADPSPEKVNVGVGAYRDDNGKPVVLECVREAEKRLAGSTFMEYLPMGGSAKMVDLTLKLAYGDNSEFIKDKRIAAVQTLSGTGACRLFADFQKRFSPGSQIYIPVPTWSNHHNIWKDAQVPQKTYHYYHPETKGLDFSALMDDVKNAPEGSFFLLHACAHNPTGVDPTEEQWREISQLFKAKKHFAFFDMAYQGFASGDPARDAKSIRIFLEDGHHIGISQSYAKNMGLYGQRVGCLSVLCEDPKQAVAVKSQLQQLARPMYSNPPLHGAQLVSTILEDPELKSLWLKEVKVMADRIIGMRTTLRESLEKLGSPLSWEHVTKQIGMFCYSGLTPEQVDRLTSEYHIYMTRNGRISMAGVTTGNVGYLANAIHEVTKSS

SEQ ID NO: 22723 - protein, 425 aa, Arabidopsis thaliana
  peptide (1)..(425): Ceres Seq. ID no. 13490683
MIRNAASKRGMTPISGHFGGLRSMSSWWKSVEPAPKDPILGVTEAFLADPSPEKVNVGVGAYRDDNGKPVVLECVREAEKRLAGSTFMEYLPMGGSAKMVDLTLKLAYGDNSEFIKDKRIAAVQTLSGTGACRLFADFQKRFSPGSQIYIPVPTWSNHHNIWKDAQVPQKTYHYYHPETKGLDFSALMDDVKNAPEGSFFLLHACAHNPTGVDPTEEQWREISQLFKAKKHFAFFDMAYQGFASGDPARDAKSIRIFLEDGHHIGISQSYAKNMGLYGQRVGCLSVLCEDPKQAVAVKSQLQQLARPMYSNPPLHGAQLVSTILEDPELKSLWLKEVKVMADRIIGMRTTLRESLEKLGSPLSWEHVTKQIGMFCYSGLTPEQVDRLTSEYHIYMTRNGRISMAGVTTGNVGYLANAIHEVTKSS

SEQ ID NO: 22724 - DNA, 1061 bp, Arabidopsis thaliana
  misc_feature (1)..(1061): Ceres Seq. ID no. 12324892
  misc_feature (1)..(1061): Ortholog of  Ceres SEQ ID NO 12784064 as cited in SEQ ID NO 66982
  misc_feature (1)..(1061): Ortholog of  Ceres SEQ ID NO 15177907 as cited in SEQ ID NO 0
gtcttcgttgctttttcgagcggtgcctagtctcaacttccatggctgacatcttaccttcaaattttctcaaaccaaccaaaaagcttcttctccttttctaaaatttcatcaaaccctatagggttttctcaatacaattgattttttttttcttcttcttctctatggatacgaccctttctcccgccgtggaggcggaacaaatcgccgactcaacgatcgacactgtttctcgtttgatcgccggcgttttctccggcgcacttactggaatcttcgctatggctggagcttttactggagctgtaactggtgcggtggcaggaagagctgcacagtatggagttctccgtggggctgcacttggcgctgttgctggagctatcctctctgttgaagtgttggaggcttctcgtgcgtattggtatttagagctgtcaggatcaaggggtccatcatctatggcagattttgtagagcaactgtttcgtgggagactggtagatgaacaacttatgtcaacaatgataaattcacaccattggcagttaaggatttccgatgtaagttatgaagagcgggaggatgtttatggtgaactggaagctagaggcttatcgggtgactctttaaggaaactaccatgctatataatgtcaagtgaaatggtcaggaggcaggtcactcactgcacaatttgtctgcaggacatcaaaacaggggaaatcacacgaagcttaccgaaatgtgatcatacgtttcatctggtatgtgttgataaatggctcatcagacacgggtcatgccccatttgcagacaggcagttaaagattaaaacacgactgttgccgagctgtgtacatagcaaaaacacattatccttatatgttgttgtaacttgtaagtctaaaacccctttcttctgtatttttcctcatttcatttagagcaatctcagcttgagccataggtttcgacttttgaatgtatattgttgtagacatgaataagaatacctacagatgtattgaaaagaatatagaactcgatcaagtcg

SEQ ID NO: 22725 - protein, 223 aa, Arabidopsis thaliana
  peptide (1)..(223): Ceres Seq. ID no. 12324893
MDTTLSPAVEAEQIADSTIDTVSRLIAGVFSGALTGIFAMAGAFTGAVTGAVAGRAAQYGVLRGAALGAVAGAILSVEVLEASRAYWYLELSGSRGPSSMADFVEQLFRGRLVDEQLMSTMINSHHWQLRISDVSYEEREDVYGELEARGLSGDSLRKLPCYIMSSEMVRRQVTHCTICLQDIKTGEITRSLPKCDHTFHLVCVDKWLIRHGSCPICRQAVKD

SEQ ID NO: 22726 - protein, 184 aa, Arabidopsis thaliana
  peptide (1)..(184): Ceres Seq. ID no. 12324894
MAGAFTGAVTGAVAGRAAQYGVLRGAALGAVAGAILSVEVLEASRAYWYLELSGSRGPSSMADFVEQLFRGRLVDEQLMSTMINSHHWQLRISDVSYEEREDVYGELEARGLSGDSLRKLPCYIMSSEMVRRQVTHCTICLQDIKTGEITRSLPKCDHTFHLVCVDKWLIRHGSCPICRQAVKD

SEQ ID NO: 22727 - protein, 124 aa, Arabidopsis thaliana
  peptide (1)..(124): Ceres Seq. ID no. 12324895
MADFVEQLFRGRLVDEQLMSTMINSHHWQLRISDVSYEEREDVYGELEARGLSGDSLRKLPCYIMSSEMVRRQVTHCTICLQDIKTGEITRSLPKCDHTFHLVCVDKWLIRHGSCPICRQAVKD

SEQ ID NO: 22728 - DNA, 1110 bp, Arabidopsis thaliana
  misc_feature (1)..(1110): Ceres Seq. ID no. 13491986
  misc_feature (1)..(1110): Ortholog of  Ceres SEQ ID NO 15175425 as cited in SEQ ID NO 0
aattatttccggccatcactttcttctctacttctttctttctctctctagttgttgttctctctctctctcgcatcctccaattcatcgtcctcacgttcccttttgtttattcatcttccttccttcttcacatttctgattttctctatttggggggtttgtttccacattatacatatctagggttttgagatggttaattgaaagataatggtcgaagtttcggaggaattggcttcacattgtgggtgtttctggcttcctcaggtttaaatctgaggttgatctcttttgttttttggtaaattgtgacatattttggctcgaagaagaagaagaagaggcaatgagcgcatcaaggttcataaagtgcgtcaccgttggtgatggagctgttggtaaaacctgtttgctgatttcttataccagcaacacctttcccacggattatgttccgactgttttcgataactttagtgcaaatgtggttgttaatggagccacggtgaatcttggattgtgggatactgcagggcaagaggactataacagattaagacctttgagttaccgtggtgctgatgttttcattcttgccttctctctcattagtaaggctagttatgagaatgtttccaagaagtggattcctgagttgaagcactatgctcctggtgtcccaattgtccttgttggaaccaaactagatcttcgagatgacaaacagtttttcatcgaccatcctggtgctgtccctattaccactgttcagggagaggagctgaagaagctaattggagcgccagcttacatcgagtgcagttcaaaatcacaagagaacgtgaagggcgtgtttgatgcagcgatcagagtggtccttcaacctccaaagcagaagaaaaagaagaacaaagcacaaaaggcctgctccatcttgtaatagcactcatggaagtcaagaagctctttgagatgaggatgacagggtggtttaaaaaagtatcgctttttcatttttgttgttgttttccgttttcatttgtgatctcttagttccgtacaaaacgaattgtgaggttaattcaacttctattttaactgatagcc

SEQ ID NO: 22729 - protein, 197 aa, Arabidopsis thaliana
  peptide (1)..(197): Ceres Seq. ID no. 13491987
MSASRFIKCVTVGDGAVGKTCLLISYTSNTFPTDYVPTVFDNFSANVVVNGATVNLGLWDTAGQEDYNRLRPLSYRGADVFILAFSLISKASYENVSKKWIPELKHYAPGVPIVLVGTKLDLRDDKQFFIDHPGAVPITTVQGEELKKLIGAPAYIECSSKSQENVKGVFDAAIRVVLQPPKQKKKKNKAQKACSIL

SEQ ID NO: 22730 - DNA, 1620 bp, Arabidopsis thaliana
  misc_feature (1)..(1620): Ceres Seq. ID no. 12322395
  misc_feature (1)..(1620): Ortholog of  Ceres SEQ ID NO 14312212 as cited in SEQ ID NO 54399
  misc_feature (1)..(1620): Ortholog of  Ceres SEQ ID NO 15225341 as cited in SEQ ID NO 55222
  misc_feature (1)..(1620): Ortholog of  Ceres SEQ ID NO 14311755 as cited in SEQ ID NO 57271
  misc_feature (1)..(1620): Ortholog of  Ceres SEQ ID NO 15171156 as cited in SEQ ID NO 58259
  misc_feature (1)..(1620): Ortholog of  Ceres SEQ ID NO 14302212 as cited in SEQ ID NO 66507
  misc_feature (1)..(1620): Ortholog of  Ceres SEQ ID NO 13653980 as cited in SEQ ID NO 69253
attgtttagattccaggtcgatctgtgatccattatctttgctactaaactaagttcttttctctgatcgaatcaaaaagttttcaactttctaaatttttttagttctaaggaaaaaacctctccgagaatggttttatcggtgaagcaaacactctctccgaaaatcggacttttccgacgaaacccttcatcctcactaggaagatctcctgtttctctctcgtttccatcgacggagcttccaaaacgcaccgttttagccgtgtcaaagccgcttcatctctcttcttctctgagagctaagtctccggtagtgagatgtgaagcttatgaagctgaccgatcagagcctcatccgatcggtgatgatgctgcggcggcggaaacgaaatcagaggcggctaagaaattgaagatcgggatttactttgctacttggtgggctttgaacgttgtgttcaatatctacaacaagaaggtcttgaacgcttatccttacccatggcttacctcgacgctttctcttgccgctggttcgttgatgatgcttatctcttgggctgttgggatcgttgagactcccaagacggattttgatttctggaaaactctttttccggttgctgtggcacacacaattggtcatgtggctgcaacggtgagtatgtcaaaggttgctgtttctttcactcacatcatcaagagtggtgaacctgcgtttagtgtgcttgtctcgaggtttattttgggtgaaaccttccctacttcggtttacttgtctctcattccaatcattggtggttgcgctctgtctgcccttaccgagcttaacttcaacatgattggtttcatgggagctatgatttcgaacttggctttcgtgttccgtaacatcttctcgaagaagggaatgaagggaaagtctgtgagcgggatgaactactacgcctgtctctcaatgctgtccctattgatcctcactccctttgccattgctgttgaaggacctcagatgtgggtcgatggctggcagacagcgctcgctactgtcggaccacagtttgtctggtgggtggttgcgcagagtgtgttctatcacctctacaaccaagtgtcttacatgtctttagaccaaatctctcccttgacgtttagtgttggtaacaccatgaaacgtatctccgtcattgtctcctccatcattatcttccgcactccagtccagcccgtcaatgctcttggagcagccattgctatccttggaaccttcttgtattcccaggcaaagctctgatgcgaaagacataagagtgtaataagggtctggtgttgagctcctgacttcggttaaaaccgggaaaagagcttaatgtagatatttgtcctcaataatgaaagaaatgatgagattggacactaccatgtttagagtgtgttaggcagtttttttttttttacttttgagtttttttgaatttgggggaatgagaagattgcctctttgtaactaaagtgggaaatagatatttgtccccttgagaataagacaccctgcaactctctttttaacttggagagacatattataaaaagtagagaatatttatctcgagattg

SEQ ID NO: 22731 - protein, 388 aa, Arabidopsis thaliana
  peptide (1)..(388): Ceres Seq. ID no. 12322396
MVLSVKQTLSPKIGLFRRNPSSSLGRSPVSLSFPSTELPKRTVLAVSKPLHLSSSLRAKSPVVRCEAYEADRSEPHPIGDDAAAAETKSEAAKKLKIGIYFATWWALNVVFNIYNKKVLNAYPYPWLTSTLSLAAGSLMMLISWAVGIVETPKTDFDFWKTLFPVAVAHTIGHVAATVSMSKVAVSFTHIIKSGEPAFSVLVSRFILGETFPTSVYLSLIPIIGGCALSALTELNFNMIGFMGAMISNLAFVFRNIFSKKGMKGKSVSGMNYYACLSMLSLLILTPFAIAVEGPQMWVDGWQTALATVGPQFVWWVVAQSVFYHLYNQVSYMSLDQISPLTFSVGNTMKRISVIVSSIIIFRTPVQPVNALGAAIAILGTFLYSQAKL

SEQ ID NO: 22732 - protein, 250 aa, Arabidopsis thaliana
  peptide (1)..(250): Ceres Seq. ID no. 12322397
MMLISWAVGIVETPKTDFDFWKTLFPVAVAHTIGHVAATVSMSKVAVSFTHIIKSGEPAFSVLVSRFILGETFPTSVYLSLIPIIGGCALSALTELNFNMIGFMGAMISNLAFVFRNIFSKKGMKGKSVSGMNYYACLSMLSLLILTPFAIAVEGPQMWVDGWQTALATVGPQFVWWVVAQSVFYHLYNQVSYMSLDQISPLTFSVGNTMKRISVIVSSIIIFRTPVQPVNALGAAIAILGTFLYSQAKL

SEQ ID NO: 22733 - protein, 249 aa, Arabidopsis thaliana
  peptide (1)..(249): Ceres Seq. ID no. 12322398
MLISWAVGIVETPKTDFDFWKTLFPVAVAHTIGHVAATVSMSKVAVSFTHIIKSGEPAFSVLVSRFILGETFPTSVYLSLIPIIGGCALSALTELNFNMIGFMGAMISNLAFVFRNIFSKKGMKGKSVSGMNYYACLSMLSLLILTPFAIAVEGPQMWVDGWQTALATVGPQFVWWVVAQSVFYHLYNQVSYMSLDQISPLTFSVGNTMKRISVIVSSIIIFRTPVQPVNALGAAIAILGTFLYSQAKL

SEQ ID NO: 22734 - DNA, 1591 bp, Arabidopsis thaliana
  misc_feature (1)..(1591): Ceres Seq. ID no. 12348737
  misc_feature (1)..(1591): Ortholog of  Ceres SEQ ID NO 13594345 as cited in SEQ ID NO 58043
  misc_feature (1)..(1591): Ortholog of  Ceres SEQ ID NO 12614112 as cited in SEQ ID NO 60891
  misc_feature (1)..(1591): Ortholog of  Ceres SEQ ID NO 13597574 as cited in SEQ ID NO 64677
  misc_feature (1)..(1591): Ortholog of  Ceres SEQ ID NO 13662880 as cited in SEQ ID NO 65422
  misc_feature (1)..(1591): Ortholog of  Ceres SEQ ID NO 12779098 as cited in SEQ ID NO 67698
  misc_feature (1)..(1591): Ortholog of  Ceres SEQ ID NO 13596180 as cited in SEQ ID NO 67941
  misc_feature (1)..(1591): Ortholog of  Ceres SEQ ID NO 13596089 as cited in SEQ ID NO 68373
attttggttaaagcaaaagattttaagagagaaagggggagaagtgagagagatggagcataagagaggacatgtattagcagtgccgtacccaacgcaaggacacatcacaccattccgccaattctgcaaacgacttcacttcaaaggtctcaaaaccactctcgctctcaccactttcgtcttcaactccatcaatcctgacctatccggtccaatctccatagccaccatctccgatggctatgaccatgggggtttcgagacagctgactccatcgacgactacctcaaagactttaaaacttccggctcgaaaaccattgcagacatcatccaaaaacaccagactagtgataaccccatcacttgtatcgtctatgatgctttcctgccttgggcacttgacgttgctagagagtttggtttagttgcgactcctttctttacgcagccttgtgctgttaactatgtttattatctttcttacataaacaatggaagcttgcaacttcccattgaggaattgccttttcttgagctccaagatttgccttctttcttctctgtttctggctcttatcctgcttactttgagatggtgcttcaacagttcataaatttcgaaaaagctgatttcgttctcgttaatagcttccaagagttggaactgcatgagaatgaattgtggtcgaaagcttgtcctgtgttgacaattggtccaactattccatcaatttacttagaccaacgtatcaaatcagacaccggctatgatcttaatctctttgaatcgaaagatgattccttctgcattaactggctcgacacaaggccacaagggtcggtggtgtacgtagcattcggaagcatggctcagctgactaatgtgcagatggaggagcttgcttcagcagtaagcaacttcagcttcctgtgggtggtcagatcttcagaggaggaaaaactcccatcagggtttcttgagacagtgaataaagaaaagagcttggtcttgaaatggagtcctcagcttcaagttctgtcaaacaaagccatcggttgtttcttgactcactgtggctggaactcaaccatggaggctttgaccttcggggttcccatggtggcaatgccccaatggactgatcaaccgatgaacgcaaagtacatacaagatgtgtggaaggctggagttcgtgtgaagacagagaaggagagtgggattgccaagagagaggagattgagtttagcattaaggaagtgatggaaggagagaggagcaaagagatgaagaagaacgtgaagaaatggagagacttggctgtcaagtcactcaatgaaggaggttctacggatactaacattgatacatttgtatcaagggttcagagcaaataggtaactcacatacagtagcaaaggtccttctataatatcttgttttgtacgtctttcattcagcataatcttttgttgacttttcttatgttgtatgttcaaatccccatattgcttcttgttgtatgttcaaatccccatattgcttcttgttgacaataataataataaaaacaatgcaactttacc

SEQ ID NO: 22735 - protein, 466 aa, Arabidopsis thaliana
  peptide (1)..(466): Ceres Seq. ID no. 12348738
FWLKQKILREKGGEVREMEHKRGHVLAVPYPTQGHITPFRQFCKRLHFKGLKTTLALTTFVFNSINPDLSGPISIATISDGYDHGGFETADSIDDYLKDFKTSGSKTIADIIQKHQTSDNPITCIVYDAFLPWALDVAREFGLVATPFFTQPCAVNYVYYLSYINNGSLQLPIEELPFLELQDLPSFFSVSGSYPAYFEMVLQQFINFEKADFVLVNSFQELELHENELWSKACPVLTIGPTIPSIYLDQRIKSDTGYDLNLFESKDDSFCINWLDTRPQGSVVYVAFGSMAQLTNVQMEELASAVSNFSFLWVVRSSEEEKLPSGFLETVNKEKSLVLKWSPQLQVLSNKAIGCFLTHCGWNSTMEALTFGVPMVAMPQWTDQPMNAKYIQDVWKAGVRVKTEKESGIAKREEIEFSIKEVMEGERSKEMKKNVKKWRDLAVKSLNEGGSTDTNIDTFVSRVQSK

SEQ ID NO: 22736 - protein, 449 aa, Arabidopsis thaliana
  peptide (1)..(449): Ceres Seq. ID no. 12348739
MEHKRGHVLAVPYPTQGHITPFRQFCKRLHFKGLKTTLALTTFVFNSINPDLSGPISIATISDGYDHGGFETADSIDDYLKDFKTSGSKTIADIIQKHQTSDNPITCIVYDAFLPWALDVAREFGLVATPFFTQPCAVNYVYYLSYINNGSLQLPIEELPFLELQDLPSFFSVSGSYPAYFEMVLQQFINFEKADFVLVNSFQELELHENELWSKACPVLTIGPTIPSIYLDQRIKSDTGYDLNLFESKDDSFCINWLDTRPQGSVVYVAFGSMAQLTNVQMEELASAVSNFSFLWVVRSSEEEKLPSGFLETVNKEKSLVLKWSPQLQVLSNKAIGCFLTHCGWNSTMEALTFGVPMVAMPQWTDQPMNAKYIQDVWKAGVRVKTEKESGIAKREEIEFSIKEVMEGERSKEMKKNVKKWRDLAVKSLNEGGSTDTNIDTFVSRVQSK

SEQ ID NO: 22737 - protein, 267 aa, Arabidopsis thaliana
  peptide (1)..(267): Ceres Seq. ID no. 12348740
MVLQQFINFEKADFVLVNSFQELELHENELWSKACPVLTIGPTIPSIYLDQRIKSDTGYDLNLFESKDDSFCINWLDTRPQGSVVYVAFGSMAQLTNVQMEELASAVSNFSFLWVVRSSEEEKLPSGFLETVNKEKSLVLKWSPQLQVLSNKAIGCFLTHCGWNSTMEALTFGVPMVAMPQWTDQPMNAKYIQDVWKAGVRVKTEKESGIAKREEIEFSIKEVMEGERSKEMKKNVKKWRDLAVKSLNEGGSTDTNIDTFVSRVQSK

SEQ ID NO: 22738 - DNA, 995 bp, Arabidopsis thaliana
  misc_feature (1)..(995): Ceres Seq. ID no. 12394813
  misc_feature (1)..(995): Ortholog of  Ceres SEQ ID NO 13589868 as cited in SEQ ID NO 55521
  misc_feature (1)..(995): Ortholog of  Ceres SEQ ID NO 14312250 as cited in SEQ ID NO 59168
  misc_feature (1)..(995): Ortholog of  Ceres SEQ ID NO 15173326 as cited in SEQ ID NO 63793
  misc_feature (1)..(995): Ortholog of  Ceres SEQ ID NO 12617659 as cited in SEQ ID NO 65286
  misc_feature (1)..(995): Ortholog of  Ceres SEQ ID NO 15179979 as cited in SEQ ID NO 0
atttttaacgctcactggatttataagtagagattttttgtgtctcacaaaaacaaaaaaatcatcgtgaaacgttcgaaggccattttctttggacgaccatcggcgttaaggagagagcttagatctcgtgccgtcgtgcgacgttgttttccggcttgatcaaaatggggttgtcattcggaaagttgttcagcaggctctttgcgaagaaagagatgcgtattctgatggttggtctcgatgctgctggtaagacgactatcctctacaagctcaaacttggagagatcgtcaccactattccaaccattgggttcaacgttgagactgttgaatacaagaacatcagcttcaccgtgtgggatgttgggggtcaagacaagatccgtccattgtggagacattacttccagaacacacagggacttatctttgttgtggacagcaatgatcgtgaccgtgttgttgaagccagggacgagcttcacaggatgctgaatgaggatgaattgagggatgcagttctgcttgtatttgctaacaagcaagatcttcccaacgcgatgaacgctgctgagataactgacaagcttgggcttcattctcttcgtcaacgacactggtacattcagagcacatgtgccacctctggagaaggactctatgagggacttgactggctctccaacaacatcgcaagcaaggcatagatggaatgttagccagattcctcttctgcttgtttggtttacaaatcaaagacagaggtctgtttctctagtactaaaagatttattattatattcttcttcgtcacttatctcaaacgcagatcattttacactttgtacttccccttcaataacttgttacttctctcgtttgcttccgaatttgagtatatcatttttacatctgcttttcatcaaagcataaagcatctttcgaaacaaaaattgaaccgaatttttctgtaaactgatcaaatgtgc

SEQ ID NO: 22739 - protein, 181 aa, Arabidopsis thaliana
  peptide (1)..(181): Ceres Seq. ID no. 12394814
MGLSFGKLFSRLFAKKEMRILMVGLDAAGKTTILYKLKLGEIVTTIPTIGFNVETVEYKNISFTVWDVGGQDKIRPLWRHYFQNTQGLIFVVDSNDRDRVVEARDELHRMLNEDELRDAVLLVFANKQDLPNAMNAAEITDKLGLHSLRQRHWYIQSTCATSGEGLYEGLDWLSNNIASKA

SEQ ID NO: 22740 - protein, 164 aa, Arabidopsis thaliana
  peptide (1)..(164): Ceres Seq. ID no. 12394815
MRILMVGLDAAGKTTILYKLKLGEIVTTIPTIGFNVETVEYKNISFTVWDVGGQDKIRPLWRHYFQNTQGLIFVVDSNDRDRVVEARDELHRMLNEDELRDAVLLVFANKQDLPNAMNAAEITDKLGLHSLRQRHWYIQSTCATSGEGLYEGLDWLSNNIASKA

SEQ ID NO: 22741 - protein, 160 aa, Arabidopsis thaliana
  peptide (1)..(160): Ceres Seq. ID no. 12394816
MVGLDAAGKTTILYKLKLGEIVTTIPTIGFNVETVEYKNISFTVWDVGGQDKIRPLWRHYFQNTQGLIFVVDSNDRDRVVEARDELHRMLNEDELRDAVLLVFANKQDLPNAMNAAEITDKLGLHSLRQRHWYIQSTCATSGEGLYEGLDWLSNNIASKA

SEQ ID NO: 22742 - DNA, 1351 bp, Arabidopsis thaliana
  misc_feature (1)..(1351): Ceres Seq. ID no. 12738245
  misc_feature (1)..(1351): Ortholog of  Ceres SEQ ID NO 14312324 as cited in SEQ ID NO 60453
  misc_feature (1)..(1351): Ortholog of  Ceres SEQ ID NO 12624791 as cited in SEQ ID NO 63574
  misc_feature (1)..(1351): Ortholog of  Ceres SEQ ID NO 12780574 as cited in SEQ ID NO 65624
aaaaccccttctctcttcagtctctctctctctagacgatctctatcttgaataaaataccgataatgacctcaaccaatccggtggtcgccgaagtaataccggcggaaacttctacagatgctacagagacgacgattgcaacgacggaagctggtgaagcaccggagaagaaggtgaggaaagcttatacaatcaccaagtctagagagagttggactgaaggagaacacgacaagtttctggaagctcttcaattgtttgatcgtgactggaaaaagatagaagattttgttggttcaaagacagttattcagatcagtagccatgcccaaaaatactttctaaaggtccaaaaaaatgggactttagcacatgttccaccccctaggcctaagcgcaaagctgctcatccatatcctcaaaaggcatcgaaaaatgctcaaatgtcgcttcacgtttccatgtcctttcctactcaaataaataacctgcctggatatactccatgggatgatgatacatctgcattgttaaacattgctgtaagtggggttattccaccagaagatgaacttgatactctttgtggagcagaagttgatgttggatcaaatgacatgataagtgaaactagtccttcagcatctggtatcggaagctcaagcagaacactatcagattctaagggtttgagactggcgaaacaagctccctcaatgcatggtcttcctgattttgctgaggtttataacttcattgggagtgtgttcgatcctgacagcaaaggccgcatgaaaaagctcaaggaaatggatcctataaatttcgaaactgttttgctgttgatgagaaacctcacagtgaacttgtcaaaccctgactttgaacctacttctgaatatgttgatgctgcagaggaaggtcatgaacacttaagctcttagctgtttgtgcactcaacaagttatatatcttcttgacgacttcttgctcgcaacaactctctaccagctatcaaatgcatcgtacggttgttgtctgaggagaacataactgagtcgtcgtcacaaacaagaggaacatatgcagtttcggtcagaaccagtcgtgtgaatggtagatatatgtatgtgtgtgtagaaaatggttaccaattgtatcttctttttgataattattttttcatgccttttgtaatatgtaagtttctttacctcgttctctgattggttattttctcgttatctgtttaaccaaaagctatgtaacacagtagcaaattgttacttaactcggaagtgagatacataactctgttgtattgcacttgtatcaagcgttaacgtcc

SEQ ID NO: 22743 - protein, 293 aa, Arabidopsis thaliana
  peptide (1)..(293): Ceres Seq. ID no. 12738246
MTSTNPVVAEVIPAETSTDATETTIATTEAGEAPEKKVRKAYTITKSRESWTEGEHDKFLEALQLFDRDWKKIEDFVGSKTVIQISSHAQKYFLKVQKNGTLAHVPPPRPKRKAAHPYPQKASKNAQMSLHVSMSFPTQINNLPGYTPWDDDTSALLNIAVSGVIPPEDELDTLCGAEVDVGSNDMISETSPSASGIGSSSRTLSDSKGLRLAKQAPSMHGLPDFAEVYNFIGSVFDPDSKGRMKKLKEMDPINFETVLLLMRNLTVNLSNPDFEPTSEYVDAAEEGHEHLSS

SEQ ID NO: 22744 - protein, 166 aa, Arabidopsis thaliana
  peptide (1)..(166): Ceres Seq. ID no. 12738247
MSLHVSMSFPTQINNLPGYTPWDDDTSALLNIAVSGVIPPEDELDTLCGAEVDVGSNDMISETSPSASGIGSSSRTLSDSKGLRLAKQAPSMHGLPDFAEVYNFIGSVFDPDSKGRMKKLKEMDPINFETVLLLMRNLTVNLSNPDFEPTSEYVDAAEEGHEHLSS

SEQ ID NO: 22745 - protein, 160 aa, Arabidopsis thaliana
  peptide (1)..(160): Ceres Seq. ID no. 12738248
MSFPTQINNLPGYTPWDDDTSALLNIAVSGVIPPEDELDTLCGAEVDVGSNDMISETSPSASGIGSSSRTLSDSKGLRLAKQAPSMHGLPDFAEVYNFIGSVFDPDSKGRMKKLKEMDPINFETVLLLMRNLTVNLSNPDFEPTSEYVDAAEEGHEHLSS

SEQ ID NO: 22746 - DNA, 1203 bp, Arabidopsis thaliana
  misc_feature (1)..(1203): Ceres Seq. ID no. 12396189
  misc_feature (1)..(1203): Ortholog of  Ceres SEQ ID NO 14307265 as cited in SEQ ID NO 54298
aaaagtttgcatctttacttgggttgtgtctggaatcaattacttcctaaaggctgccatttgttaacttactctgttagtctactaccaccaataactatgtttttcgatggataccattatcatggaacaacctttgagcagagttaccggtgttatccggcatcttttattgacaagccacaacttgaaagtggtgacaagattataatgccaccatcagcccttgatcgtctagcctctttgcatattgactatccgatgctgtttgagcttcgtaatgctggaattgaacgtgttacacactgtggagtccttgagttcattgcagaagaaggcatgatttacatgccatattggatgatgcaaaatctgctgctgcaagaaggagacattgtgagagttagaaatgtcactcttccaaagggaacttacgttaaactacagccccacacaacagacttcctggatatatccaacccgaaagccatcttggagactgctttgagaaattattcatgcctaactagtggggatagcattatggttccatacaacaataagaagtacttcatagatatagttgaaacaaagcctgctaacgcaatcagcatcatagaaacagactgtgaggttgatttcgcacctcccctcgattacaaggagcctgaacgtcccacagcacctgctgcagctaagggtccggcaaaagctgaggaggttgtggatgaacctgaaaccaaagttcaaccctttcacgggatctggaagacggttagatgggagacctcttgcctatgagccagcgccagcctctagctcaaaagacaaacaacctgttgtcgctaatggtaatggacagtcatctgtagcaagtagctcagagaaagctacacgagctcagggaaagcttgtatttggggccaacgcaaaccgtgctccaaaagaagctgctcctaaagttggagctgcaaaagagacaaagaaagaggaacaggagaagaatgacgagcccaagtttcaagctttctctgggaagaagtattcattgaggggttgatcaactcacacaatgggtctactcagtctatttatgacctctcatgttgtgtactaaaaatacaaggaaaacaaataagtgaataaatctctggctcctcttgacgcggcttgttttctttatcagattcaatgcaactttct

SEQ ID NO: 22747 - protein, 266 aa, Arabidopsis thaliana
  peptide (1)..(266): Ceres Seq. ID no. 12396190
KSLHLYLGCVWNQLLPKGCHLLTYSVSLLPPITMFFDGYHYHGTTFEQSYRCYPASFIDKPQLESGDKIIMPPSALDRLASLHIDYPMLFELRNAGIERVTHCGVLEFIAEEGMIYMPYWMMQNLLLQEGDIVRVRNVTLPKGTYVKLQPHTTDFLDISNPKAILETALRNYSCLTSGDSIMVPYNNKKYFIDIVETKPANAISIIETDCEVDFAPPLDYKEPERPTAPAAAKGPAKAEEVVDEPETKVQPFHGIWKTVRWETSCL

SEQ ID NO: 22748 - protein, 233 aa, Arabidopsis thaliana
  peptide (1)..(233): Ceres Seq. ID no. 12396191
MFFDGYHYHGTTFEQSYRCYPASFIDKPQLESGDKIIMPPSALDRLASLHIDYPMLFELRNAGIERVTHCGVLEFIAEEGMIYMPYWMMQNLLLQEGDIVRVRNVTLPKGTYVKLQPHTTDFLDISNPKAILETALRNYSCLTSGDSIMVPYNNKKYFIDIVETKPANAISIIETDCEVDFAPPLDYKEPERPTAPAAAKGPAKAEEVVDEPETKVQPFHGIWKTVRWETSCL

SEQ ID NO: 22749 - protein, 196 aa, Arabidopsis thaliana
  peptide (1)..(196): Ceres Seq. ID no. 12396192
MPPSALDRLASLHIDYPMLFELRNAGIERVTHCGVLEFIAEEGMIYMPYWMMQNLLLQEGDIVRVRNVTLPKGTYVKLQPHTTDFLDISNPKAILETALRNYSCLTSGDSIMVPYNNKKYFIDIVETKPANAISIIETDCEVDFAPPLDYKEPERPTAPAAAKGPAKAEEVVDEPETKVQPFHGIWKTVRWETSCL

SEQ ID NO: 22750 - DNA, 1190 bp, Arabidopsis thaliana
  misc_feature (1)..(1190): Ceres Seq. ID no. 13497142
  misc_feature (1)..(1190): Ortholog of  Ceres SEQ ID NO 15175048 as cited in SEQ ID NO 59975
  misc_feature (1)..(1190): Ortholog of  Ceres SEQ ID NO 13597333 as cited in SEQ ID NO 63974
  misc_feature (1)..(1190): Ortholog of  Ceres SEQ ID NO 13599307 as cited in SEQ ID NO 0
  misc_feature (1)..(1190): Ortholog of  Ceres SEQ ID NO 15179517 as cited in SEQ ID NO 0
ctctttagcaaaaaatctcagaactcaaaaaaaaaacatccaacaccaaagacaatggagatgagtttgcgtctcgcttcatcttcaacctcaaacccaatttgtctactaaaccctggaaaaaaccttaatttcccaatccgaaaccatagaatccctaaaacttcgaaacccttttgcgttaggtcttcaatgagcttgtctaaaccacccagacaaaccttatctagtaactgggatgtatctagcttctccattgattccgttgctcaatctccttcaagactcccaagtttcgaagaactcgataccaccaacatgttgctccgtcaaagaatcgtctttttgggttctcaggttgatgatatgacggcggatttggttataagtcagctattgttactagatgctgaggactcagaaagagacattacgctttttatcaattcacccggtggatctattactgctgggatgggaatatatgatgcaatgaaacaatgtaaggcggatgtatctactgtttgcttagggttagctgcatctatgggtgcgtttcttcttgcttctggttcaaaagggaaacggtattgtatgcctaactctaaagttatgatccatcagccacttggtactgctggaggcaaagcaacggaaatgagcatacgtataagagaaatgatgtaccacaagattaaacttaacaaaatcttctctagaatcactgggaagcctgaatcagagatcgaaagtgacacagaccgtgataacttcttgaatccatgggaggcgaaagaatatggtttgatcgacgctgtaatcgatgatgggaaaccgggactaatcgctccaattggagatggtactcctcctcctaaaaccaaagtctgggatctttggaaagtcgaaggaaccaagaaagacaacactaacttgccatctgagcgctccatgacacagaatggttatgccgccattgaatagaactgttgttgcagcgtttacgccttttatatgttattctggtggtacctgtaaccatataacgttgcatttcctgtgtttgtaccatttctctgatagatttttggaataatttgaaggcaaaagatagattatttgttgtagaagaagctacaaaatttaatgattaaattgaatcatcaagccatgagaagctttgtgttttc

SEQ ID NO: 22751 - protein, 327 aa, Arabidopsis thaliana
  peptide (1)..(327): Ceres Seq. ID no. 13497143
LFSKKSQNSKKKHPTPKTMEMSLRLASSSTSNPICLLNPGKNLNFPIRNHRIPKTSKPFCVRSSMSLSKPPRQTLSSNWDVSSFSIDSVAQSPSRLPSFEELDTTNMLLRQRIVFLGSQVDDMTADLVISQLLLLDAEDSERDITLFINSPGGSITAGMGIYDAMKQCKADVSTVCLGLAASMGAFLLASGSKGKRYCMPNSKVMIHQPLGTAGGKATEMSIRIREMMYHKIKLNKIFSRITGKPESEIESDTDRDNFLNPWEAKEYGLIDAVIDDGKPGLIAPIGDGTPPPKTKVWDLWKVEGTKKDNTNLPSERSMTQNGYAAIE

SEQ ID NO: 22752 - protein, 309 aa, Arabidopsis thaliana
  peptide (1)..(309): Ceres Seq. ID no. 13497144
MEMSLRLASSSTSNPICLLNPGKNLNFPIRNHRIPKTSKPFCVRSSMSLSKPPRQTLSSNWDVSSFSIDSVAQSPSRLPSFEELDTTNMLLRQRIVFLGSQVDDMTADLVISQLLLLDAEDSERDITLFINSPGGSITAGMGIYDAMKQCKADVSTVCLGLAASMGAFLLASGSKGKRYCMPNSKVMIHQPLGTAGGKATEMSIRIREMMYHKIKLNKIFSRITGKPESEIESDTDRDNFLNPWEAKEYGLIDAVIDDGKPGLIAPIGDGTPPPKTKVWDLWKVEGTKKDNTNLPSERSMTQNGYAAIE

SEQ ID NO: 22753 - protein, 307 aa, Arabidopsis thaliana
  peptide (1)..(307): Ceres Seq. ID no. 13497145
MSLRLASSSTSNPICLLNPGKNLNFPIRNHRIPKTSKPFCVRSSMSLSKPPRQTLSSNWDVSSFSIDSVAQSPSRLPSFEELDTTNMLLRQRIVFLGSQVDDMTADLVISQLLLLDAEDSERDITLFINSPGGSITAGMGIYDAMKQCKADVSTVCLGLAASMGAFLLASGSKGKRYCMPNSKVMIHQPLGTAGGKATEMSIRIREMMYHKIKLNKIFSRITGKPESEIESDTDRDNFLNPWEAKEYGLIDAVIDDGKPGLIAPIGDGTPPPKTKVWDLWKVEGTKKDNTNLPSERSMTQNGYAAIE

SEQ ID NO: 22754 - DNA, 1396 bp, Arabidopsis thaliana
  misc_feature (1)..(1396): Ceres Seq. ID no. 12334854
  misc_feature (1)..(1396): Ortholog of  Ceres SEQ ID NO 14314464 as cited in SEQ ID NO 52405
  misc_feature (1)..(1396): Ortholog of  Ceres SEQ ID NO 15177592 as cited in SEQ ID NO 58436
  misc_feature (1)..(1396): Ortholog of  Ceres SEQ ID NO 13655251 as cited in SEQ ID NO 62888
  misc_feature (1)..(1396): Ortholog of  Ceres SEQ ID NO 13597194 as cited in SEQ ID NO 63661
  misc_feature (1)..(1396): Ortholog of  Ceres SEQ ID NO 14302883 as cited in SEQ ID NO 66384
  misc_feature (1)..(1396): Ortholog of  Ceres SEQ ID NO 13662855 as cited in SEQ ID NO 69059
attgaattctgtcttgatcactttcgattctctcaaaaaatcccataactttcccaacgaaaaatgttccgatcaatgattgttcgatctgcttccccagtgaagcagggtcttctccgcagaggattcgcctctgaatctgttcccgatcgcaaagtcgtcatcctcggtgccgccggtgggatcggccagccactttctcttctcatgaagcttaaccctctcgtctcttctctctccctctatgatatcgccaacactcccggcgttgctgctgacgtcggtcacatcaacacccgatctcaggtttctgggtacatgggtgatgatgatttggggaaagctctagaaggcgctgacctcgtcattattccagctggtgtcccaaggaagcctggcatgacccgtgatgatcttttcaacatcaatgctggcattgtcaagaacctcagcatcgccatcgccaagtattgcccacaagcacttgtcaacatgatcagcaaccctgtgaactccactgttccaattgcagctgagatttttaagaaggctggtacctatgatgagaagaaattattcggtgtcaccactcttgatgttgtcagggctaggactttctatgctggaaaatcggatgtcaatgttgcagaggttaatgttccagttgttggtggtcatgctggcatcacgattcttcctctcttttctcaggctagccctcaagccaacttgtcggatgatttaatcagggccctcacaaagcgtacccaggacggagggacagaagtcgtggaggcaaaagctggaaagggttcagctacattgtcaatggcctatgcgggagcactctttgctgatgcatgcttaaagggactcaacggtgttccaaatgtggtggaatgctcattcgtccaatctaccatcaccgagcttcctttcttcgcctcaaaggtaagactgggaaagaacggagtggaggaagtgctagatctagggccactctcagactttgaaaaggaaggcttagaagccctcaaggcagaactcaaatcctctatcgagaagggcatcaaatttgccaaccaatgagtttttgcatcttgaaactattgattttggactaaactttaggttaatgtttgtctttccaattttccggtagagttgtcttcttcctctgcggattttataatttcccttcaataaattctccatttctgctcttgaggaaccaaccattgggaactctgtaataaaaagaacaagctgttgtgctgctatgttggttatgattcgttttcctttttccttattgtttgctagaaaaaagaaagaaaataataaatcgttgtgagttgcattatttgggcaactactactactattcataagttgc

SEQ ID NO: 22755 - protein, 341 aa, Arabidopsis thaliana
  peptide (1)..(341): Ceres Seq. ID no. 12334855
MFRSMIVRSASPVKQGLLRRGFASESVPDRKVVILGAAGGIGQPLSLLMKLNPLVSSLSLYDIANTPGVAADVGHINTRSQVSGYMGDDDLGKALEGADLVIIPAGVPRKPGMTRDDLFNINAGIVKNLSIAIAKYCPQALVNMISNPVNSTVPIAAEIFKKAGTYDEKKLFGVTTLDVVRARTFYAGKSDVNVAEVNVPVVGGHAGITILPLFSQASPQANLSDDLIRALTKRTQDGGTEVVEAKAGKGSATLSMAYAGALFADACLKGLNGVPNVVECSFVQSTITELPFFASKVRLGKNGVEEVLDLGPLSDFEKEGLEALKAELKSSIEKGIKFANQ

SEQ ID NO: 22756 - protein, 337 aa, Arabidopsis thaliana
  peptide (1)..(337): Ceres Seq. ID no. 12334856
MIVRSASPVKQGLLRRGFASESVPDRKVVILGAAGGIGQPLSLLMKLNPLVSSLSLYDIANTPGVAADVGHINTRSQVSGYMGDDDLGKALEGADLVIIPAGVPRKPGMTRDDLFNINAGIVKNLSIAIAKYCPQALVNMISNPVNSTVPIAAEIFKKAGTYDEKKLFGVTTLDVVRARTFYAGKSDVNVAEVNVPVVGGHAGITILPLFSQASPQANLSDDLIRALTKRTQDGGTEVVEAKAGKGSATLSMAYAGALFADACLKGLNGVPNVVECSFVQSTITELPFFASKVRLGKNGVEEVLDLGPLSDFEKEGLEALKAELKSSIEKGIKFANQ

SEQ ID NO: 22757 - protein, 293 aa, Arabidopsis thaliana
  peptide (1)..(293): Ceres Seq. ID no. 12334857
MKLNPLVSSLSLYDIANTPGVAADVGHINTRSQVSGYMGDDDLGKALEGADLVIIPAGVPRKPGMTRDDLFNINAGIVKNLSIAIAKYCPQALVNMISNPVNSTVPIAAEIFKKAGTYDEKKLFGVTTLDVVRARTFYAGKSDVNVAEVNVPVVGGHAGITILPLFSQASPQANLSDDLIRALTKRTQDGGTEVVEAKAGKGSATLSMAYAGALFADACLKGLNGVPNVVECSFVQSTITELPFFASKVRLGKNGVEEVLDLGPLSDFEKEGLEALKAELKSSIEKGIKFANQ

SEQ ID NO: 22758 - DNA, 575 bp, Arabidopsis thaliana
  misc_feature (1)..(575): Ceres Seq. ID no. 13489268
  misc_feature (1)..(575): Ortholog of  Ceres SEQ ID NO 15174145 as cited in SEQ ID NO 0
aaaaatcttcacattgcacgtaaaaaatatctttatacaatgaacggcatgagtggatcgtctccggcggctccggctccttcaccatcatcgttcttccaacatcgccaccgtcacggtggtatgatgcatatgactttcttttgggtaaaaaacacggaggttctattcgacggatggccagggaccagtctgaaaatgtattgggtctgtctcgccgtcatttttgttatttccgctttctccgagtgtctatcgcggtgcggtttcatgaaatccggtccggctagcttgggaggcgggctattacagactgcggtttacaccgtgagggctgctttgtcttatttggtcatgctggctgtgatgtcgttcaatggaggagtcttcgtggctgcgatggctggttttggattagggtttatgatttttggaagtagggcttttagggccactagcagtaacagtcacaccgaggttcaatcacattgttgatttttgtcttagatcgtttttattttccttgtttcccgttgaaataatgattaggaaaataaaaaaattcacgtttttgg

SEQ ID NO: 22759 - protein, 164 aa, Arabidopsis thaliana
  peptide (1)..(164): Ceres Seq. ID no. 13489269
KNLHIARKKYLYTMNGMSGSSPAAPAPSPSSFFQHRHRHGGMMHMTFFWVKNTEVLFDGWPGTSLKMYWVCLAVIFVISAFSECLSRCGFMKSGPASLGGGLLQTAVYTVRAALSYLVMLAVMSFNGGVFVAAMAGFGLGFMIFGSRAFRATSSNSHTEVQSHC

SEQ ID NO: 22760 - protein, 151 aa, Arabidopsis thaliana
  peptide (1)..(151): Ceres Seq. ID no. 13489270
MNGMSGSSPAAPAPSPSSFFQHRHRHGGMMHMTFFWVKNTEVLFDGWPGTSLKMYWVCLAVIFVISAFSECLSRCGFMKSGPASLGGGLLQTAVYTVRAALSYLVMLAVMSFNGGVFVAAMAGFGLGFMIFGSRAFRATSSNSHTEVQSHC

SEQ ID NO: 22761 - protein, 148 aa, Arabidopsis thaliana
  peptide (1)..(148): Ceres Seq. ID no. 13489271
MSGSSPAAPAPSPSSFFQHRHRHGGMMHMTFFWVKNTEVLFDGWPGTSLKMYWVCLAVIFVISAFSECLSRCGFMKSGPASLGGGLLQTAVYTVRAALSYLVMLAVMSFNGGVFVAAMAGFGLGFMIFGSRAFRATSSNSHTEVQSHC

SEQ ID NO: 22762 - DNA, 1163 bp, Arabidopsis thaliana
  misc_feature (1)..(1163): Ceres Seq. ID no. 12558793
  misc_feature (1)..(1163): Ortholog of  Ceres SEQ ID NO 12474685 as cited in SEQ ID NO 88
  misc_feature (1)..(1163): Ortholog of  Ceres SEQ ID NO 13638574 as cited in SEQ ID NO 51223
  misc_feature (1)..(1163): Ortholog of  Ceres SEQ ID NO 14311531 as cited in SEQ ID NO 51466
  misc_feature (1)..(1163): Ortholog of  Ceres SEQ ID NO 15170465 as cited in SEQ ID NO 52798
  misc_feature (1)..(1163): Ortholog of  Ceres SEQ ID NO 15177112 as cited in SEQ ID NO 55956
  misc_feature (1)..(1163): Ortholog of  Ceres SEQ ID NO 12610790 as cited in SEQ ID NO 56123
  misc_feature (1)..(1163): Ortholog of  Ceres SEQ ID NO 14315399 as cited in SEQ ID NO 57112
  misc_feature (1)..(1163): Ortholog of  Ceres SEQ ID NO 13655636 as cited in SEQ ID NO 63519
  misc_feature (1)..(1163): Ortholog of  Ceres SEQ ID NO 13655896 as cited in SEQ ID NO 64970
gaagtctcagtgtcggctaatcagaggatcagtctcagtgttgatttcaggtgataaatctctttgctttgacaatggcagaggaaattagattctttgaactcaacaccggagcgaagataccatccgtcggtctaggaacgtggcaggccgatcctggtctcgtcggaaacgctgtcgacgctgctgtgaagattggttatcgtcacattgattgtgctcaaatctatggcaatgaaaaagagattgggttagtcctgaagaaattgtttgatggtggagttgttaagcgtgaggaaatgttcatcacatccaaactatggtgtacttatcatgatcctcaagaagtgcctgaggcacttaatagaactctacaggatctgcagcttgactacgtcgatctgtatctcattcactggcctgttagcctcaagaaaggatctactggctttaaaccagagaacattttgccaactgatattcctagcacatggaaagcaatggaatcactctttgattcaggcaaggcccgtactattggtgtaagtaatttctcctcaaagaaactcgcagatctcttggtggtggctcgtgttcctcccgctgttaaccaggtggagtgtcacccttcatggcaacaaaacgtgctcagggatttctgcaaatctaaaggcgttcatctctcagggtactctcctttgggttctccaggaacaacgtggctaacgagcgatgttttgaagaaccctattcttggtggtgttgctgagaagctcggcaagactcctgcacaggttgcattacgctggggtctccaaatgggtcaaagtgttcttccaaaaagcacccatgaagacaggatcaaacagaatttcgatgttttcaactggtccatacccgaagacatgttatccaagttttctgagattggacagggtaggttggtgcgaggcatgtcatttgttcatgagacgagtccatataagagtcttgaagaactctgggacggtgagatatgagactcagctgatttgattgtcatagatttgtcattagtaatgcacgttgtttcattacaaaggtacaacattttacttataaactccctccagcagttccacgtgaaaagacattaatgttctaattatactgaattgatgatc

SEQ ID NO: 22763 - protein, 314 aa, Arabidopsis thaliana
  peptide (1)..(314): Ceres Seq. ID no. 12558794
MAEEIRFFELNTGAKIPSVGLGTWQADPGLVGNAVDAAVKIGYRHIDCAQIYGNEKEIGLVLKKLFDGGVVKREEMFITSKLWCTYHDPQEVPEALNRTLQDLQLDYVDLYLIHWPVSLKKGSTGFKPENILPTDIPSTWKAMESLFDSGKARTIGVSNFSSKKLADLLVVARVPPAVNQVECHPSWQQNVLRDFCKSKGVHLSGYSPLGSPGTTWLTSDVLKNPILGGVAEKLGKTPAQVALRWGLQMGQSVLPKSTHEDRIKQNFDVFNWSIPEDMLSKFSEIGQGRLVRGMSFVHETSPYKSLEELWDGEI

SEQ ID NO: 22764 - protein, 239 aa, Arabidopsis thaliana
  peptide (1)..(239): Ceres Seq. ID no. 12558795
MFITSKLWCTYHDPQEVPEALNRTLQDLQLDYVDLYLIHWPVSLKKGSTGFKPENILPTDIPSTWKAMESLFDSGKARTIGVSNFSSKKLADLLVVARVPPAVNQVECHPSWQQNVLRDFCKSKGVHLSGYSPLGSPGTTWLTSDVLKNPILGGVAEKLGKTPAQVALRWGLQMGQSVLPKSTHEDRIKQNFDVFNWSIPEDMLSKFSEIGQGRLVRGMSFVHETSPYKSLEELWDGEI

SEQ ID NO: 22765 - protein, 172 aa, Arabidopsis thaliana
  peptide (1)..(172): Ceres Seq. ID no. 12558796
MESLFDSGKARTIGVSNFSSKKLADLLVVARVPPAVNQVECHPSWQQNVLRDFCKSKGVHLSGYSPLGSPGTTWLTSDVLKNPILGGVAEKLGKTPAQVALRWGLQMGQSVLPKSTHEDRIKQNFDVFNWSIPEDMLSKFSEIGQGRLVRGMSFVHETSPYKSLEELWDGEI

SEQ ID NO: 22766 - DNA, 1605 bp, Arabidopsis thaliana
  misc_feature (1)..(1605): Ceres Seq. ID no. 12371283
  misc_feature (1)..(1605): Ortholog of  Ceres SEQ ID NO 13597715 as cited in SEQ ID NO 65577
  misc_feature (1)..(1605): Ortholog of  Ceres SEQ ID NO 15178668 as cited in SEQ ID NO 68301
cttcccttagggcgtatcaaggagaagaaacaaagccgtacaacgagggctcttcctgggcaacaaaaccaccattttcgttttatctcaatcttcgtctctttcgaaagatctaaccacaacaactccttaagatggataagtatcaacgagtggtgaagccgaaagcggatacgccgattgatgcgaatgagattcgtatcactagtcaaggcagggcacgaaactacatcacctatgcgatgactcttcttcaggataaagggtcaactgaagttgtattcaaggcaatgggaagagctatcaacaagactgtgaccattgtagagctgattaagagaaggatccctgatcttcatcagaacacatctattggatccacagacatcacagacacatgggaaccaacagaggaaggccttctacctttggagactacaaggcatgtgtcaatgataaccattaccctatccaagattgagcttaatacctcctctgttgggtaccagtgcccaattcctattgagttggtgaagccaatgggcgatattgattatgaaggacgagagggttcacctggtggcagagggaggggaagaggaagaggaaggggaagaggaagggggcgaggtggcagaggaaatgcttatgtgaacgttgagcatgaagatggaggttgggaacgtgagcagtcctatggtagaggaagaggacgtggcagaggacgcagcagtcgtggtcgtggaagaggaggatacaatggtcctccgaatgagtatgatgcaccacaagatggaggttacggttacgatgctcctcatgaacaccgtggatatgatgaccgtggtggttatgatgcccctcctcagggccgtggtggttacgatggtcctcagggtcgcggtggttacgatggtcctcagggtcgccgtggttatgatggtcctcctcagggccgtggtggttatgatggtccttctcaaggccgtggtggttatgatggtccttctcagggccgtggtggttatgatggtccttctcagggccgtggtggttatgatggtcctcagggtcgtgggcgtggacgtggacgtggaaggggaggacgtggaagaggaggaggacgtggtggtgatggtggtttcaacaacagatcagatggaccaccagtccaggcagctgcttgagagtgaggtttctcttacacaaacataaaaagaagaaaaaagcccaagtcgttggatgttttttttctatctccttgttctctcactttctttctatgtttgcttcttctgtccatcaagaagacatgtttgccataagtgtatctcattccccttcttttttttttactatccattgattgacagtgttttagcttgtggtctgttttgtttagagtcgcttaggaatatatgttcaatttattttatggttggtcgtcgtcttgggtttttgttagagaagaactactgaggcatcctcttttcttttcttttttcctctgttttgtagttttgtttaggtgagagtgagacacagtttggacaaattacctcttttctttggttatcagttttaatgtgatggaacagttgattc

SEQ ID NO: 22767 - protein, 350 aa, Arabidopsis thaliana
  peptide (1)..(350): Ceres Seq. ID no. 12371284
MDKYQRVVKPKADTPIDANEIRITSQGRARNYITYAMTLLQDKGSTEVVFKAMGRAINKTVTIVELIKRRIPDLHQNTSIGSTDITDTWEPTEEGLLPLETTRHVSMITITLSKIELNTSSVGYQCPIPIELVKPMGDIDYEGREGSPGGRGRGRGRGRGRGRGRGGRGNAYVNVEHEDGGWEREQSYGRGRGRGRGRSSRGRGRGGYNGPPNEYDAPQDGGYGYDAPHEHRGYDDRGGYDAPPQGRGGYDGPQGRGGYDGPQGRRGYDGPPQGRGGYDGPSQGRGGYDGPSQGRGGYDGPSQGRGGYDGPQGRGRGRGRGRGGRGRGGGRGGDGGFNNRSDGPPVQAAA

SEQ ID NO: 22768 - protein, 314 aa, Arabidopsis thaliana
  peptide (1)..(314): Ceres Seq. ID no. 12371285
MTLLQDKGSTEVVFKAMGRAINKTVTIVELIKRRIPDLHQNTSIGSTDITDTWEPTEEGLLPLETTRHVSMITITLSKIELNTSSVGYQCPIPIELVKPMGDIDYEGREGSPGGRGRGRGRGRGRGRGRGGRGNAYVNVEHEDGGWEREQSYGRGRGRGRGRSSRGRGRGGYNGPPNEYDAPQDGGYGYDAPHEHRGYDDRGGYDAPPQGRGGYDGPQGRGGYDGPQGRRGYDGPPQGRGGYDGPSQGRGGYDGPSQGRGGYDGPSQGRGGYDGPQGRGRGRGRGRGGRGRGGGRGGDGGFNNRSDGPPVQAAA

SEQ ID NO: 22769 - protein, 298 aa, Arabidopsis thaliana
  peptide (1)..(298): Ceres Seq. ID no. 12371286
MGRAINKTVTIVELIKRRIPDLHQNTSIGSTDITDTWEPTEEGLLPLETTRHVSMITITLSKIELNTSSVGYQCPIPIELVKPMGDIDYEGREGSPGGRGRGRGRGRGRGRGRGGRGNAYVNVEHEDGGWEREQSYGRGRGRGRGRSSRGRGRGGYNGPPNEYDAPQDGGYGYDAPHEHRGYDDRGGYDAPPQGRGGYDGPQGRGGYDGPQGRRGYDGPPQGRGGYDGPSQGRGGYDGPSQGRGGYDGPSQGRGGYDGPQGRGRGRGRGRGGRGRGGGRGGDGGFNNRSDGPPVQAAA

SEQ ID NO: 22770 - DNA, 1839 bp, Arabidopsis thaliana
  misc_feature (1)..(1839): Ceres Seq. ID no. 12326370
  misc_feature (1)..(1839): Ortholog of  Ceres SEQ ID NO 14303137 as cited in SEQ ID NO 53594
  misc_feature (1)..(1839): Ortholog of  Ceres SEQ ID NO 13585454 as cited in SEQ ID NO 65280
  misc_feature (1)..(1839): Ortholog of  Ceres SEQ ID NO 14307889 as cited in SEQ ID NO 67245
aggtaacgtctctctctctctgtgactctctcaattagtttgaaccagtcaactcgtaaagcccttgtttcctgtaattttccgaattgggtcttcccttaatttatcatttctcgccggaaaaactttgagaatttccttgtatttcacggcgatgctataatcctcctgaaagcgacttactgatatatattagtttattaggcaatgaatgtgaaatttaccgagtcaaacgtgtttaaacaatgtaaaagtgttgcaggcgattgttttgtttatcttgttttgggtttggttgtcttggatgggaggaagtagctctaaagagtcacctagaggaggtggaagtggtcgtaggtatgaacgtagtgtgtctgggagctcatcttattcgtctgcttgggaccagagcagctattatcagacaccaaaccatccatctgcgtctcctgtttcatcctataattctgggagacaaacaccgaagaatcttgagaggaagtattcacggattgctgataactaccgttccattgatgaggttaccgctgctctttcacatgccggtttggagtcctcgaatctcattgttggtatagatgtcaccaagagcaacgagtggacaggggcgagatcatttggtaggaagagtctgcatttcattggaactactccaaacccttatcaacaagctatttccatcattggaaagactttatcggtttttgatgaggataatttgatcccctgttatggatttggagatgctacaactcatgatcaggatgtcttcagtttcaatcccaatgatacatattgtaacgggtttgaagaagttctcatgtgttacagagagattgttccccagcttcgtctctcaggtccgacatcttttgcacctatcatcgaaagggccatgacaattgtggaagaaagtggtggccagtaccatgttcttctcattatcgctgatggacaggtgacaagaagtgttgatacagataacggtggattcagtccacaagagcagcagactattgatgccattgttagagcaagtgaatatcctttgtctatagttcttgttggtgttggagatggtccctgggacaccatgagacagtttgatgacaacatccccgctcgtgcctttgacaatttccagtttgtgaatttcacggatataatgtcaaagaacattgatccagcaagaaaagaggcagaattcgcgctttctgccttgatggagatcccgtctcagtataaagccaccctcgaactaggcttacttggacaaagaaccggacattgtccagacaggattgcgcttccaccaccaacttatgctactcaatctatgcgcaacagcccaagaacttcccgatcaaccagttttcaaaacaaaccatatgataatggtgtttcctctacaccaccttcaactactcataacgagagccagcaacagttttgccccgtatgtctagtgagtgcaaagaacatggctttcaattgtggtcatcagacttgcgctggatgtggggaagacctccatgtgtgtcccatttgccggagctcaatctcggttcgtatcaagctttattaagataagtctctcaagaactgaaggaacccgaggtggtctgagatctttcacagccaacaccatcccaacttagatctcatttaccagtgtcctaacatttgtttttactttgaggggaataaccggttcctctcaaaggttttgtagataatctgttgtcaattttgcattctcattgcacatgaaaaaaccacagcagactctctcgtgaataaaggatcctttctctgcgg

SEQ ID NO: 22771 - protein, 433 aa, Arabidopsis thaliana
  peptide (1)..(433): Ceres Seq. ID no. 12326371
MGGSSSKESPRGGGSGRRYERSVSGSSSYSSAWDQSSYYQTPNHPSASPVSSYNSGRQTPKNLERKYSRIADNYRSIDEVTAALSHAGLESSNLIVGIDVTKSNEWTGARSFGRKSLHFIGTTPNPYQQAISIIGKTLSVFDEDNLIPCYGFGDATTHDQDVFSFNPNDTYCNGFEEVLMCYREIVPQLRLSGPTSFAPIIERAMTIVEESGGQYHVLLIIADGQVTRSVDTDNGGFSPQEQQTIDAIVRASEYPLSIVLVGVGDGPWDTMRQFDDNIPARAFDNFQFVNFTDIMSKNIDPARKEAEFALSALMEIPSQYKATLELGLLGQRTGHCPDRIALPPPTYATQSMRNSPRTSRSTSFQNKPYDNGVSSTPPSTTHNESQQQFCPVCLVSAKNMAFNCGHQTCAGCGEDLHVCPICRSSISVRIKLY

SEQ ID NO: 22772 - protein, 254 aa, Arabidopsis thaliana
  peptide (1)..(254): Ceres Seq. ID no. 12326372
MCYREIVPQLRLSGPTSFAPIIERAMTIVEESGGQYHVLLIIADGQVTRSVDTDNGGFSPQEQQTIDAIVRASEYPLSIVLVGVGDGPWDTMRQFDDNIPARAFDNFQFVNFTDIMSKNIDPARKEAEFALSALMEIPSQYKATLELGLLGQRTGHCPDRIALPPPTYATQSMRNSPRTSRSTSFQNKPYDNGVSSTPPSTTHNESQQQFCPVCLVSAKNMAFNCGHQTCAGCGEDLHVCPICRSSISVRIKLY

SEQ ID NO: 22773 - protein, 229 aa, Arabidopsis thaliana
  peptide (1)..(229): Ceres Seq. ID no. 12326373
MTIVEESGGQYHVLLIIADGQVTRSVDTDNGGFSPQEQQTIDAIVRASEYPLSIVLVGVGDGPWDTMRQFDDNIPARAFDNFQFVNFTDIMSKNIDPARKEAEFALSALMEIPSQYKATLELGLLGQRTGHCPDRIALPPPTYATQSMRNSPRTSRSTSFQNKPYDNGVSSTPPSTTHNESQQQFCPVCLVSAKNMAFNCGHQTCAGCGEDLHVCPICRSSISVRIKLY

SEQ ID NO: 22774 - DNA, 1363 bp, Arabidopsis thaliana
  misc_feature (1)..(1363): Ceres Seq. ID no. 13622081
  misc_feature (1)..(1363): Ortholog of  Ceres SEQ ID NO 14310524 as cited in SEQ ID NO 58840
  misc_feature (1)..(1363): Ortholog of  Ceres SEQ ID NO 15169541 as cited in SEQ ID NO 67500
gaaaaatatcaaaacacgagacagatttgattccatttttattactgttactatcatccaaacccttggtatttgtagccatgagtcttgtttcagatctcatcaaccttaacctctcagactccactgacaaaatcattgctgaatacatatgggttggtggttctggaatggacatgagaagcaaagccaggactctacctggaccagtgactgacccttcgcagctaccaaagtggaactatgatggttcaagcacaggccaagctcctggtgaagacagtgaagtcatcttataccctcaagccatattcaaggatcctttccgtagaggaaacaacattcttgtcatgtgcgatgcgtacactcccgcgggtgaaccaatcccgactaacaaaagacacgctgcggctaaggtctttagcaaccctgatgttgcagctgaagtgccatggtatggtattgagcaagaatacactttactccagaaagatgtgaagtggcctgttggttggcctattggtggttatcccggccctcagggaccgtactattgcggtattggagcagacaaatcttttggcagagatgttgttgattctcactacaaggcctgcttatacgctgggatcaacattagtggcatcaatggagaagtcatgccgggtcagtgggagttccaggtcggtccagctgttggtatctcggctgctgatgaaatttgggtcgctcgttacattttggagaggatcacagagattgctggtgtagtggtatcttttgacccgaaaccgattcccggtgactggaacggtgctggtgctcactgcaactacagtaccaagtcaatgagggaagaaggcggttacgagatcatcaagaaagcaatcgataaattgggactgagacacaaagaacacattgctgcttacggtgaaggcaatgagcgtcgtctcacaggacaccacgagactgctgacatcaacactttcctttggggtgttgcgaaccgtggagcatcgatccgagtaggacgtgatacggagaaagaagggaaaggatactttgaggacaggaggccagcttcgaacatggatccttacattgtcacttccatgattgcagagactacaatcctctggaatccttgatgatcatcagatcaagaaaaaatcttgaatgtcactcaaatttgtgtttcttgcaagattcaaagtttgtgttctctatcaagcaatgtcttaggataagtcaaagatttgctctgcttattctgctttttatttacttcacatcctattgaaaacatttctgtgtattatttatgaataaacattatcttaaaagggctgatttatttacc

SEQ ID NO: 22775 - protein, 382 aa, Arabidopsis thaliana
  peptide (1)..(382): Ceres Seq. ID no. 13622082
KISKHETDLIPFLLLLLSSKPLVFVAMSLVSDLINLNLSDSTDKIIAEYIWVGGSGMDMRSKARTLPGPVTDPSQLPKWNYDGSSTGQAPGEDSEVILYPQAIFKDPFRRGNNILVMCDAYTPAGEPIPTNKRHAAAKVFSNPDVAAEVPWYGIEQEYTLLQKDVKWPVGWPIGGYPGPQGPYYCGIGADKSFGRDVVDSHYKACLYAGINISGINGEVMPGQWEFQVGPAVGISAADEIWVARYILERITEIAGVVVSFDPKPIPGDWNGAGAHCNYSTKSMREEGGYEIIKKAIDKLGLRHKEHIAAYGEGNERRLTGHHETADINTFLWGVANRGASIRVGRDTEKEGKGYFEDRRPASNMDPYIVTSMIAETTILWNP

SEQ ID NO: 22776 - protein, 356 aa, Arabidopsis thaliana
  peptide (1)..(356): Ceres Seq. ID no. 13622083
MSLVSDLINLNLSDSTDKIIAEYIWVGGSGMDMRSKARTLPGPVTDPSQLPKWNYDGSSTGQAPGEDSEVILYPQAIFKDPFRRGNNILVMCDAYTPAGEPIPTNKRHAAAKVFSNPDVAAEVPWYGIEQEYTLLQKDVKWPVGWPIGGYPGPQGPYYCGIGADKSFGRDVVDSHYKACLYAGINISGINGEVMPGQWEFQVGPAVGISAADEIWVARYILERITEIAGVVVSFDPKPIPGDWNGAGAHCNYSTKSMREEGGYEIIKKAIDKLGLRHKEHIAAYGEGNERRLTGHHETADINTFLWGVANRGASIRVGRDTEKEGKGYFEDRRPASNMDPYIVTSMIAETTILWNP

SEQ ID NO: 22777 - protein, 326 aa, Arabidopsis thaliana
  peptide (1)..(326): Ceres Seq. ID no. 13622084
MDMRSKARTLPGPVTDPSQLPKWNYDGSSTGQAPGEDSEVILYPQAIFKDPFRRGNNILVMCDAYTPAGEPIPTNKRHAAAKVFSNPDVAAEVPWYGIEQEYTLLQKDVKWPVGWPIGGYPGPQGPYYCGIGADKSFGRDVVDSHYKACLYAGINISGINGEVMPGQWEFQVGPAVGISAADEIWVARYILERITEIAGVVVSFDPKPIPGDWNGAGAHCNYSTKSMREEGGYEIIKKAIDKLGLRHKEHIAAYGEGNERRLTGHHETADINTFLWGVANRGASIRVGRDTEKEGKGYFEDRRPASNMDPYIVTSMIAETTILWNP

SEQ ID NO: 22778 - DNA, 801 bp, Arabidopsis thaliana
  misc_feature (1)..(801): Ceres Seq. ID no. 12394858
  misc_feature (1)..(801): Ortholog of  Ceres SEQ ID NO 13590650 as cited in SEQ ID NO 61042
  misc_feature (1)..(801): Ortholog of  Ceres SEQ ID NO 13596897 as cited in SEQ ID NO 63160
atcttcttctctttagacctttttttctgcaggggggctctaaagcaaaacccttttcctgaaatcgccgtcgcaaattagaagaatcacctacagtcttttgtagggttttcaagacgaggcaatatgagattggagaagtgttggttttgctcttccacaatatatcctggtcatggtattcaatttgtccgtaacgatgccaagatattccggttctgtaggtcgaagtgtcacaagaacttcaagatgaagagaaacccacgtaaagtgaaatggactaaagcattcagagctgcacacgggaaggacatgactaaggatacaacatttgagtttgagaagaagagaaacagacctgagagatacgacaggaacgttacagagaatacactcatggccattaagaagattgctaagatcagaaccgcaagggaagccaaacatatcgaaaataggttgaagccaaacaagcagaagaaactcaatgacgatatgaaagaacttgatcagaacattcatatggtccaggctcccggggcacagaagatcaaagttgatgtttccgaaaagaagtctgttcaaaacgaagccatggaagagtgattctgtggtaacaatatgatccgtctaaaagcctctcacttactctgatgctggtgtcatcttaaagaacaagtcttctttagtttctcttaccatttgtttttggaagtctttaaaaaaaaaaaagttttggtttttgtactgataaaacggctttaagttgctatcattttgcaatgtattattatgtgtctt

SEQ ID NO: 22779 - protein, 159 aa, Arabidopsis thaliana
  peptide (1)..(159): Ceres Seq. ID no. 12394859
MRLEKCWFCSSTIYPGHGIQFVRNDAKIFRFCRSKCHKNFKMKRNPRKVKWTKAFRAAHGKDMTKDTTFEFEKKRNRPERYDRNVTENTLMAIKKIAKIRTAREAKHIENRLKPNKQKKLNDDMKELDQNIHMVQAPGAQKIKVDVSEKKSVQNEAMEE

SEQ ID NO: 22780 - protein, 118 aa, Arabidopsis thaliana
  peptide (1)..(118): Ceres Seq. ID no. 12394860
MKRNPRKVKWTKAFRAAHGKDMTKDTTFEFEKKRNRPERYDRNVTENTLMAIKKIAKIRTAREAKHIENRLKPNKQKKLNDDMKELDQNIHMVQAPGAQKIKVDVSEKKSVQNEAMEE

SEQ ID NO: 22781 - protein, 97 aa, Arabidopsis thaliana
  peptide (1)..(97): Ceres Seq. ID no. 12394861
MTKDTTFEFEKKRNRPERYDRNVTENTLMAIKKIAKIRTAREAKHIENRLKPNKQKKLNDDMKELDQNIHMVQAPGAQKIKVDVSEKKSVQNEAMEE

SEQ ID NO: 22782 - DNA, 964 bp, Arabidopsis thaliana
  misc_feature (1)..(964): Ceres Seq. ID no. 13509136
  misc_feature (1)..(964): Ortholog of  Ceres SEQ ID NO 15173873 as cited in SEQ ID NO 62620
  misc_feature (1)..(964): Ortholog of  Ceres SEQ ID NO 13655610 as cited in SEQ ID NO 64148
  misc_feature (1)..(964): Ortholog of  Ceres SEQ ID NO 14302675 as cited in SEQ ID NO 0
ctctatccactctcagccggaaaatttttccttgattcattacgacagagagaaccatgccggcgaaacagaggaccccgaaggtcaacagaaaccctgatctgatcaggggtgttggtaaatactcgagatcccagatgtaccataagagaggtttgtgggctatcaaggccaaaaatggaggcgttttcccacgtcacgacgctaaatctaaggttgatgctccggtggagaagccaccgaagttctatccagctgaagatgttaagaaacctctccccaacaggcgcacggcaaaaccaaccaagctcagagctagcattactccaggtacagtgttgattatccttgctggtaggttcaagggaaagagagttgtcttccttaagcagcttgcctctggtttgcttcttgtgactggaccattcaagatcaatggtgttcctttgagacgtgttaaccaggcctatgtgattggcacttccacaaaggttgacatttctggagtcaccctcgataaattcgatgataagtactttggcaaggttgctgagaagaaaaagaagaagacagaaggagagttctttgaggctgagaaagaggagaagaaggagatcccacaggtgaagaaagatgaccagaaagctgtggatgcagctttgatcaaagccattgaagcagttccagagttgaagacttaccttggcgcaaggttttcattgaaacaaggaatgaagccccatgagcttgttttctagatttcattactttttttctgaggtctctagagtatctgtctcctgaagtgttttaccttctaaatggttgttttgttcttgttcactgaacacatacaatttttggcttatacattctctgttcttacgtatggacaaactatcgatcctgtttttgattgtgagctttgtagcgtggttcgtgatagaaatgggataattattgt

SEQ ID NO: 22783 - protein, 233 aa, Arabidopsis thaliana
  peptide (1)..(233): Ceres Seq. ID no. 13509137
MPAKQRTPKVNRNPDLIRGVGKYSRSQMYHKRGLWAIKAKNGGVFPRHDAKSKVDAPVEKPPKFYPAEDVKKPLPNRRTAKPTKLRASITPGTVLIILAGRFKGKRVVFLKQLASGLLLVTGPFKINGVPLRRVNQAYVIGTSTKVDISGVTLDKFDDKYFGKVAEKKKKKTEGEFFEAEKEEKKEIPQVKKDDQKAVDAALIKAIEAVPELKTYLGARFSLKQGMKPHELVF

SEQ ID NO: 22784 - protein, 206 aa, Arabidopsis thaliana
  peptide (1)..(206): Ceres Seq. ID no. 13509138
MYHKRGLWAIKAKNGGVFPRHDAKSKVDAPVEKPPKFYPAEDVKKPLPNRRTAKPTKLRASITPGTVLIILAGRFKGKRVVFLKQLASGLLLVTGPFKINGVPLRRVNQAYVIGTSTKVDISGVTLDKFDDKYFGKVAEKKKKKTEGEFFEAEKEEKKEIPQVKKDDQKAVDAALIKAIEAVPELKTYLGARFSLKQGMKPHELVF

SEQ ID NO: 22785 - DNA, 1630 bp, Arabidopsis thaliana
  misc_feature (1)..(1630): Ceres Seq. ID no. 13491379
  misc_feature (1)..(1630): Ortholog of  Ceres SEQ ID NO 15168464 as cited in SEQ ID NO 59187
aatgaaatcgaatcaaaaaaaacaaaaatccccaaattaccaaaatcctcggcgacaaagaggagagatagagagagagaaagaggcgaaaataatggcgtcgatccctccgccggagcttgacaacgactcactggcgtcatcgccgagatcggagtacgatagtcagccacgcgtacggttcatgtgtacttttggaggaaggatcttgccacgtccgccggataatcagctctgttacgtcggcggcgataatcgcatggtcgctgttcatcgtcacactactttcgcctctctccttagtaaacttgctaaactctccggtaaaagcaacataagcgtgaagtaccagctaccaaacgaagatcttgacgcgttgatttccgtatcaacggacgaagatgtagagaacatgatggacgaatacgaccgcgtcgcacagaatcaaaacccacgcgcctctcgtcttcgtctttttctcttcaccaaaaacgtcgccggagaagaagataacgatagtcgagctagcagtatcagctctctcctcgatagctctgttaatcgggagcaatggttcctcgacgctcttaacctcggttcttccgccgccgcaaccgcggtatctaacggtgggtccggtagagtctttgagcgagttagatctgaagtctcgtcgattgtttctgaagttcctgattatctctttggattggataatttcgatgaaactgctccgccgcatgagcttcgtgatcgtgatccgagagctaagatccaacgagaagtctcgacgctttcggatcctggttcgcctcgtcgcgatgttccttcgccgtatggttcgacgtcttcggctcctgtgatgcgaatatctacaccggaacttccaccaccagtttttattaaaccggaaagtccagaaccggtttcgactccgaaatccaatcctcaaccggaacaagtaatgcaacagagtaatctcccggttaactcgcaatggcaatatgcccctggcccaggccaacaggttcattaccagggtcataccattcaccaatcaccggtttattacgttcctggttcggttccgggtaatcatatggtccagcaaggaaatcatatggttcaaccgggtaatcatatggtacaaccggttcaaatgccgggtcagtatcttcaacaataccatcatgtaccaatgggataccaccaacctcagactcatcagatggctggtccgggtcaagtatatggtggaacggttaggccggttatgatggcagttgatggaatgaaccggacgggttattatggaatgaaaacacccggtccggttcaaatgtatcagcatcacactggtatggttgttcctggtgtagaagaacaacaacaatacagaaccgaaacggattcggatacgggtcgggcttcttagctgtttgaagaagaaatatgaaaaattatcacatccggggttttcgtcttttcattggagtcgttcttattcgttactgtgtgaactgtgtattattttttgttttacttttgtaaaatttatttttgtgtgtaataattttgtattacaaaatataatgaacagtaaaacccaataataataacattataatct

SEQ ID NO: 22786 - protein, 477 aa, Arabidopsis thaliana
  peptide (1)..(477): Ceres Seq. ID no. 13491380
MKSNQKKQKSPNYQNPRRQRGEIEREKEAKIMASIPPPELDNDSLASSPRSEYDSQPRVRFMCTFGGRILPRPPDNQLCYVGGDNRMVAVHRHTTFASLLSKLAKLSGKSNISVKYQLPNEDLDALISVSTDEDVENMMDEYDRVAQNQNPRASRLRLFLFTKNVAGEEDNDSRASSISSLLDSSVNREQWFLDALNLGSSAAATAVSNGGSGRVFERVRSEVSSIVSEVPDYLFGLDNFDETAPPHELRDRDPRAKIQREVSTLSDPGSPRRDVPSPYGSTSSAPVMRISTPELPPPVFIKPESPEPVSTPKSNPQPEQVMQQSNLPVNSQWQYAPGPGQQVHYQGHTIHQSPVYYVPGSVPGNHMVQQGNHMVQPGNHMVQPVQMPGQYLQQYHHVPMGYHQPQTHQMAGPGQVYGGTVRPVMMAVDGMNRTGYYGMKTPGPVQMYQHHTGMVVPGVEEQQQYRTETDSDTGRAS

SEQ ID NO: 22787 - protein, 446 aa, Arabidopsis thaliana
  peptide (1)..(446): Ceres Seq. ID no. 13491381
MASIPPPELDNDSLASSPRSEYDSQPRVRFMCTFGGRILPRPPDNQLCYVGGDNRMVAVHRHTTFASLLSKLAKLSGKSNISVKYQLPNEDLDALISVSTDEDVENMMDEYDRVAQNQNPRASRLRLFLFTKNVAGEEDNDSRASSISSLLDSSVNREQWFLDALNLGSSAAATAVSNGGSGRVFERVRSEVSSIVSEVPDYLFGLDNFDETAPPHELRDRDPRAKIQREVSTLSDPGSPRRDVPSPYGSTSSAPVMRISTPELPPPVFIKPESPEPVSTPKSNPQPEQVMQQSNLPVNSQWQYAPGPGQQVHYQGHTIHQSPVYYVPGSVPGNHMVQQGNHMVQPGNHMVQPVQMPGQYLQQYHHVPMGYHQPQTHQMAGPGQVYGGTVRPVMMAVDGMNRTGYYGMKTPGPVQMYQHHTGMVVPGVEEQQQYRTETDSDTGRAS

SEQ ID NO: 22788 - protein, 416 aa, Arabidopsis thaliana
  peptide (1)..(416): Ceres Seq. ID no. 13491382
MCTFGGRILPRPPDNQLCYVGGDNRMVAVHRHTTFASLLSKLAKLSGKSNISVKYQLPNEDLDALISVSTDEDVENMMDEYDRVAQNQNPRASRLRLFLFTKNVAGEEDNDSRASSISSLLDSSVNREQWFLDALNLGSSAAATAVSNGGSGRVFERVRSEVSSIVSEVPDYLFGLDNFDETAPPHELRDRDPRAKIQREVSTLSDPGSPRRDVPSPYGSTSSAPVMRISTPELPPPVFIKPESPEPVSTPKSNPQPEQVMQQSNLPVNSQWQYAPGPGQQVHYQGHTIHQSPVYYVPGSVPGNHMVQQGNHMVQPGNHMVQPVQMPGQYLQQYHHVPMGYHQPQTHQMAGPGQVYGGTVRPVMMAVDGMNRTGYYGMKTPGPVQMYQHHTGMVVPGVEEQQQYRTETDSDTGRAS

SEQ ID NO: 22789 - DNA, 976 bp, Arabidopsis thaliana
  misc_feature (1)..(976): Ceres Seq. ID no. 13490663
  misc_feature (1)..(976): Ortholog of  Ceres SEQ ID NO 15178083 as cited in SEQ ID NO 56185
  misc_feature (1)..(976): Ortholog of  Ceres SEQ ID NO 15225046 as cited in SEQ ID NO 57061
  misc_feature (1)..(976): Ortholog of  Ceres SEQ ID NO 15179881 as cited in SEQ ID NO 66861
atttttctcttttccctctccttctttcttcctttataaatccatttattctcctctcatctctcagcaaaatcaaatcctcatagttgattctctctatctctctcacgagtcacgatcctactcttcttgatatggctgaggttttgcgtcccgagatgttagatatctctaacgacacttcttcattagcatcaccgaaacttcttcatgttcttgctgttgatgatagtatggttgatcggaagttcatcgagcggttactcagagtctcatcttgtaaagttactgttgtcgatagtgcgacaagagctttacaatatcttggattagatggagagaataatagttcggttggatttgaggatctgaagattaatttgataatgacggattactctatgcctgggatgactggatatgaactactgaagaagatcaaagaatcatcagctttcagagaaataccagttgtgattatgtcttcagagaacatcttgcctcgtatcgatagatgtcttgaagaaggagctgaagatttcttattgaagcctgtgaaattagctgatgtgaagagattaagagattctttaatgaaagctgaggaaagagcttttaagaatattatgcacaagagagagcttgaagctaatgatatctactcgcagctaaaacgcgcaaagatctgagtttatcagattccacgtacgatatgttctttaaaagctcaaagattcacacacatgcatgtcctgattctttcggcttacaatttttgagacattacggcttcttttgctgatagaaccaagactgatcaagagtgacaaagatgggtttttataagatagaaatgtaaattgtagacttggattcattagagaggagaagagatacattttttttttctttacatgagagatatgtaaaatggtggtgtgttattttggaagttaacatatgaatttcttttgtt

SEQ ID NO: 22790 - protein, 184 aa, Arabidopsis thaliana
  peptide (1)..(184): Ceres Seq. ID no. 13490664
MAEVLRPEMLDISNDTSSLASPKLLHVLAVDDSMVDRKFIERLLRVSSCKVTVVDSATRALQYLGLDGENNSSVGFEDLKINLIMTDYSMPGMTGYELLKKIKESSAFREIPVVIMSSENILPRIDRCLEEGAEDFLLKPVKLADVKRLRDSLMKAEERAFKNIMHKRELEANDIYSQLKRAKI

SEQ ID NO: 22791 - protein, 176 aa, Arabidopsis thaliana
  peptide (1)..(176): Ceres Seq. ID no. 13490665
MLDISNDTSSLASPKLLHVLAVDDSMVDRKFIERLLRVSSCKVTVVDSATRALQYLGLDGENNSSVGFEDLKINLIMTDYSMPGMTGYELLKKIKESSAFREIPVVIMSSENILPRIDRCLEEGAEDFLLKPVKLADVKRLRDSLMKAEERAFKNIMHKRELEANDIYSQLKRAKI

SEQ ID NO: 22792 - protein, 151 aa, Arabidopsis thaliana
  peptide (1)..(151): Ceres Seq. ID no. 13490666
MVDRKFIERLLRVSSCKVTVVDSATRALQYLGLDGENNSSVGFEDLKINLIMTDYSMPGMTGYELLKKIKESSAFREIPVVIMSSENILPRIDRCLEEGAEDFLLKPVKLADVKRLRDSLMKAEERAFKNIMHKRELEANDIYSQLKRAKI

SEQ ID NO: 22793 - DNA, 1455 bp, Arabidopsis thaliana
  misc_feature (1)..(1455): Ceres Seq. ID no. 12324438
  misc_feature (1)..(1455): Ortholog of  Ceres SEQ ID NO 15171739 as cited in SEQ ID NO 57134
attattattccactctctctctctagactctgaattagctcattcttgcctccaaacaaatattcctgacagaccagaccactcgtaagacagaccaaaccctaaactaaaagcatccacgttctttgtttttgtattgatggtctgatctcatatccatggagatggagaatcaccgccccggcagtttcacctacatgggccgcaaattcagcgatttaagtctcaacgatgactcctctgctttcagcgattgtaacagcgacagatccggcgaattccccactgcttcctccgagagccgtcgtctcctcctctcttgcgcctctgagaattccgatgatctcatcaatcatctcgtgtcgcatcttgattcctcctattcgatcgatgagcagaagcaagctgctatggagatcaggctcttatccaagaacaaacctgagaatcggatcaaaatcgccaaggccggtgcgattaagccgttgatttctctgatctcttcttcggatcttcagcttcaggagtatggtgtcactgcaatcttgaatctatctctctgcgacgagaacaaagagtcgattgcttcttccggtgcgattaagccgcttgtcagggctttgaaaatgggaacaccgactgctaaagagaacgctgcttgtgctctgctccgtctatcgcagatcgaggagaacaaagtcgccatcgggagatccggagcgattcctctgttggtgaaccttctagaaacaggcggattcagagcgaagaaggacgcgtcgacggctctgtactcgttgtgctcagctaaagagaacaaaatcagagccgtgcaatcgggaattatgaagccgcttgttgaattgatggcggatttcggatcaaacatggtggataaatcggcgtttgtgatgagtctgttaatgtcggtgccggaatcgaaaccggcgattgtggaggaaggaggagttccggtgctggtggagatagtagaggtgggaacacagagacagaaagagatggctgtgtcgatattgctacagctttgtgaggagagtgttgtgtatagaacaatggtggctagagaaggagcgatacctccgctagtggctctgtcgcaggcaggaacaagtcgagctaagcaaaaggctgaggcgttgattgagcttctaaggcaactaagatccattagtaatggtggtgctagatcatcgtcccaactctgatgtgagcttttcttatttatctttttttaccacactctttcttcgtcttttactgttaatgcgagggtgtatacaaacaaccagaaaaaaaaggggggaaaaggaaactgtaaatagtttgtgtagaaaattagtgggcttgttgtaatttatcttgagtttggcttttcttttctttttgtgatccatttcataaatttcggtttggttttaacagatttctcattcc

SEQ ID NO: 22794 - protein, 355 aa, Arabidopsis thaliana
  peptide (1)..(355): Ceres Seq. ID no. 12324439
MEMENHRPGSFTYMGRKFSDLSLNDDSSAFSDCNSDRSGEFPTASSESRRLLLSCASENSDDLINHLVSHLDSSYSIDEQKQAAMEIRLLSKNKPENRIKIAKAGAIKPLISLISSSDLQLQEYGVTAILNLSLCDENKESIASSGAIKPLVRALKMGTPTAKENAACALLRLSQIEENKVAIGRSGAIPLLVNLLETGGFRAKKDASTALYSLCSAKENKIRAVQSGIMKPLVELMADFGSNMVDKSAFVMSLLMSVPESKPAIVEEGGVPVLVEIVEVGTQRQKEMAVSILLQLCEESVVYRTMVAREGAIPPLVALSQAGTSRAKQKAEALIELLRQLRSISNGGARSSSQL

SEQ ID NO: 22795 - protein, 353 aa, Arabidopsis thaliana
  peptide (1)..(353): Ceres Seq. ID no. 12324440
MENHRPGSFTYMGRKFSDLSLNDDSSAFSDCNSDRSGEFPTASSESRRLLLSCASENSDDLINHLVSHLDSSYSIDEQKQAAMEIRLLSKNKPENRIKIAKAGAIKPLISLISSSDLQLQEYGVTAILNLSLCDENKESIASSGAIKPLVRALKMGTPTAKENAACALLRLSQIEENKVAIGRSGAIPLLVNLLETGGFRAKKDASTALYSLCSAKENKIRAVQSGIMKPLVELMADFGSNMVDKSAFVMSLLMSVPESKPAIVEEGGVPVLVEIVEVGTQRQKEMAVSILLQLCEESVVYRTMVAREGAIPPLVALSQAGTSRAKQKAEALIELLRQLRSISNGGARSSSQL

SEQ ID NO: 22796 - protein, 342 aa, Arabidopsis thaliana
  peptide (1)..(342): Ceres Seq. ID no. 12324441
MGRKFSDLSLNDDSSAFSDCNSDRSGEFPTASSESRRLLLSCASENSDDLINHLVSHLDSSYSIDEQKQAAMEIRLLSKNKPENRIKIAKAGAIKPLISLISSSDLQLQEYGVTAILNLSLCDENKESIASSGAIKPLVRALKMGTPTAKENAACALLRLSQIEENKVAIGRSGAIPLLVNLLETGGFRAKKDASTALYSLCSAKENKIRAVQSGIMKPLVELMADFGSNMVDKSAFVMSLLMSVPESKPAIVEEGGVPVLVEIVEVGTQRQKEMAVSILLQLCEESVVYRTMVAREGAIPPLVALSQAGTSRAKQKAEALIELLRQLRSISNGGARSSSQL

SEQ ID NO: 22797 - DNA, 1155 bp, Arabidopsis thaliana
  misc_feature (1)..(1155): Ceres Seq. ID no. 13497495
  misc_feature (1)..(1155): Ortholog of  Ceres SEQ ID NO 13590967 as cited in SEQ ID NO 65553
  misc_feature (1)..(1155): Ortholog of  Ceres SEQ ID NO 14309438 as cited in SEQ ID NO 0
aaatttctctcgccattttatagattaaggtgttctctctgacttcggaggagaaagaaagaaaaaaaatattcttgtttcaaacttcaatggcgttctcgagttccatcttctctgttactcagttttcttcttcgttagcttcgcgtccttcttctgcaatcagtaggcagactcgttttcccgctcaaattgcttctccagatctatcgcctgctttgttcgatgatcgccggaagttcgtcggaggtgtaatgtctctcttgacgaagagtattaaaaaccgtgtatatgcttcgattaacagcattgattcggccgctactccatcgtatccgaaatcggaagacgatgacgacgttgttccaatgccaatggttatgatagaccaggatgctgaccctgaagctactattgtacaactcagttttggaaatcgtcttggggctcttattgacacaatgcgggcgctgaaagatttgggattggatgtaataaaaggaactgtctcaactgaaggatccattaagcagaccaaattttctataacgaaacgagacactggccggaaagtggaagatcctgacttgttggaacaaatccgattaacaatcatcaacaatctcttgaaataccatccggaatgcagtgagcaacttgcaatgggtgagacttttggaataaaggctcccgaaaagaagattgatgtcgatatcgcaactcatatacatgtgaaagaagatggaccaaagaggagcctgcttgtcatagagacagcggacaggccaggtcttgtcgtagagatgatcaaagtgatggctgatgtcaacatagacgtggaatccgcagagatagatacagagggactggttgcgaaagacaagtttcacgtaagctaccaagggcaagctctaaacagatctttgtcacaggttttggtgaactgtctgcgttacttcctgagaaggcctgaaactgacattgacagctactaaatgagcttttgtttgctctaaaacaaaactgctctttatcctttaaagcaatcatatctgtgcttgcgaaactttcagacttctgtatggaagattatgtggaaattcgtgatactataattgaaccactgtggctaaaaaataaatgggttcttgacac

SEQ ID NO: 22798 - protein, 301 aa, Arabidopsis thaliana
  peptide (1)..(301): Ceres Seq. ID no. 13497496
MAFSSSIFSVTQFSSSLASRPSSAISRQTRFPAQIASPDLSPALFDDRRKFVGGVMSLLTKSIKNRVYASINSIDSAATPSYPKSEDDDDVVPMPMVMIDQDADPEATIVQLSFGNRLGALIDTMRALKDLGLDVIKGTVSTEGSIKQTKFSITKRDTGRKVEDPDLLEQIRLTIINNLLKYHPECSEQLAMGETFGIKAPEKKIDVDIATHIHVKEDGPKRSLLVIETADRPGLVVEMIKVMADVNIDVESAEIDTEGLVAKDKFHVSYQGQALNRSLSQVLVNCLRYFLRRPETDIDSY

SEQ ID NO: 22799 - protein, 246 aa, Arabidopsis thaliana
  peptide (1)..(246): Ceres Seq. ID no. 13497497
MSLLTKSIKNRVYASINSIDSAATPSYPKSEDDDDVVPMPMVMIDQDADPEATIVQLSFGNRLGALIDTMRALKDLGLDVIKGTVSTEGSIKQTKFSITKRDTGRKVEDPDLLEQIRLTIINNLLKYHPECSEQLAMGETFGIKAPEKKIDVDIATHIHVKEDGPKRSLLVIETADRPGLVVEMIKVMADVNIDVESAEIDTEGLVAKDKFHVSYQGQALNRSLSQVLVNCLRYFLRRPETDIDSY

SEQ ID NO: 22800 - protein, 208 aa, Arabidopsis thaliana
  peptide (1)..(208): Ceres Seq. ID no. 13497498
MPMVMIDQDADPEATIVQLSFGNRLGALIDTMRALKDLGLDVIKGTVSTEGSIKQTKFSITKRDTGRKVEDPDLLEQIRLTIINNLLKYHPECSEQLAMGETFGIKAPEKKIDVDIATHIHVKEDGPKRSLLVIETADRPGLVVEMIKVMADVNIDVESAEIDTEGLVAKDKFHVSYQGQALNRSLSQVLVNCLRYFLRRPETDIDSY

SEQ ID NO: 22801 - DNA, 1397 bp, Arabidopsis thaliana
  misc_feature (1)..(1397): Ceres Seq. ID no. 12562342
  misc_feature (1)..(1397): Ortholog of  Ceres SEQ ID NO 13596048 as cited in SEQ ID NO 68476
  misc_feature (1)..(1397): Ortholog of  Ceres SEQ ID NO 12589137 as cited in SEQ ID NO 0
acaacataaacccaatctctcactcagactaagacagagtcagaaacaatggcgaaatctccagaaacagagcatccgaacaaagtctttggttggggtgctagagacaaatccggtgttctctctccttttcacttctctagaagagacaatggtgaaaatgatgtgacagtgaagatcttgttctgtggagtttgccacactgatttacacaccatcaaaaacgactggggatactcgtattacccagtagttccagggcatgaaatcgttgggatcgctacaaaagttggtaagaacgtgactaaattcaaagaaggagatcgtgtcggagtaggagtgatcagtggctcgtgccaatcttgcgaatcttgtgaccaagatcttgaaaactactgtcctcaaatgtctttcacatacaatgcgattggatccgatggaaccaagaattacggtggctattcggagaacattgtggttgatcaacggtttgttttgcggtttccggagaatttaccgagcgattcgggtgcgccgttgctgtgtgctggaatcactgtgtatagtccaatgaagtattatggtatgactgaggcagggaagcatttaggggttgctggacttggtgggcttggtcatgttgctgttaagattggtaaagcttttggtttgaaagttactgtcattagttcttcttctacgaaagcagaggaagccattaatcatcttggtgctgattcgtttcttgtcacaactgatcctcagaaaatgaaggctgcaattggaacaatggactacattatcgatacgatatcagcagtacatgctctgtatccgttgctcggtttactcaaagtcaacggaaagctcattgctttaggcttacctgagaagcctctcgagctaccaatgttccctcttgttctcggaaggaaaatggttggaggaagtgacgtgggagggatgaaggagacacaagagatgcttgatttctgcgctaagcacaacattacagctgatattgaattgattaagatggatgagattaacactgcgatggagaggcttgctaagtctgatgttaggtacaggttcgtgatcgacgtggctaactccttgagccctccatgaatgatccggatctaagaattgagcattgaggaggctttaaatctatgtcataatcttggtgtttgtttgtgtctctcgagttatcttcgttttctgctttcggtttgagaatcggtttcttctcagacaagttaccttatttcgttgttttcttctcatgttctgtttcctgagagaaactctttctgattccagataagactttgatccattttcagtttgctaataatataaagatgggtctaaaacctaaacagctttaaact

SEQ ID NO: 22802 - protein, 360 aa, Arabidopsis thaliana
  peptide (1)..(360): Ceres Seq. ID no. 12562343
MAKSPETEHPNKVFGWGARDKSGVLSPFHFSRRDNGENDVTVKILFCGVCHTDLHTIKNDWGYSYYPVVPGHEIVGIATKVGKNVTKFKEGDRVGVGVISGSCQSCESCDQDLENYCPQMSFTYNAIGSDGTKNYGGYSENIVVDQRFVLRFPENLPSDSGAPLLCAGITVYSPMKYYGMTEAGKHLGVAGLGGLGHVAVKIGKAFGLKVTVISSSSTKAEEAINHLGADSFLVTTDPQKMKAAIGTMDYIIDTISAVHALYPLLGLLKVNGKLIALGLPEKPLELPMFPLVLGRKMVGGSDVGGMKETQEMLDFCAKHNITADIELIKMDEINTAMERLAKSDVRYRFVIDVANSLSPP

SEQ ID NO: 22803 - protein, 241 aa, Arabidopsis thaliana
  peptide (1)..(241): Ceres Seq. ID no. 12562344
MSFTYNAIGSDGTKNYGGYSENIVVDQRFVLRFPENLPSDSGAPLLCAGITVYSPMKYYGMTEAGKHLGVAGLGGLGHVAVKIGKAFGLKVTVISSSSTKAEEAINHLGADSFLVTTDPQKMKAAIGTMDYIIDTISAVHALYPLLGLLKVNGKLIALGLPEKPLELPMFPLVLGRKMVGGSDVGGMKETQEMLDFCAKHNITADIELIKMDEINTAMERLAKSDVRYRFVIDVANSLSPP

SEQ ID NO: 22804 - protein, 186 aa, Arabidopsis thaliana
  peptide (1)..(186): Ceres Seq. ID no. 12562345
MKYYGMTEAGKHLGVAGLGGLGHVAVKIGKAFGLKVTVISSSSTKAEEAINHLGADSFLVTTDPQKMKAAIGTMDYIIDTISAVHALYPLLGLLKVNGKLIALGLPEKPLELPMFPLVLGRKMVGGSDVGGMKETQEMLDFCAKHNITADIELIKMDEINTAMERLAKSDVRYRFVIDVANSLSPP

SEQ ID NO: 22805 - DNA, 1191 bp, Arabidopsis thaliana
  misc_feature (1)..(1191): Ceres Seq. ID no. 12334603
  misc_feature (1)..(1191): Ortholog of  Ceres SEQ ID NO 13654989 as cited in SEQ ID NO 63117
  misc_feature (1)..(1191): Ortholog of  Ceres SEQ ID NO 13657138 as cited in SEQ ID NO 65923
  misc_feature (1)..(1191): Ortholog of  Ceres SEQ ID NO 13584744 as cited in SEQ ID NO 69137
taccattcttctgaaaatgaacacctcagaagccctaagcaccacaatgattttgggcatcacactagaaaaccacaggctgctgtgaagcctgatgctttgaaggagcctccatctattgatgtgcctgcattgtcattggatgagttgaaagaaaagaccgataactttggatcaaagtcattgattggtgaaggatcttacggcagagcctattatgcaaccttgaaagatggaaaggctgtcgcggtgaagaagcttgacaatgcagcggaacctgaatcaaatgttgagttcttgactcaggtctcgagggtttccaagctgaagcacgataattttgttgagctcttcggttattgcgttgaagggaatttccgcattcttgcgtatgagtttgctactatgggatctttacatgacatcttacacgggaggaaaggagtccaaggagcacaaccaggtcctacgcttgactggatccaacgggtcagaatagcagttgatgcagctagaggacttgagtatttgcatgagaaagttcaacctgcagtaatacacagagatattcgatctagcaatgtgcttctctttgaagattttaaagccaagatcgctgattttaatctatcgaaccaatctcctgatatggctgctcgtcttcattctaccagagttttgggaaccttcggttaccacgcaccagagtatgcgatgactggtcaactgacacagaagagtgatgtttatagttttggtgtggtgcttttggagctcttgactggtaggaaacccgtcgatcatacgatgcctcgtggtcaacaaagtcttgttacttgggctactccaaggctaagtgaagacaaagtgaagcaatgtgttgatccaaaactaaagggagaatatcctcctaaagctgttgcaaagctcgctgcagtagcagcattgtgtgtgcaatatgaatcagagtttaggccaaacatgagcattgtggtaaaagctcttcaaccattgttgaggtcatcaacagcagcagctgtaccagtccaggaagcctgattcttctgtgcaatagcaacaatggaagattgggttcggtttcagttgttgccataccgtataaatgtgttcttaaagagagtctttttgtcgaggcttttcttcagttaagagctccaaaagcaccacacc

SEQ ID NO: 22806 - protein, 352 aa, Arabidopsis thaliana
  peptide (1)..(352): Ceres Seq. ID no. 12334604
YHSSENEHLRSPKHHNDFGHHTRKPQAAVKPDALKEPPSIDVPALSLDELKEKTDNFGSKSLIGEGSYGRAYYATLKDGKAVAVKKLDNAAEPESNVEFLTQVSRVSKLKHDNFVELFGYCVEGNFRILAYEFATMGSLHDILHGRKGVQGAQPGPTLDWIQRVRIAVDAARGLEYLHEKVQPAVIHRDIRSSNVLLFEDFKAKIADFNLSNQSPDMAARLHSTRVLGTFGYHAPEYAMTGQLTQKSDVYSFGVVLLELLTGRKPVDHTMPRGQQSLVTWATPRLSEDKVKQCVDPKLKGEYPPKAVAKLAAVAALCVQYESEFRPNMSIVVKALQPLLRSSTAAAVPVQEA

SEQ ID NO: 22807 - protein, 217 aa, Arabidopsis thaliana
  peptide (1)..(217): Ceres Seq. ID no. 12334605
MGSLHDILHGRKGVQGAQPGPTLDWIQRVRIAVDAARGLEYLHEKVQPAVIHRDIRSSNVLLFEDFKAKIADFNLSNQSPDMAARLHSTRVLGTFGYHAPEYAMTGQLTQKSDVYSFGVVLLELLTGRKPVDHTMPRGQQSLVTWATPRLSEDKVKQCVDPKLKGEYPPKAVAKLAAVAALCVQYESEFRPNMSIVVKALQPLLRSSTAAAVPVQEA

SEQ ID NO: 22808 - DNA, 1253 bp, Arabidopsis thaliana
  misc_feature (1)..(1253): Ceres Seq. ID no. 12338970
  misc_feature (1)..(1253): Ortholog of  Ceres SEQ ID NO 14313471 as cited in SEQ ID NO 64513
  misc_feature (1)..(1253): Ortholog of  Ceres SEQ ID NO 13591377 as cited in SEQ ID NO 66534
cttcttggatgcatcagattcgcatcaaagttcgtcagaacagtaacagaatcctcaaacgccgtcattatcgccatcagcgatccatcactcgaaaccgcaaaaaccttcgccaccgggaacaatttatcgccggagaccgtcacgatatacggaagctacgaggagcttttaaacgatgcaaacgtcgacgccgtttacttgacgatgccggtgacgcaacgagcgaaatgggcggtgacggcggcagagaagaagaagcatctgcttgttgagaaaccaccagctcaagacgcgacggagctggagaagattgttgaggcgtgtgaatctaacggtgtgcagtttatggacggtacgatttggttgcatcatcaacggacggttaagattagagatacgatgtttgattctggattgcttggagatgttcgccacatgtatagcacgatgaccactccggtaccggagcaagtattggaaagactgactaaagaagctatgggtttagccggagctatcggagagcttggatggtaccctataggcgcagctttatgggctatgtcttaccaaatgcctatatcggtcagggcacttccctcctctgtctccacaaactcggttggcactatcttgtcctgcactgcctctcttcagttcggttcaaccgcaaccacaaccgcaatcgttcattgctctttcctctctcaactttcaacggacttagctatctcaggctcaaaagggtcgattcaaatgaatgactatgtgataccctacaaggaggacaaagcttggttcgaatacacaagtggtgcgaagtttgtggacatgcacattggttggaatgtgacgccagagagagttacagtggactgtagcggaactccggagacgcaagaggcaatgatgctgagagagttcacgcggcttgtggaaggaatcaagcggggcgacttagaggctgatcgtcggtggccggaggttagtaagaagacgcagttggtggttgatgctgtgaagaaatctgttgatattggttgtgaagtggttcatctgtaaaacttgttgaaatcttctgctaattagattatgatatttatgttagtgtcattgatacatgctttatggtaattaacttttataagtcgaagatgatatgtacttcatatttttatttggcactccatatgtactcaaaactgagatatgttaggtcagtagaagtaggtggagtttaagtttagttc

SEQ ID NO: 22809 - protein, 354 aa, Arabidopsis thaliana
  peptide (1)..(354): Ceres Seq. ID no. 12338971
LLGCIRFASKFVRTVTESSNAVIIAISDPSLETAKTFATGNNLSPETVTIYGSYEELLNDANVDAVYLTMPVTQRAKWAVTAAEKKKHLLVEKPPAQDATELEKIVEACESNGVQFMDGTIWLHHQRTVKIRDTMFDSGLLGDVRHMYSTMTTPVPEQVLERLTKEAMGLAGAIGELGWYPIGAALWAMSYQMPISVRALPSSVSTNSVGTILSCTASLQFGSTATTTAIVHCSFLSQLSTDLAISGSKGSIQMNDYVIPYKEDKAWFEYTSGAKFVDMHIGWNVTPERVTVDCSGTPETQEAMMLREFTRLVEGIKRGDLEADRRWPEVSKKTQLVVDAVKKSVDIGCEVVHL

SEQ ID NO: 22810 - protein, 285 aa, Arabidopsis thaliana
  peptide (1)..(285): Ceres Seq. ID no. 12338973
MPVTQRAKWAVTAAEKKKHLLVEKPPAQDATELEKIVEACESNGVQFMDGTIWLHHQRTVKIRDTMFDSGLLGDVRHMYSTMTTPVPEQVLERLTKEAMGLAGAIGELGWYPIGAALWAMSYQMPISVRALPSSVSTNSVGTILSCTASLQFGSTATTTAIVHCSFLSQLSTDLAISGSKGSIQMNDYVIPYKEDKAWFEYTSGAKFVDMHIGWNVTPERVTVDCSGTPETQEAMMLREFTRLVEGIKRGDLEADRRWPEVSKKTQLVVDAVKKSVDIGCEVVHL

SEQ ID NO: 22811 - protein, 238 aa, Arabidopsis thaliana
  peptide (1)..(238): Ceres Seq. ID no. 12338974
MDGTIWLHHQRTVKIRDTMFDSGLLGDVRHMYSTMTTPVPEQVLERLTKEAMGLAGAIGELGWYPIGAALWAMSYQMPISVRALPSSVSTNSVGTILSCTASLQFGSTATTTAIVHCSFLSQLSTDLAISGSKGSIQMNDYVIPYKEDKAWFEYTSGAKFVDMHIGWNVTPERVTVDCSGTPETQEAMMLREFTRLVEGIKRGDLEADRRWPEVSKKTQLVVDAVKKSVDIGCEVVHL

SEQ ID NO: 22812 - DNA, 1393 bp, Arabidopsis thaliana
  misc_feature (1)..(1393): Ceres Seq. ID no. 13490612
  misc_feature (1)..(1393): Ortholog of  Ceres SEQ ID NO 12364737 as cited in SEQ ID NO 51089
  misc_feature (1)..(1393): Ortholog of  Ceres SEQ ID NO 12581561 as cited in SEQ ID NO 53617
  misc_feature (1)..(1393): Ortholog of  Ceres SEQ ID NO 14316263 as cited in SEQ ID NO 55294
  misc_feature (1)..(1393): Ortholog of  Ceres SEQ ID NO 13582301 as cited in SEQ ID NO 56509
  misc_feature (1)..(1393): Ortholog of  Ceres SEQ ID NO 15176751 as cited in SEQ ID NO 59719
  misc_feature (1)..(1393): Ortholog of  Ceres SEQ ID NO 13597380 as cited in SEQ ID NO 64054
  misc_feature (1)..(1393): Ortholog of  Ceres SEQ ID NO 12625474 as cited in SEQ ID NO 64169
  misc_feature (1)..(1393): Ortholog of  Ceres SEQ ID NO 13597502 as cited in SEQ ID NO 64681
aacattctcatttcatagcaaaacaccaaaacagagttcacagaaacatattcaaagatttttcacaaatattaccattttaaatctataaacaatgacgaactcggtggctaagttggcactactagggttttgcattctgcaagtgacgagcttacttgttccgcaagcaaatgctagggctttccttgtgtttggagattctctcgttgacaatggtaacaatgactttcttgctaccactgctcgtgccgataattacccttatggtatcgatttcccaactcatcgtcctacgggccgtttctccaatggtctaaacattccagatctcatcagtgaacatttgggtcaagagtctccaatgccgtaccttagtccaatgctgaagaaggacaaactcttaaggggagctaacttcgcctccgcgggtattggaatccttaacgacaccggaatccagtttctgaatattattaggatcacaaagcagctagagtacttcgagcagtacaaggttcgagtaagcgggttggtcggagaagaagagatgaatcggctcgtgaacggagctcttgtcctaataacacttggaggcaatgatttcgtcaacaactactacttggtccctttctctgcaagatctcgtcaattctctcttcctgactacgttgtctttgtcatttctgaataccgcaaagtcttacggaaaatgtacgatttgggtgctcgacgtgtccttgtgactggaacaggaccaatgggttgcgtcccggccgagctggcgcaacgtagccgcaacggcgagtgtgctaccgaactccaacgagccgcgtcactattcaacccacaactaattcaaatgataacagacctcaacaacgaagttggatcttcggccttcattgccgctaatactcaacaaatgcacatggacttcattagcgacccacaagcatatggattcgtcacgtcgaaggtggcttgttgtggacaagggccgtacaatgggatagggctatgcactccattatcaaatctttgcccaaacagagatctctttgccttttgggatccttttcacccatcagaaaaagcaagtagaatcatagctcaacaaatcctcaatggctctcctgaatacatgcatcccatgaatcttagcaccatcctcaccgttgattccatgacctaagcttctattcctcatctatcccaaatccactttatgctttgtttttgttttgcctttctcgtttattatatatttttacattggcactttaattagtttccttgagttatgttgtgagttttgtgttgttcatcaataattagtcaccaattgtgagctgagaagtaatattcaacaatcttacgaatgttcactatc

SEQ ID NO: 22813 - protein, 366 aa, Arabidopsis thaliana
  peptide (1)..(366): Ceres Seq. ID no. 13490613
MTNSVAKLALLGFCILQVTSLLVPQANARAFLVFGDSLVDNGNNDFLATTARADNYPYGIDFPTHRPTGRFSNGLNIPDLISEHLGQESPMPYLSPMLKKDKLLRGANFASAGIGILNDTGIQFLNIIRITKQLEYFEQYKVRVSGLVGEEEMNRLVNGALVLITLGGNDFVNNYYLVPFSARSRQFSLPDYVVFVISEYRKVLRKMYDLGARRVLVTGTGPMGCVPAELAQRSRNGECATELQRAASLFNPQLIQMITDLNNEVGSSAFIAANTQQMHMDFISDPQAYGFVTSKVACCGQGPYNGIGLCTPLSNLCPNRDLFAFWDPFHPSEKASRIIAQQILNGSPEYMHPMNLSTILTVDSMT

SEQ ID NO: 22814 - protein, 276 aa, Arabidopsis thaliana
  peptide (1)..(276): Ceres Seq. ID no. 13490614
MPYLSPMLKKDKLLRGANFASAGIGILNDTGIQFLNIIRITKQLEYFEQYKVRVSGLVGEEEMNRLVNGALVLITLGGNDFVNNYYLVPFSARSRQFSLPDYVVFVISEYRKVLRKMYDLGARRVLVTGTGPMGCVPAELAQRSRNGECATELQRAASLFNPQLIQMITDLNNEVGSSAFIAANTQQMHMDFISDPQAYGFVTSKVACCGQGPYNGIGLCTPLSNLCPNRDLFAFWDPFHPSEKASRIIAQQILNGSPEYMHPMNLSTILTVDSMT

SEQ ID NO: 22815 - protein, 270 aa, Arabidopsis thaliana
  peptide (1)..(270): Ceres Seq. ID no. 13490615
MLKKDKLLRGANFASAGIGILNDTGIQFLNIIRITKQLEYFEQYKVRVSGLVGEEEMNRLVNGALVLITLGGNDFVNNYYLVPFSARSRQFSLPDYVVFVISEYRKVLRKMYDLGARRVLVTGTGPMGCVPAELAQRSRNGECATELQRAASLFNPQLIQMITDLNNEVGSSAFIAANTQQMHMDFISDPQAYGFVTSKVACCGQGPYNGIGLCTPLSNLCPNRDLFAFWDPFHPSEKASRIIAQQILNGSPEYMHPMNLSTILTVDSMT

SEQ ID NO: 22816 - DNA, 1252 bp, Arabidopsis thaliana
  misc_feature (1)..(1252): Ceres Seq. ID no. 12394465
  misc_feature (1)..(1252): Ortholog of  Ceres SEQ ID NO 14302852 as cited in SEQ ID NO 64814
  misc_feature (1)..(1252): Ortholog of  Ceres SEQ ID NO 13598593 as cited in SEQ ID NO 64978
  misc_feature (1)..(1252): Ortholog of  Ceres SEQ ID NO 14303067 as cited in SEQ ID NO 67078
  misc_feature (1)..(1252): Ortholog of  Ceres SEQ ID NO 13595992 as cited in SEQ ID NO 68401
aaaaaacaaaccaactttccttctctaatcaaaacaagaaagacacaaagatggagatctcaaaaacccttttgctagtgatttctctggtggctgcaacttgtttcttgcaagccaaggcagctggagtttattgtagtaacccttacactcgatgttaccgcaagtacattaggtgtccagaggaatgtccaagcaaaaccgctatgaactccaagaacaaagtttgctacgccgattgcgatagacccacttgcaaatcccaatgccgcatgaggaaaccaaactgcaacagacctggatcagcttgttatgacccgaggttcattggaggagacggcattgtgttctacttccatggaaagagcaatgaagagtttagcctcgtctctgactctgaccttcagatcaatggtaggttcattggtcacagacccgctggtcgtgccagagacttcacatggatccaatctctaggattccttttcaactccaacaaattctccctcgaagccgcgaaaaccgcctcatgggacaacgaaatcgaccatctcaaattcagttacgatggccaagatttatctgttccagaagaaactctctccacctggtactcaccaaacaaggacatcaagatcgagagagtgagtatgagaaacagcgtgatcgtgacaatcaaagacaaagccgagatcatgatcaatgtggttccagtgacaaaagaagacgacagaatccatagctacaaagtaccatcagatgattgttttgcacatcttgaggttcaattcagattctttaacctttcacctaaggttgatggaatcttgggacgaacctacaggcccgatttccaaaatccggctaagcctggagtcgcaatgccagttgttggtggtgaagacagcttcaagacttcttctctactctccaatgactgtaaaacttgcattttctctgagtcacaagcagagattgattctgttaagtcagagattgaatatgcaactttggattgtacccgtggagcgtcttctggttacggtatcgtgtgcaggaagtaaaaaaagaatcatataaacttggcttaaaagaagaataatgccagagagctttagcttctactggagattttccaaagtataatataagtgaaggaataatatgtaaacttgcaatgtatttgtattgtatcatccaccatgtattctaatttgtattaacctaatcattgttattgatatataatacc

SEQ ID NO: 22817 - protein, 353 aa, Arabidopsis thaliana
  peptide (1)..(353): Ceres Seq. ID no. 12394466
KTNQLSFSNQNKKDTKMEISKTLLLVISLVAATCFLQAKAAGVYCSNPYTRCYRKYIRCPEECPSKTAMNSKNKVCYADCDRPTCKSQCRMRKPNCNRPGSACYDPRFIGGDGIVFYFHGKSNEEFSLVSDSDLQINGRFIGHRPAGRARDFTWIQSLGFLFNSNKFSLEAAKTASWDNEIDHLKFSYDGQDLSVPEETLSTWYSPNKDIKIERVSMRNSVIVTIKDKAEIMINVVPVTKEDDRIHSYKVPSDDCFAHLEVQFRFFNLSPKVDGILGRTYRPDFQNPAKPGVAMPVVGGEDSFKTSSLLSNDCKTCIFSESQAEIDSVKSEIEYATLDCTRGASSGYGIVCRK

SEQ ID NO: 22818 - protein, 337 aa, Arabidopsis thaliana
  peptide (1)..(337): Ceres Seq. ID no. 12394467
MEISKTLLLVISLVAATCFLQAKAAGVYCSNPYTRCYRKYIRCPEECPSKTAMNSKNKVCYADCDRPTCKSQCRMRKPNCNRPGSACYDPRFIGGDGIVFYFHGKSNEEFSLVSDSDLQINGRFIGHRPAGRARDFTWIQSLGFLFNSNKFSLEAAKTASWDNEIDHLKFSYDGQDLSVPEETLSTWYSPNKDIKIERVSMRNSVIVTIKDKAEIMINVVPVTKEDDRIHSYKVPSDDCFAHLEVQFRFFNLSPKVDGILGRTYRPDFQNPAKPGVAMPVVGGEDSFKTSSLLSNDCKTCIFSESQAEIDSVKSEIEYATLDCTRGASSGYGIVCRK

SEQ ID NO: 22819 - protein, 285 aa, Arabidopsis thaliana
  peptide (1)..(285): Ceres Seq. ID no. 12394468
MNSKNKVCYADCDRPTCKSQCRMRKPNCNRPGSACYDPRFIGGDGIVFYFHGKSNEEFSLVSDSDLQINGRFIGHRPAGRARDFTWIQSLGFLFNSNKFSLEAAKTASWDNEIDHLKFSYDGQDLSVPEETLSTWYSPNKDIKIERVSMRNSVIVTIKDKAEIMINVVPVTKEDDRIHSYKVPSDDCFAHLEVQFRFFNLSPKVDGILGRTYRPDFQNPAKPGVAMPVVGGEDSFKTSSLLSNDCKTCIFSESQAEIDSVKSEIEYATLDCTRGASSGYGIVCRK

SEQ ID NO: 22820 - DNA, 636 bp, Arabidopsis thaliana
  misc_feature (1)..(636): Ceres Seq. ID no. 12562389
  misc_feature (1)..(636): Ortholog of  Ceres SEQ ID NO 12556889 as cited in SEQ ID NO 125
  misc_feature (1)..(636): Ortholog of  Ceres SEQ ID NO 15172982 as cited in SEQ ID NO 51725
  misc_feature (1)..(636): Ortholog of  Ceres SEQ ID NO 13598188 as cited in SEQ ID NO 61498
cagaataaaaatctatttcttgtgtttgtgttatatttacttaaaaaaataaaggagatcagtttgggagaaagcagcaaagaagaaaaatggcagcaacatttgcaacaccatcgacggtgataggcctcggaggatcatccatcaccaccaaacccttctcttcatcctttttaaaaccaacattaagcgccaagaaccctttgagactcgccggtgcatcgggaggaagagtcacttgctttgagaggaactggttgaggagagatttgaacgtggtaggatttgggctgatcggatggctagctccgtcgagcattccagcgataaatgggaagagcctgacgggtctcttcttcgatagcatcggaactgagctcgctcacttcccgactcctccagctctcacttcacagttctggttgtggttggttacgtggcacttaggcctcttcctctgcctcactttcggacaaatcggattcaagggcaggactgaagattacttctaaggataactattcttgttttcgtttgtactatatgctctctcttggttatgtgtaatattatcaatcaaaacaaagctttctttgctatttgatgtttcattctatatctcgacaagtctttctt

SEQ ID NO: 22821 - protein, 140 aa, Arabidopsis thaliana
  peptide (1)..(140): Ceres Seq. ID no. 12562390
MAATFATPSTVIGLGGSSITTKPFSSSFLKPTLSAKNPLRLAGASGGRVTCFERNWLRRDLNVVGFGLIGWLAPSSIPAINGKSLTGLFFDSIGTELAHFPTPPALTSQFWLWLVTWHLGLFLCLTFGQIGFKGRTEDYF

SEQ ID NO: 22822 - DNA, 524 bp, Arabidopsis thaliana
  misc_feature (1)..(524): Ceres Seq. ID no. 12338408
  misc_feature (1)..(524): Ortholog of  Ceres SEQ ID NO 15172828 as cited in SEQ ID NO 60174
actcaaaaactcatcaaatcaaaaatcaaacacagagaagagaaaatggccgcagaaggagaagttatcgcttgccacaccgttgaagattggaccgagaagctcaaagccgccaacgaatccaagaaactgattgtgatagacttcactgcaacatggtgcccaccttgccgtttcattgcacccgtctttgctgacttagccaagaagcaccttgacgtagtcttcttcaaggtcgatgttgacgaattgaacactgttgctgaggagtttaaagttcaggcaatgccaacgtttatcttcatgaaagaaggagagatcaaggagactgtggttggtgctgcgaaagaagaaatcattgccaatctcgagaagcacaatacagttgttgctgctgcttgatttgcttttctctcttacctattttgctaaaatatgtttggtgttttaataaatcctttgttcgcccgagtcttttcaccttaaatgtgctcttatgtgtggtggtgaataaatgttgttgc

SEQ ID NO: 22823 - protein, 133 aa, Arabidopsis thaliana
  peptide (1)..(133): Ceres Seq. ID no. 12338409
TQKLIKSKIKHREEKMAAEGEVIACHTVEDWTEKLKAANESKKLIVIDFTATWCPPCRFIAPVFADLAKKHLDVVFFKVDVDELNTVAEEFKVQAMPTFIFMKEGEIKETVVGAAKEEIIANLEKHNTVVAAA

SEQ ID NO: 22824 - protein, 118 aa, Arabidopsis thaliana
  peptide (1)..(118): Ceres Seq. ID no. 12338411
MAAEGEVIACHTVEDWTEKLKAANESKKLIVIDFTATWCPPCRFIAPVFADLAKKHLDVVFFKVDVDELNTVAEEFKVQAMPTFIFMKEGEIKETVVGAAKEEIIANLEKHNTVVAAA

SEQ ID NO: 22825 - DNA, 926 bp, Arabidopsis thaliana
  misc_feature (1)..(926): Ceres Seq. ID no. 12384525
  misc_feature (1)..(926): Ortholog of  Ceres SEQ ID NO 12598739 as cited in SEQ ID NO 64558
  misc_feature (1)..(926): Ortholog of  Ceres SEQ ID NO 13586862 as cited in SEQ ID NO 0
atttttcattcttctaagccctagctcaaagctttctctctcaaatccgccatgactaaacagcacgcgaactggtctccttacgataacaatggaggaacatgtgtggccatcgctggatcggattactgtgttatcgccgccgatactcggatgtctactggttacagtattcttagtcgcgattactccaaaatccataaactagcggacagacctgttttgtcttcctctggcttccaggctgatgtgaaagctttgcagaaggttctcaaatccagacacttgatctatcaacatcagcataacaagcagatgagctgtcctgcaatggcccagcttctctccaacacgctttatttcaagcggtttttcccctactatgcctttaatgttctaggagggcttgacgaggaaggaaaagggtgtgtctttacttacgacgctgttggctcatacgagagagttggatacggtgctcaaggttctggttccacactcatcatgcctttccttgacaatcagctcaagtctccaagtcctcttttgctacctaaacaggattcaaacacgcccctttccgaagctgaagcagttgacttggttaaaactgttttcgcatctgccacagagagggatatctacactggagacaagcttgagattatgatacttaaggccgacggtatcaagaccgaactcatggacctgaggaaagactaagctcctttagtgcatttagccaaccttatcggtttgttatttcacttcaacatcgagcttcctgagttgtagaactcgtatgaaatgctactgggtttgatattttacagttaaaatcatgactcgtgtttgaagtttctccaaaactgtttccttatgtatgagaatcactcgaatccttgtcttaaatcaatgtttctccc

SEQ ID NO: 22826 - protein, 223 aa, Arabidopsis thaliana
  peptide (1)..(223): Ceres Seq. ID no. 12384526
MTKQHANWSPYDNNGGTCVAIAGSDYCVIAADTRMSTGYSILSRDYSKIHKLADRPVLSSSGFQADVKALQKVLKSRHLIYQHQHNKQMSCPAMAQLLSNTLYFKRFFPYYAFNVLGGLDEEGKGCVFTYDAVGSYERVGYGAQGSGSTLIMPFLDNQLKSPSPLLLPKQDSNTPLSEAEAVDLVKTVFASATERDIYTGDKLEIMILKADGIKTELMDLRKD

SEQ ID NO: 22827 - protein, 189 aa, Arabidopsis thaliana
  peptide (1)..(189): Ceres Seq. ID no. 12384527
MSTGYSILSRDYSKIHKLADRPVLSSSGFQADVKALQKVLKSRHLIYQHQHNKQMSCPAMAQLLSNTLYFKRFFPYYAFNVLGGLDEEGKGCVFTYDAVGSYERVGYGAQGSGSTLIMPFLDNQLKSPSPLLLPKQDSNTPLSEAEAVDLVKTVFASATERDIYTGDKLEIMILKADGIKTELMDLRKD

SEQ ID NO: 22828 - protein, 135 aa, Arabidopsis thaliana
  peptide (1)..(135): Ceres Seq. ID no. 12384528
MSCPAMAQLLSNTLYFKRFFPYYAFNVLGGLDEEGKGCVFTYDAVGSYERVGYGAQGSGSTLIMPFLDNQLKSPSPLLLPKQDSNTPLSEAEAVDLVKTVFASATERDIYTGDKLEIMILKADGIKTELMDLRKD

SEQ ID NO: 22829 - DNA, 959 bp, Arabidopsis thaliana
  misc_feature (1)..(959): Ceres Seq. ID no. 12483430
  misc_feature (1)..(959): Ortholog of  Ceres SEQ ID NO 13593920 as cited in SEQ ID NO 54151
  misc_feature (1)..(959): Ortholog of  Ceres SEQ ID NO 15225313 as cited in SEQ ID NO 58628
aaaacaaaaagattaaacaaagagagaagaatatggcgagagggaagatccagatcaagaggatagagaaccagacaaacagacaagtgacgtattcaaagagaagaaatggtttattcaagaaagcacatgagctcacggttttgtgtgatgctagggtttcgattatcatgttctctagctccaacaagcttcatgagtatatcagccctaacaccacaacgaaggagatcgtagatctgtaccaaactatttctgatgtcgatgtttgggccactcaatatgagcgaatgcaagaaaccaagaggaaactgttggagacaaatagaaatctccggactcagatcaagcagaggctaggtgagtgtttgaacaagcttgacattcaggagctgcgtcgtcttgaggatgaaatggaaaacactttcaaactcgttcgcgagcgcaagttcaaatctcttgggaatcagatcgagaccaccaagaaaaagaacaaaagtcaacaagacatacaaaagaatctcatacatgagctggaactaagagctgaagatcctcactatggactagtagacaatggaggagattacgactcagttcttggataccaaatcgaagggtcacgtgcttacgctcttcgtttccaccagaaccatcaccactattaccccaaccatggccttcatgcaccctctgcctctgacatcattaccttccatcttcttgaataattaaaggctaaaaggtttgctggtgccatcattgtctatctaattatttagtaactacttaaaacataaggcatggtgttgctaaaaccttaaactgtcatgtttcttagttatgtattttaaagcctaaagaaatatggattgtgtgatcagtagtgcttaggcttattgtgtgtggaatgttttcaagacttttatcatgtatcgtattattatattgaccactcc

SEQ ID NO: 22830 - protein, 242 aa, Arabidopsis thaliana
  peptide (1)..(242): Ceres Seq. ID no. 12483431
NKKIKQREKNMARGKIQIKRIENQTNRQVTYSKRRNGLFKKAHELTVLCDARVSIIMFSSSNKLHEYISPNTTTKEIVDLYQTISDVDVWATQYERMQETKRKLLETNRNLRTQIKQRLGECLNKLDIQELRRLEDEMENTFKLVRERKFKSLGNQIETTKKKNKSQQDIQKNLIHELELRAEDPHYGLVDNGGDYDSVLGYQIEGSRAYALRFHQNHHHYYPNHGLHAPSASDIITFHLLE

SEQ ID NO: 22831 - protein, 232 aa, Arabidopsis thaliana
  peptide (1)..(232): Ceres Seq. ID no. 12483432
MARGKIQIKRIENQTNRQVTYSKRRNGLFKKAHELTVLCDARVSIIMFSSSNKLHEYISPNTTTKEIVDLYQTISDVDVWATQYERMQETKRKLLETNRNLRTQIKQRLGECLNKLDIQELRRLEDEMENTFKLVRERKFKSLGNQIETTKKKNKSQQDIQKNLIHELELRAEDPHYGLVDNGGDYDSVLGYQIEGSRAYALRFHQNHHHYYPNHGLHAPSASDIITFHLLE

SEQ ID NO: 22832 - protein, 186 aa, Arabidopsis thaliana
  peptide (1)..(186): Ceres Seq. ID no. 12483433
MFSSSNKLHEYISPNTTTKEIVDLYQTISDVDVWATQYERMQETKRKLLETNRNLRTQIKQRLGECLNKLDIQELRRLEDEMENTFKLVRERKFKSLGNQIETTKKKNKSQQDIQKNLIHELELRAEDPHYGLVDNGGDYDSVLGYQIEGSRAYALRFHQNHHHYYPNHGLHAPSASDIITFHLLE

SEQ ID NO: 22833 - DNA, 687 bp, Arabidopsis thaliana
  misc_feature (1)..(687): Ceres Seq. ID no. 13593815
  misc_feature (1)..(687): Ortholog of  Ceres SEQ ID NO 12635272 as cited in SEQ ID NO 495
  misc_feature (1)..(687): Ortholog of  Ceres SEQ ID NO 13594789 as cited in SEQ ID NO 52172
  misc_feature (1)..(687): Ortholog of  Ceres SEQ ID NO 14306131 as cited in SEQ ID NO 52246
  misc_feature (1)..(687): Ortholog of  Ceres SEQ ID NO 14309585 as cited in SEQ ID NO 52660
  misc_feature (1)..(687): Ortholog of  Ceres SEQ ID NO 14305267 as cited in SEQ ID NO 0
actcatttttctattactgaaatttttcttagagaagaagaagaagaggcaaaatggccacaagcgcatcagctttgctctcaccaaccacattctccactgcaatctcccacaaaaaccctaactccatctcattccatggccttcgtcccctccgtctaggtggctcctcctccgccctacccaaactatcaaccaccgggagaaaatcctcctccactgtcgtgagagctgagctaagcccttccatcgtcataagtctcaggtctctccctcttcctcggtcgtttcgtcttcttcaacttccagagagagaacgtagcaaaacagggcttaccggagcagaacggaaaaacccatttcgaagctggagatgatcgtgctaaggagtacgtcagtctcttgaaatcgaacgatccaattggattcaacattgttgatgttcttgcttggggttctattggacacatcgttgcttactacatcttggctacttccagcaatggatacgacccaagcttctttggatgattcgtttcaatgtcaatctctcgtatatgtatatgtatatgtttgacttgtgttgcaagctatctaatctgttctctatctctgtttcttcttctgttgttgttgttgttgtctaagacttgtccctctttttgcaaatgttttatttctccattt

SEQ ID NO: 22834 - protein, 107 aa, Arabidopsis thaliana
  peptide (1)..(107): Ceres Seq. ID no. 13593816
MATSASALLSPTTFSTAISHKNPNSISFHGLRPLRLGGSSSALPKLSTTGRKSSSTVVRAELSPSIVISLRSLPLPRSFRLLQLPERERSKTGLTGAERKNPFRSWR

SEQ ID NO: 22835 - protein, 53 aa, Arabidopsis thaliana
  peptide (1)..(53): Ceres Seq. ID no. 13593817
THFSITEIFLREEEEEAKWPQAHQLCSHQPHSPLQSPTKTLTPSHSMAFVPSV

SEQ ID NO: 22836 - DNA, 1016 bp, Arabidopsis thaliana
  misc_feature (1)..(1016): Ceres Seq. ID no. 12739204
  misc_feature (1)..(1016): Ortholog of  Ceres SEQ ID NO 13595072 as cited in SEQ ID NO 55971
aatcaataacaaaccacccatttcttggcttacaacaacaaatcttaaacgttttactttgtgctgcactactcaacctcaatggccgcctcaacaatggctctctcctcccctgccttcgccggtaaggccgtcaagctttcccccgcggcatctgaagtccttggaagcggccgtgtgacaatgaggaagactgttgccaagccaaagggcccatcaggcagcccatggtacggatctgaccgtgtcaagtacttgggtccattctctggcgaatcaccgagctaccttaccggagagttccccggagactacggatgggacaccgccggactttcagctgaccccgagacattcgcaaggaaccgtgagctagaagttatccacagcaggtgggcaatgctcggagccctaggctgcgtcttccctgagcttttggctaggaacggagtcaagttcggagaggcggtttggttcaaggccggttcacagatcttcagcgatggagggctcgattacttgggaaaccctagcttagttcacgctcagagcattttggccatttgggccacacaagttattttgatgggagccgttgaaggctacagagtcgcaggaaatgggccattgggagaggccgaggacttgctttaccccggtggcagcttcgacccattgggtttggctaccgacccagaggcattcgctgagttgaaggtgaaggagctcaagaacggaagattggctatgttctctatgtttggattcttcgttcaagccatcgtcactggtaagggaccgatagagaaccttgctgaccatttggccgatccagttaacaacaacgcatgggccttcgccaccaactttgttcccggaaagtgagccaagttttatctgtattttgcttcagtctttgcttcgtgagtgtgagaggagaaagagagcttgtttagatgtaaaatttgcaagactttgtattttttttcattaatcaaataactcgtttttctctc

SEQ ID NO: 22837 - protein, 267 aa, Arabidopsis thaliana; identical to SEQ ID NO: 22639
  peptide (1)..(267): Ceres Seq. ID no. 12739205

SEQ ID NO: 22838 - protein, 262 aa, Arabidopsis thaliana; identical to SEQ ID NO: 22640
  peptide (1)..(262): Ceres Seq. ID no. 12739206

SEQ ID NO: 22839 - protein, 233 aa, Arabidopsis thaliana; identical to SEQ ID NO: 21214
  peptide (1)..(233): Ceres Seq. ID no. 12739207

SEQ ID NO: 22840 - DNA, 1500 bp, Arabidopsis thaliana
  misc_feature (1)..(1500): Ceres Seq. ID no. 12323725
  misc_feature (1)..(1500): Ortholog of  Ceres SEQ ID NO 14303301 as cited in SEQ ID NO 66956
aacgtttcgacagtctctacaccgtcatgaacactgaatcagttgtcgagttccttgggaatgtgaccttgttgcagcggttacctagttcctctctgaagagaatctccgaagtcgttgtcttcaaaggttatgacagaggtgattatgtggttcgtgaaaatcaaaatgtggatggagtttattttctcttgcaaggacaggctcaggttctgagatcagccgaagaggaaaactatcaagagttccctttgaaacgatatgatttcttcggccatggtattttcggggatgtttactcagcagatgttgttgctgtgacagagcttacctgcttgctgttgatgtctgatcatcgtgctttacttgaaataaagtcagtctcggattcagataaggaacgctgtcttgtggaagacatactatatctagaaccattagatttgaatgtataccgggggttcaccccacctaatgctccaacctatggaaaggtttatggagggcaattagttggacaggcacttgccgcagcatcaaaaactgttgaaactatgaagatagtccataattttcattgctatttccttcttgttggagatataaatattcccatcatatatgatgttaaccgcttacgtgacggcaacaactttgccaccagaagtgtagatgctagacagaaaggaaaaactatattcaccttgttcgcgtcatttcagaaaaagcaacaaggttttattcaccaggagtcgaccatgcctcatacaccagctcctgaaacgcttctaccaagggaggagatgcttgaacggcttgttactgagcctctgctacctagggattaccgaaaccaagttgcaactgaaattagtgttccattccctatagatattcgattttgtgagccaaatcgttccactaaacagaataagtctcctccaagactaaaatattggtttagagcaaagggaaaactttctgatgatgatcaagctttgcacagatgtgtggttgcatttgcttccgatttgatattcgccactatcagtttaaaccctcaccggagagagggcatgagtgtagctgctcttagcctggaccactcgatgtggttccaccgacctgtaagagcagatgattggttgttgtttgtgtgagtccaactgcgacctaaagccgcggttttgcaactggcaaaatgttcaacagaaagggagagctggtggtatcattgacgcaagaagctgtgttaagagaagctgtgactattaagccatccttcggggccaagctatgaagccataggattttgatagtgagagaattgctgcatctgttactcctcacggtcacattccaaagagtcgtcacttatactacatttgcatatgtttttcgatccacaattattattttcccctctaaaagggtctacacatatgtttgtttgtaaccacgataatgtttcaacagcaatgaaaaagcaaacagtggttc

SEQ ID NO: 22841 - protein, 385 aa, Arabidopsis thaliana
  peptide (1)..(385): Ceres Seq. ID no. 12323726
RFDSLYTVMNTESVVEFLGNVTLLQRLPSSSLKRISEVVVFKGYDRGDYVVRENQNVDGVYFLLQGQAQVLRSAEEENYQEFPLKRYDFFGHGIFGDVYSADVVAVTELTCLLLMSDHRALLEIKSVSDSDKERCLVEDILYLEPLDLNVYRGFTPPNAPTYGKVYGGQLVGQALAAASKTVETMKIVHNFHCYFLLVGDINIPIIYDVNRLRDGNNFATRSVDARQKGKTIFTLFASFQKKQQGFIHQESTMPHTPAPETLLPREEMLERLVTEPLLPRDYRNQVATEISVPFPIDIRFCEPNRSTKQNKSPPRLKYWFRAKGKLSDDDQALHRCVVAFASDLIFATISLNPHRREGMSVAALSLDHSMWFHRPVRADDWLLFV

SEQ ID NO: 22842 - protein, 377 aa, Arabidopsis thaliana
  peptide (1)..(377): Ceres Seq. ID no. 12323727
MNTESVVEFLGNVTLLQRLPSSSLKRISEVVVFKGYDRGDYVVRENQNVDGVYFLLQGQAQVLRSAEEENYQEFPLKRYDFFGHGIFGDVYSADVVAVTELTCLLLMSDHRALLEIKSVSDSDKERCLVEDILYLEPLDLNVYRGFTPPNAPTYGKVYGGQLVGQALAAASKTVETMKIVHNFHCYFLLVGDINIPIIYDVNRLRDGNNFATRSVDARQKGKTIFTLFASFQKKQQGFIHQESTMPHTPAPETLLPREEMLERLVTEPLLPRDYRNQVATEISVPFPIDIRFCEPNRSTKQNKSPPRLKYWFRAKGKLSDDDQALHRCVVAFASDLIFATISLNPHRREGMSVAALSLDHSMWFHRPVRADDWLLFV

SEQ ID NO: 22843 - protein, 271 aa, Arabidopsis thaliana
  peptide (1)..(271): Ceres Seq. ID no. 12323728
MSDHRALLEIKSVSDSDKERCLVEDILYLEPLDLNVYRGFTPPNAPTYGKVYGGQLVGQALAAASKTVETMKIVHNFHCYFLLVGDINIPIIYDVNRLRDGNNFATRSVDARQKGKTIFTLFASFQKKQQGFIHQESTMPHTPAPETLLPREEMLERLVTEPLLPRDYRNQVATEISVPFPIDIRFCEPNRSTKQNKSPPRLKYWFRAKGKLSDDDQALHRCVVAFASDLIFATISLNPHRREGMSVAALSLDHSMWFHRPVRADDWLLFV

SEQ ID NO: 22844 - DNA, 1407 bp, Arabidopsis thaliana
  misc_feature (1)..(1407): Ceres Seq. ID no. 12395930
  misc_feature (1)..(1407): Ortholog of  Ceres SEQ ID NO 13656404 as cited in SEQ ID NO 65806
  misc_feature (1)..(1407): Ortholog of  Ceres SEQ ID NO 12779935 as cited in SEQ ID NO 66774
  misc_feature (1)..(1407): Ortholog of  Ceres SEQ ID NO 13598695 as cited in SEQ ID NO 67368
  misc_feature (1)..(1407): Ortholog of  Ceres SEQ ID NO 13591174 as cited in SEQ ID NO 68289
ataaacttttaaagctctctctttcagattcctctctatccatttcattaacaccaaaacctttttcttctctctaaccaaacaagaagaggactccattttcgcaagaatggggaggcttaagcaatgttggtcaagtctgctagtattggcagtgttggtgatcggaactggagccgttcccatcacttatctccaaagcgccgtcgctaaaggagccgtgtgtttggatgggagtgcaccagcttaccattttgacaaagggtttggttcgggtgttaacaattggatcgtccacatggagggaggaggatggtgtaccgacgttgcttcatgtaatgaacgtaagggtacaatgaagggttcttccaaattcatgaacaaagactttggattttccggtatcttgggtggcaagcaaagcactaacccagatttctacaattggaacagaatcaaagtacgatattgtgacggatcatcctttaccggcaatgtagaagccgttaatccggcaaacaagctgttcttccgcggtgcccgagtttggcgtgcggtggttgatgatcttatggctaaaggaatgaaaaacgctcaaaacgctatactctccggttgttcagctggagcattggctgcgattcttcattgtgacactttccgtgccatacttccccgaacagctagcgtcaaatgtgtttctgatgccggttactttatccacggtaaagatatcacaggaggatcatacattcaatcatattacagcaaagtcgtcgcactccacggatctgcaaagagtcttcctgtttcttgtacctcaaaaatgaaaccagaactctgtttcttcccgcaatacgtcgttccttccatgcgaacaccgctctttgtcatcaatgccgcttttgattcttggcagatcaagaacgttttggctccaactgctgttgataagggaaaagagtggaagaattgtaagcttgatcttaagaaatgtagtgccgctcagctcaaaaccgtccaagggtttagagatcagatgatgcgagcattgtcaccggttcacagtacaccgtctagaggattgttcttagactcgtgtcacgctcattgccaaggaggaagcgccgcctcttggtccggtgacaaaggtccccaagtcgccaatacgagaattgcgaaagcagtcggaaactggttttatggccggagtgcatttcagaagatagattgtccgtcgccgacttgtaatcctacttgtcctgctatctctactgaagactagaatcatctctaaatgttcaattttttttaatttgaaattgaaagagctcgcaaacattttggatttgttttccaaatcggatcaataataatcactgcaatttgaataaagagtatatcttt

SEQ ID NO: 22845 - protein, 391 aa, Arabidopsis thaliana
  peptide (1)..(391): Ceres Seq. ID no. 12395931
MGRLKQCWSSLLVLAVLVIGTGAVPITYLQSAVAKGAVCLDGSAPAYHFDKGFGSGVNNWIVHMEGGGWCTDVASCNERKGTMKGSSKFMNKDFGFSGILGGKQSTNPDFYNWNRIKVRYCDGSSFTGNVEAVNPANKLFFRGARVWRAVVDDLMAKGMKNAQNAILSGCSAGALAAILHCDTFRAILPRTASVKCVSDAGYFIHGKDITGGSYIQSYYSKVVALHGSAKSLPVSCTSKMKPELCFFPQYVVPSMRTPLFVINAAFDSWQIKNVLAPTAVDKGKEWKNCKLDLKKCSAAQLKTVQGFRDQMMRALSPVHSTPSRGLFLDSCHAHCQGGSAASWSGDKGPQVANTRIAKAVGNWFYGRSAFQKIDCPSPTCNPTCPAISTED

SEQ ID NO: 22846 - protein, 328 aa, Arabidopsis thaliana
  peptide (1)..(328): Ceres Seq. ID no. 12395932
MEGGGWCTDVASCNERKGTMKGSSKFMNKDFGFSGILGGKQSTNPDFYNWNRIKVRYCDGSSFTGNVEAVNPANKLFFRGARVWRAVVDDLMAKGMKNAQNAILSGCSAGALAAILHCDTFRAILPRTASVKCVSDAGYFIHGKDITGGSYIQSYYSKVVALHGSAKSLPVSCTSKMKPELCFFPQYVVPSMRTPLFVINAAFDSWQIKNVLAPTAVDKGKEWKNCKLDLKKCSAAQLKTVQGFRDQMMRALSPVHSTPSRGLFLDSCHAHCQGGSAASWSGDKGPQVANTRIAKAVGNWFYGRSAFQKIDCPSPTCNPTCPAISTED

SEQ ID NO: 22847 - protein, 309 aa, Arabidopsis thaliana
  peptide (1)..(309): Ceres Seq. ID no. 12395933
MKGSSKFMNKDFGFSGILGGKQSTNPDFYNWNRIKVRYCDGSSFTGNVEAVNPANKLFFRGARVWRAVVDDLMAKGMKNAQNAILSGCSAGALAAILHCDTFRAILPRTASVKCVSDAGYFIHGKDITGGSYIQSYYSKVVALHGSAKSLPVSCTSKMKPELCFFPQYVVPSMRTPLFVINAAFDSWQIKNVLAPTAVDKGKEWKNCKLDLKKCSAAQLKTVQGFRDQMMRALSPVHSTPSRGLFLDSCHAHCQGGSAASWSGDKGPQVANTRIAKAVGNWFYGRSAFQKIDCPSPTCNPTCPAISTED

SEQ ID NO: 22848 - DNA, 2141 bp, Arabidopsis thaliana
  misc_feature (1)..(2141): Ceres Seq. ID no. 13488454
  misc_feature (1)..(2141): Ortholog of  Ceres SEQ ID NO 12597287 as cited in SEQ ID NO 63982
atcactctctcattaatcgaacttggcgtgtttaaataatcttccgatcgttaattctcttccgatttcgattcgattttagcggcgatgtctctcagacctagcgcgaagacggaggtgcgacggaatcggtacaaagtagcggtcgatgcggaggaaggacggcggaggcgagaggataacttggttgagatcaggaagaacaagagagaggaaaatttgcagaagaagagatttacgtcttctatggcttttggctcagcaacgggacaaacggaacaggatctttcttcagcgaaccaattaaaagataatctacctgctatggttgctggaatctggtcagaggatagcaattcacaattggaggcaacaaatctcttgcggaaactgctttctattgaacaaaatcctcctatcaatgaagttgtacaatctggtgttgttcctcgtgttgtgaagtttctttccagggatgacttccccaaacttcagtttgaggcagcttgggcgctcacccaacattgcttcagggacatcagagaacacaaatgtcatcattgaaagtggagctgtcccgatattcatccaacttctcagctctgctagtgaagatgtccgcgaacaggctgtttgggcattgggaaatgttgctggagactcaccaaaatgccgggatttagtcctaagttacggtgccatgacacctcttctgtctcaattcaatgagaatacaaagctttcaatgctgagaaatgctacatggacattatcaaacttctgcagagggaagcccccacctgcatttgaacagacacaaccagctttaccagttcttgagcgccttgtgcaatcaatggatgaagaagttctcacagatgcatgctgggctctgtcatacctctcggataattcaaacgacaaaatacaagcagtcattgaagcaggagttgttcctcgcctcatccagctcttaggtcattcgtcgccatcagtgctgattcctgctcttcgtaccattggaaatattgtaaccggggatgatctacagactcagatggttctcgaccagcaagcgcttccttgtcttttgaaccttctaaaaaacaattacaagaagagtatcaagaaggaagcttgctggactatctccaacattacagctggaaatgcagatcagatacaagcagtgattgatgcaggtataatccagtctcttgtttgggtgcttcaaagtgcagagttcgaagtaaaaaaagaagctgcttggggaatctcaaatgctacttctggtggcactcatgatcaaatcaagtttatggtgagccaaggctgtatcaaacctctatgcgatctccttacttgcccagatctgaaagttgtaacggtttgcttagaagcactagagaacattctcgtggttggagaagcagagaagaacttaggtcacacaggagaagacaacctctacgctcaaatgattgacgaagcagaagggttagagaagattgagaatcttcagagtcacgacaacaatgatatctacgacaaagccgtgaagatcctcgaaacattttggactgaagacaatgaagaagaaggcaacgacgagaatcatgctccacaatctggtttccagttcggaagcaccaatgttcctcctggtcaattcaactttatttgaaagacaacaagaacaacaacatagccagatataatgctgtcttcaccagcttttgctgcagcacgttctactctcggtcgtcgtcttcatgcgaagagactatcttcttctactggtcgaaccgctgatccagagattcatgcccgtaacgatggagacgagcctagtctttttccatcagaccccgagggtttggatgatgtagcgaacccgaagactccagcggatgaggatgtaccggatattcgaccacccggttttgtaaaggaaccgctttctccgccaaaaaatcccagagatacttcacacaagcttgaatctactcccgttggtctacctgcagatctcaatttccaacagaaacgaaattaatagcagcaaacgccttagccgttatggccttctagatcattcagaaatgcttacttttgattagctttgagaataaaatttaatt

SEQ ID NO: 22849 - protein, 402 aa, Arabidopsis thaliana
  peptide (1)..(402): Ceres Seq. ID no. 13488455
MTSPNFSLRQLGRSPNIASGTSENTNVIIESGAVPIFIQLLSSASEDVREQAVWALGNVAGDSPKCRDLVLSYGAMTPLLSQFNENTKLSMLRNATWTLSNFCRGKPPPAFEQTQPALPVLERLVQSMDEEVLTDACWALSYLSDNSNDKIQAVIEAGVVPRLIQLLGHSSPSVLIPALRTIGNIVTGDDLQTQMVLDQQALPCLLNLLKNNYKKSIKKEACWTISNITAGNADQIQAVIDAGIIQSLVWVLQSAEFEVKKEAAWGISNATSGGTHDQIKFMVSQGCIKPLCDLLTCPDLKVVTVCLEALENILVVGEAEKNLGHTGEDNLYAQMIDEAEGLEKIENLQSHDNNDIYDKAVKILETFWTEDNEEEGNDENHAPQSGFQFGSTNVPPGQFNFI

SEQ ID NO: 22850 - protein, 327 aa, Arabidopsis thaliana
  peptide (1)..(327): Ceres Seq. ID no. 13488456
MTPLLSQFNENTKLSMLRNATWTLSNFCRGKPPPAFEQTQPALPVLERLVQSMDEEVLTDACWALSYLSDNSNDKIQAVIEAGVVPRLIQLLGHSSPSVLIPALRTIGNIVTGDDLQTQMVLDQQALPCLLNLLKNNYKKSIKKEACWTISNITAGNADQIQAVIDAGIIQSLVWVLQSAEFEVKKEAAWGISNATSGGTHDQIKFMVSQGCIKPLCDLLTCPDLKVVTVCLEALENILVVGEAEKNLGHTGEDNLYAQMIDEAEGLEKIENLQSHDNNDIYDKAVKILETFWTEDNEEEGNDENHAPQSGFQFGSTNVPPGQFNFI

SEQ ID NO: 22851 - protein, 312 aa, Arabidopsis thaliana
  peptide (1)..(312): Ceres Seq. ID no. 13488457
MLRNATWTLSNFCRGKPPPAFEQTQPALPVLERLVQSMDEEVLTDACWALSYLSDNSNDKIQAVIEAGVVPRLIQLLGHSSPSVLIPALRTIGNIVTGDDLQTQMVLDQQALPCLLNLLKNNYKKSIKKEACWTISNITAGNADQIQAVIDAGIIQSLVWVLQSAEFEVKKEAAWGISNATSGGTHDQIKFMVSQGCIKPLCDLLTCPDLKVVTVCLEALENILVVGEAEKNLGHTGEDNLYAQMIDEAEGLEKIENLQSHDNNDIYDKAVKILETFWTEDNEEEGNDENHAPQSGFQFGSTNVPPGQFNFI

SEQ ID NO: 22852 - DNA, 1287 bp, Arabidopsis thaliana
  misc_feature (1)..(1287): Ceres Seq. ID no. 13487395
  misc_feature (1)..(1287): Ortholog of  Ceres SEQ ID NO 13593955 as cited in SEQ ID NO 54278
  misc_feature (1)..(1287): Ortholog of  Ceres SEQ ID NO 13597380 as cited in SEQ ID NO 64054
  misc_feature (1)..(1287): Ortholog of  Ceres SEQ ID NO 12625474 as cited in SEQ ID NO 64169
  misc_feature (1)..(1287): Ortholog of  Ceres SEQ ID NO 13597502 as cited in SEQ ID NO 64681
tggttatataacactaatcaggagtgaaatttcatccacaaaaattccttataaattcacgaccaaacacacacatttctttaattccataaaaacaaaaacaaaaatataatgtggacttctaaaaccataagcttcactctcttcatcacaacaacacttctcgggtcctgcaacgcatctgcaaaggccaaaacgcaaccgctattcccagcgattctaatctttggtgattcaacagtcgacacaggcaacaataattacccttcacaaacaatcttcagagctaaacatgttccttacggaattgatctcccaaaccactcacctaacggaagattctcaaacgggaaaattttctccgacataatcgcaaccaaactcaacatcaaacagtttgttcctcctttcttacaaccaaatctcaccgaccaagaaattgtaaccggagtctgtttcgcatcagcaggtgccggttacgatgaccaaaccagtctcacgacacaagcgattcgtgtctcggaacaaccaaatatgttcaagagttacattgctcgtcttaagagtatcgtaggagacaagaaagccatgaagatcataaacaatgctttggtggttgtgagtgcagggcctaatgatttcatcttgaattattacgaggttccctcatggcgtcgcatgtatcctagcatttctgattaccaagattttgttcttagtaggcttaacaatttcgtgaaggagctttacagcctaggttgccggaaaattttggtcggaggtttaccgccaatgggatgtttaccgattcaaatgactgctcaattccgcaacgtcctaaggttttgcttggaacaagagaacagagactctgttttatacaatcagaaacttcagaagctcttacctcagacacaagcatctcttacaggaagcaagatcctttactctgatgtctatgaccctatgatggagatgctccaaaaccctagcaaatacggatttaaagagacgacgagaggatgttgtggaacagggttcttggagacgaacttcatgtgtaatgcttattcttccatgtgtcagaatcgctcggagtttctgttctttgactcgattcatccatctgaagctacctacaattacattggtaatgttctggatactaagattcgtgggtggcttaaggcttaagttatcaagatttgcaaagattgaacaaaattatctgtttcataatgtgactatttgtggacttcgtttgtttatcaactattaactttggcc

SEQ ID NO: 22853 - protein, 360 aa, Arabidopsis thaliana
  peptide (1)..(360): Ceres Seq. ID no. 13487396
MWTSKTISFTLFITTTLLGSCNASAKAKTQPLFPAILIFGDSTVDTGNNNYPSQTIFRAKHVPYGIDLPNHSPNGRFSNGKIFSDIIATKLNIKQFVPPFLQPNLTDQEIVTGVCFASAGAGYDDQTSLTTQAIRVSEQPNMFKSYIARLKSIVGDKKAMKIINNALVVVSAGPNDFILNYYEVPSWRRMYPSISDYQDFVLSRLNNFVKELYSLGCRKILVGGLPPMGCLPIQMTAQFRNVLRFCLEQENRDSVLYNQKLQKLLPQTQASLTGSKILYSDVYDPMMEMLQNPSKYGFKETTRGCCGTGFLETNFMCNAYSSMCQNRSEFLFFDSIHPSEATYNYIGNVLDTKIRGWLKA

SEQ ID NO: 22854 - protein, 219 aa, Arabidopsis thaliana
  peptide (1)..(219): Ceres Seq. ID no. 13487397
MFKSYIARLKSIVGDKKAMKIINNALVVVSAGPNDFILNYYEVPSWRRMYPSISDYQDFVLSRLNNFVKELYSLGCRKILVGGLPPMGCLPIQMTAQFRNVLRFCLEQENRDSVLYNQKLQKLLPQTQASLTGSKILYSDVYDPMMEMLQNPSKYGFKETTRGCCGTGFLETNFMCNAYSSMCQNRSEFLFFDSIHPSEATYNYIGNVLDTKIRGWLKA

SEQ ID NO: 22855 - protein, 201 aa, Arabidopsis thaliana
  peptide (1)..(201): Ceres Seq. ID no. 13487398
MKIINNALVVVSAGPNDFILNYYEVPSWRRMYPSISDYQDFVLSRLNNFVKELYSLGCRKILVGGLPPMGCLPIQMTAQFRNVLRFCLEQENRDSVLYNQKLQKLLPQTQASLTGSKILYSDVYDPMMEMLQNPSKYGFKETTRGCCGTGFLETNFMCNAYSSMCQNRSEFLFFDSIHPSEATYNYIGNVLDTKIRGWLKA

SEQ ID NO: 22856 - DNA, 1342 bp, Arabidopsis thaliana
  misc_feature (1)..(1342): Ceres Seq. ID no. 12334696
  misc_feature (1)..(1342): Ortholog of  Ceres SEQ ID NO 15170239 as cited in SEQ ID NO 54977
  misc_feature (1)..(1342): Ortholog of  Ceres SEQ ID NO 12615622 as cited in SEQ ID NO 62802
  misc_feature (1)..(1342): Ortholog of  Ceres SEQ ID NO 13596203 as cited in SEQ ID NO 68499
aaaaatccagctgataaataaatcatttttctcttgtcgtcatactaaaaaaaaaaaagattatctgtatttcaagtttcatgagcgtttgccaccacaacattgtcttttcggggttttagtcatatttaatggcttccaattcggagaaaaatcctcttctttcagatgagaaacccaaatcgacggaggagaataagagttctaagccggaatcagcttctgggagttcaacttcatcagctatgcctggcttgaatttcaatgcttttgatttctctaatatggctagtattctcaacgatcctagcatcagagaaatggctgagcaaatagctaaagatcctgcctttaaccaattggctgagcagcttcagagatctattcctaacgctggccaggaaggtggtttccctaactttgatcctcaacagtatgtcaacacaatgcaacaggttatgcataaccctgagtttaagacaatggccgagaaacttggtaccgccttagttcaggatccacaaatgtctccttttttggatgctttctcgaatcctgaaacagcagaacactttactgagcgtatggcgcggatgaaagaagatccagagttgaaacctatactagatgagattgatgctggtggtccttctgccatgatgaagtactggaatgatccagaagtgctgaaaaagctgggtgaagcaatgggtatgcctgttgctggcttaccagaccagactgtttcagctgaacctgaggtagcagaagaaggtgaagaagaagagtctattgttcaccaaactgccagtcttggtgatgttgagggtttgaaagctgccttggcatctggtggtaacaaagatgaagaagattctgaggaaggacagcattgcattttgcttgtggatacggcgagttgaaatgtgctcaagttcttatcgatgctggagcaagtgttaatgcggttgacaaaaacaagaacacacctctgcattatgctgctggttacgggaggaaagagtgtgtaagccttctcctggagaatggtgctgcagtcactctgcaaaacctagacgagaagacgccaattgatgtagcgaagctcaacagccagctggaggtggtgaagctgcttgagaaggatgctttcctttgagctctgctggttaaaggaaagctctaagctcatattgtctttgaggcatttgtcttgtgtgtgtcctgaaccagtttcacaggctttttgtgtacactttttattagttcctctcttctaaatttgtctcttatgttgttttaaaagtcaataaagaaagaaatagcaatcaatgatttaatc

SEQ ID NO: 22857 - protein, 263 aa, Arabidopsis thaliana
  peptide (1)..(263): Ceres Seq. ID no. 12334697
MASNSEKNPLLSDEKPKSTEENKSSKPESASGSSTSSAMPGLNFNAFDFSNMASILNDPSIREMAEQIAKDPAFNQLAEQLQRSIPNAGQEGGFPNFDPQQYVNTMQQVMHNPEFKTMAEKLGTALVQDPQMSPFLDAFSNPETAEHFTERMARMKEDPELKPILDEIDAGGPSAMMKYWNDPEVLKKLGEAMGMPVAGLPDQTVSAEPEVAEEGEEEESIVHQTASLGDVEGLKAALASGGNKDEEDSEEGQHCILLVDTAS

SEQ ID NO: 22858 - protein, 225 aa, Arabidopsis thaliana
  peptide (1)..(225): Ceres Seq. ID no. 12334698
MPGLNFNAFDFSNMASILNDPSIREMAEQIAKDPAFNQLAEQLQRSIPNAGQEGGFPNFDPQQYVNTMQQVMHNPEFKTMAEKLGTALVQDPQMSPFLDAFSNPETAEHFTERMARMKEDPELKPILDEIDAGGPSAMMKYWNDPEVLKKLGEAMGMPVAGLPDQTVSAEPEVAEEGEEEESIVHQTASLGDVEGLKAALASGGNKDEEDSEEGQHCILLVDTAS

SEQ ID NO: 22859 - protein, 212 aa, Arabidopsis thaliana
  peptide (1)..(212): Ceres Seq. ID no. 12334699
MASILNDPSIREMAEQIAKDPAFNQLAEQLQRSIPNAGQEGGFPNFDPQQYVNTMQQVMHNPEFKTMAEKLGTALVQDPQMSPFLDAFSNPETAEHFTERMARMKEDPELKPILDEIDAGGPSAMMKYWNDPEVLKKLGEAMGMPVAGLPDQTVSAEPEVAEEGEEEESIVHQTASLGDVEGLKAALASGGNKDEEDSEEGQHCILLVDTAS

SEQ ID NO: 22860 - DNA, 1197 bp, Arabidopsis thaliana
  misc_feature (1)..(1197): Ceres Seq. ID no. 12334689
  misc_feature (1)..(1197): Ortholog of  Ceres SEQ ID NO 13590233 as cited in SEQ ID NO 64652
aaaaccaacaaatggggatgagtcgtcaaagactgcactctctcctcttcctctggctccggcgaaaaaccccttttcgatttcattgataaaacgcaaatcgatctctcgtgtggaagaagaagaagaacacgatgggaacaatgggtaaagcattctacagcgtaggattctggatccgtgaaactggtcaagcacttgatcggctcggttgtcgcctccaagggaaaaatcatttccgagaacagctatcaaggcaccgcacactcatgaatgtttttgacaaaacccctaatgtggataagggggcttttgtggctcctaacgcttctctctctggtgatgtccatgtgggaagaggttcttccatttggtatggatgtgtcttgagaggagatgctaacagcattagtgttggagctgggaccaatattcaggacaacgctcttgtccacgttgctaagaccaacttaagtgggaaggtcttacctactgtcattggagacaatgtcaccattggtcatagtgctgttttacatggctgcactgtcgaggatgaggcctatattggtacaagtgcaactgtcttggatggagctcatgttgaaaaacatgccatggttgcttcaggagctcttgttaggcagaacactagaattccctctggcgaggtttggggaggcaacccagctaaatttctgaggaaggtgacagaagaagaaagagtcttcttctccagttcggctgtggagtactccaacttagctcaagctcacgccacagagaacgcaaagaacttggacgaggctgagttcaagaagcttctaaacaagaagaacgctcgcgatacagaatatgattcagtactcgatgatctcacgctccctgagaatgtaccaaaagcagcttgaggcgtttaacctgtgccgccttgcgaatcttgatttgtttggatttgaaaagtaaaaacaaagaacttgatttcctgcttctccaataaagttttcttgggcgtaaaatccattggccagtgctcactgggaaagttttcggcttaaaggcattcatttctctgttaaagattgtgaggggttttgttctcttgtaacttgagaaagaaaagttgtaaccttttcttcctttttatgtcgtctaataaattgttgatcagacagacatttaggttgacctttgccc

SEQ ID NO: 22861 - protein, 258 aa, Arabidopsis thaliana
  peptide (1)..(258): Ceres Seq. ID no. 12334690
MGTMGKAFYSVGFWIRETGQALDRLGCRLQGKNHFREQLSRHRTLMNVFDKTPNVDKGAFVAPNASLSGDVHVGRGSSIWYGCVLRGDANSISVGAGTNIQDNALVHVAKTNLSGKVLPTVIGDNVTIGHSAVLHGCTVEDEAYIGTSATVLDGAHVEKHAMVASGALVRQNTRIPSGEVWGGNPAKFLRKVTEEERVFFSSSAVEYSNLAQAHATENAKNLDEAEFKKLLNKKNARDTEYDSVLDDLTLPENVPKAA

SEQ ID NO: 22862 - protein, 255 aa, Arabidopsis thaliana
  peptide (1)..(255): Ceres Seq. ID no. 12334691
MGKAFYSVGFWIRETGQALDRLGCRLQGKNHFREQLSRHRTLMNVFDKTPNVDKGAFVAPNASLSGDVHVGRGSSIWYGCVLRGDANSISVGAGTNIQDNALVHVAKTNLSGKVLPTVIGDNVTIGHSAVLHGCTVEDEAYIGTSATVLDGAHVEKHAMVASGALVRQNTRIPSGEVWGGNPAKFLRKVTEEERVFFSSSAVEYSNLAQAHATENAKNLDEAEFKKLLNKKNARDTEYDSVLDDLTLPENVPKAA

SEQ ID NO: 22863 - protein, 213 aa, Arabidopsis thaliana
  peptide (1)..(213): Ceres Seq. ID no. 12334692
MNVFDKTPNVDKGAFVAPNASLSGDVHVGRGSSIWYGCVLRGDANSISVGAGTNIQDNALVHVAKTNLSGKVLPTVIGDNVTIGHSAVLHGCTVEDEAYIGTSATVLDGAHVEKHAMVASGALVRQNTRIPSGEVWGGNPAKFLRKVTEEERVFFSSSAVEYSNLAQAHATENAKNLDEAEFKKLLNKKNARDTEYDSVLDDLTLPENVPKAA

SEQ ID NO: 22864 - DNA, 797 bp, Arabidopsis thaliana
  misc_feature (1)..(797): Ceres Seq. ID no. 12322374
  misc_feature (1)..(797): Ortholog of  Ceres SEQ ID NO 13595187 as cited in SEQ ID NO 56052
  misc_feature (1)..(797): Ortholog of  Ceres SEQ ID NO 14312239 as cited in SEQ ID NO 59176
  misc_feature (1)..(797): Ortholog of  Ceres SEQ ID NO 14313718 as cited in SEQ ID NO 59559
  misc_feature (1)..(797): Ortholog of  Ceres SEQ ID NO 15169505 as cited in SEQ ID NO 61011
  misc_feature (1)..(797): Ortholog of  Ceres SEQ ID NO 13662053 as cited in SEQ ID NO 61547
  misc_feature (1)..(797): Ortholog of  Ceres SEQ ID NO 13624283 as cited in SEQ ID NO 0
acgatagcctctcatcttcttttttcctctccatcatcttcaccataaccgaaaaaccaaacaaaaaatccttagataatcagatcttgatattatggatcatatcatcggctttatgggcacaacaaacatgtcacataacacaaaccttatgatcgctgccgcagccactaccactacgacctcttcgtcttcctcttcttcctccggaggctcggggactaaccagctaagcaggtacgagaatcagaagagaagagattggaacactttcggacagtatctacgcaatcaccgtccaccactttctctctcccgttgcagtggtgctcatgttcttgaattcctcaggtacctcgaccaattcggcaagactaaggttcacacacacctatgtccgttcttcggacacccaaacccaccagcaccatgtgcctgtccactccgacaagcgtggggtagtctggacgcactcattggccgtcttagagctgcttttgaagagaacggtggttcaccagagacgaacccttttggtgcacgagccgttcgactctacctaagggaagtacgtgactcgcaggctaaagcacgtgggatcagctatgaaaaaaagaagcgcaagcgacctcctccgccactaccaccggctcagccggcgatttcaagtagccctaattaacattaagtcatgagtaagatgtttcaatgaactacgtttgtttacaaatttttatcaatgacgaacatgcacgagttcttttaaagtcacatgccctttcctaaacttttatttg

SEQ ID NO: 22865 - protein, 195 aa, Arabidopsis thaliana
  peptide (1)..(195): Ceres Seq. ID no. 12322375
MDHIIGFMGTTNMSHNTNLMIAAAATTTTTSSSSSSSSGGSGTNQLSRYENQKRRDWNTFGQYLRNHRPPLSLSRCSGAHVLEFLRYLDQFGKTKVHTHLCPFFGHPNPPAPCACPLRQAWGSLDALIGRLRAAFEENGGSPETNPFGARAVRLYLREVRDSQAKARGISYEKKKRKRPPPPLPPAQPAISSSPN

SEQ ID NO: 22866 - protein, 188 aa, Arabidopsis thaliana
  peptide (1)..(188): Ceres Seq. ID no. 12322376
MGTTNMSHNTNLMIAAAATTTTTSSSSSSSSGGSGTNQLSRYENQKRRDWNTFGQYLRNHRPPLSLSRCSGAHVLEFLRYLDQFGKTKVHTHLCPFFGHPNPPAPCACPLRQAWGSLDALIGRLRAAFEENGGSPETNPFGARAVRLYLREVRDSQAKARGISYEKKKRKRPPPPLPPAQPAISSSPN

SEQ ID NO: 22867 - protein, 183 aa, Arabidopsis thaliana
  peptide (1)..(183): Ceres Seq. ID no. 12322377
MSHNTNLMIAAAATTTTTSSSSSSSSGGSGTNQLSRYENQKRRDWNTFGQYLRNHRPPLSLSRCSGAHVLEFLRYLDQFGKTKVHTHLCPFFGHPNPPAPCACPLRQAWGSLDALIGRLRAAFEENGGSPETNPFGARAVRLYLREVRDSQAKARGISYEKKKRKRPPPPLPPAQPAISSSPN

SEQ ID NO: 22868 - DNA, 1627 bp, Arabidopsis thaliana
  misc_feature (1)..(1627): Ceres Seq. ID no. 12326340
  misc_feature (1)..(1627): Ortholog of  Ceres SEQ ID NO 13647121 as cited in SEQ ID NO 151
  misc_feature (1)..(1627): Ortholog of  Ceres SEQ ID NO 15176411 as cited in SEQ ID NO 54468
  misc_feature (1)..(1627): Ortholog of  Ceres SEQ ID NO 14307131 as cited in SEQ ID NO 59707
attttcaaggagaagaatatatttgactcagagagagattcattcagtaatggcagcctcaggcacctctgctactttcagagcctccgtttcttcagctccttcctcttcttcccaattgacccatttgaaatcacccttcaaagctgtcaaatatacgcctctgccatcgtctcgctccaagtcatcatccttctccgtctcctgcaccatcgccaaggacccgcctgttctcatggccgccggatctgacccggccctgtggcaacgacccgattcgttcggtcggtttgggaagtttggtgggaagtatgtacctgaaacccttatgcacgctctatctgagcttgaatccgctttctatgctcttgccaccgacgatgatttccagagagagttggctggaatcttgaaggactatgtgggtagagaaagtcctctgtattttgcagagaggcttacggagcattacaggcgcgagaatggcgaagggcctcttatatacttgaagagagaagacttgaatcacacaggagctcacaagattaacaacgctgtggctcaggctcttcttgctaagcggttggggaagaagaggattattgctgagacaggagcgggtcaacatggtgtggctacagctactgtgtgtgcccgttttggtttggagtgtattatctatatgggtgctcaagatatggagagacaagcactcaatgtgttcagaatgcgacttcttggtgccgaggtgagaggagtccactctggaacagcgacattgaaggatgcgacatctgaagcgataagagattgggtgacaaatgtggagactacccattacatattgggatctgtggcgggtcctcatccttaccccatgatggtcagagactttcacgctgtgattggtaaagaaacaaggaaacaagcgttggagaaatggggcgggaagccggatgtcttggtggcttgtgtcggtggtggttcaaacgctatgggactcttccatgaatttgtgaatgacacagaggtccggatgatcggtgtggaagcagcgggattcggattggacagtggcaaacacgctgctacattgacaaagggagatgttggtgtcctccatggagctatgagttacttgctgcaagatgatgatggacaaatcattgaaccacactccatcagtgcaggattggactaccctggagtcggacccgagcacagtttctttaaagacatgggacgggctgaatactatagcataaccgacgaagaagcgttggaagcgttcaagagagtgtcgcggttagagggaatcattccagcactggagacctcacacgcactagcttacctcgagaagctatgtcccacattatcagacgggacgagagtggtcttgaacttcagcggaagaggagataaagatgttcagacagtggctaaatatcttgatgtttgaagagagaaacacttatgtttgtttttcagttattcagacagaatgaaatcctttttgtacttgtaatctgtttgtactttacttctctctggtcagtacgtttccaacaaaattggaaatagaaaaagattacgaagagaacgaaatttgaataaatgtattatc

SEQ ID NO: 22869 - protein, 486 aa, Arabidopsis thaliana
  peptide (1)..(486): Ceres Seq. ID no. 12326341
FSRRRIYLTQREIHSVMAASGTSATFRASVSSAPSSSSQLTHLKSPFKAVKYTPLPSSRSKSSSFSVSCTIAKDPPVLMAAGSDPALWQRPDSFGRFGKFGGKYVPETLMHALSELESAFYALATDDDFQRELAGILKDYVGRESPLYFAERLTEHYRRENGEGPLIYLKREDLNHTGAHKINNAVAQALLAKRLGKKRIIAETGAGQHGVATATVCARFGLECIIYMGAQDMERQALNVFRMRLLGAEVRGVHSGTATLKDATSEAIRDWVTNVETTHYILGSVAGPHPYPMMVRDFHAVIGKETRKQALEKWGGKPDVLVACVGGGSNAMGLFHEFVNDTEVRMIGVEAAGFGLDSGKHAATLTKGDVGVLHGAMSYLLQDDDGQIIEPHSISAGLDYPGVGPEHSFFKDMGRAEYYSITDEEALEAFKRVSRLEGIIPALETSHALAYLEKLCPTLSDGTRVVLNFSGRGDKDVQTVAKYLDV

SEQ ID NO: 22870 - protein, 470 aa, Arabidopsis thaliana
  peptide (1)..(470): Ceres Seq. ID no. 12326342
MAASGTSATFRASVSSAPSSSSQLTHLKSPFKAVKYTPLPSSRSKSSSFSVSCTIAKDPPVLMAAGSDPALWQRPDSFGRFGKFGGKYVPETLMHALSELESAFYALATDDDFQRELAGILKDYVGRESPLYFAERLTEHYRRENGEGPLIYLKREDLNHTGAHKINNAVAQALLAKRLGKKRIIAETGAGQHGVATATVCARFGLECIIYMGAQDMERQALNVFRMRLLGAEVRGVHSGTATLKDATSEAIRDWVTNVETTHYILGSVAGPHPYPMMVRDFHAVIGKETRKQALEKWGGKPDVLVACVGGGSNAMGLFHEFVNDTEVRMIGVEAAGFGLDSGKHAATLTKGDVGVLHGAMSYLLQDDDGQIIEPHSISAGLDYPGVGPEHSFFKDMGRAEYYSITDEEALEAFKRVSRLEGIIPALETSHALAYLEKLCPTLSDGTRVVLNFSGRGDKDVQTVAKYLDV

SEQ ID NO: 22871 - protein, 408 aa, Arabidopsis thaliana
  peptide (1)..(408): Ceres Seq. ID no. 12326343
MAAGSDPALWQRPDSFGRFGKFGGKYVPETLMHALSELESAFYALATDDDFQRELAGILKDYVGRESPLYFAERLTEHYRRENGEGPLIYLKREDLNHTGAHKINNAVAQALLAKRLGKKRIIAETGAGQHGVATATVCARFGLECIIYMGAQDMERQALNVFRMRLLGAEVRGVHSGTATLKDATSEAIRDWVTNVETTHYILGSVAGPHPYPMMVRDFHAVIGKETRKQALEKWGGKPDVLVACVGGGSNAMGLFHEFVNDTEVRMIGVEAAGFGLDSGKHAATLTKGDVGVLHGAMSYLLQDDDGQIIEPHSISAGLDYPGVGPEHSFFKDMGRAEYYSITDEEALEAFKRVSRLEGIIPALETSHALAYLEKLCPTLSDGTRVVLNFSGRGDKDVQTVAKYLDV

SEQ ID NO: 22872 - DNA, 1741 bp, Arabidopsis thaliana
  misc_feature (1)..(1741): Ceres Seq. ID no. 12377573
  misc_feature (1)..(1741): Ortholog of  Ceres SEQ ID NO 14315422 as cited in SEQ ID NO 59255
cttatcaattcatctcacactcttcttcactctcttctctctacacacacacacacacacacacacaaaatggattcttcgaatgttgaagaaaacctaaacccagaaacaaaatccgcagaagaacaaaacccacttgccattttccattcttctctaccaatcgcatctctttctctgaccttgttcccatcctcgactcaatttctcaaattgtttgctcatcatccaaacaaggttaagatccctacgcaggcttcttctctcactcatctctctctttcttctgtctctccttttccttcttccagaatctctttcaaatccaccatcgctgctaaccctcttcaatcccctctctccatcgtccctcgtcgtcccgttgatccttcctccgccgccgctctccgccgtgctgctgtcgtctggttccgcaatgacctccgtgtccacgacaacgagtgtctcaactccgccaacgacgagtgcgtctccgttttgcccgtttactgcttcgaccctagagattacggcaagtcctcttccggcttcgacaaaacggggccttttcgtgcccagtttctgattgagtccgtttcggagctccggaagaatctccaagccagagggtcgaatctagttgtccgtgtcgggaaacctgaagctgttttggtggaattggctaaggagattggagctgacgcggtttatgctcacagagaagtgtctcacgacgaggttaaagcggaagggaagatagagaccgcgatgaaggaggaaggcgttgaagtcaagtatttctggggaagcactctctatcatttggatgatttgcccttcaaaattgaagacttgccgtcaaattacggagctttcaaggataaagtccagaaattggagattaggaagactatcgcagcgcttgatcaattgaaaagcttgccctctcgaggagacgttgagcttggcgatattccttctctcctggatcttggcattagccccactcctaggactagccaggaggggaaaccgacaatggttggaggagagacagaggcgttgactagactaaagagctttgccgcggattgtcaggctcggttgagcaagggaaaccagaaaggaggcaacaacagtgtctttggtgcaaacttctcttgcaagatatcaccttggttagccatgggaagcatctctcctcgttccatgttcgatgagctgaagaaaacaatctccgcatcaaccacctccacaactccaaggaacggaccgggagatacaggactcaactggttaatgtatgagttgctatggagggatttcttcaggtttataaccaagaaatacagctcagcgaagacgcaggtcgaggctggtccggctacagcctgtaccggtgcctttgcttaaacatttgaaaactttcaggtgaccggaaaagttagaagcgacctgtttctttgccctactctggtgtatggtggattaatttgctatccggacaggactttactgctctcttttgaaacttgagtgtcaggagaataaaatctaagcttctttttttggctcaatcaagttgtccgttccctgttctaaacatttcggatactcattccataaaaagtctctacaatttgagacgctctcctttgtggttaagacttgagaatgtatcttagaaaataaccgaagtagttgtgtctatgaatattaaattcaggaatattaagatgtc

SEQ ID NO: 22873 - protein, 470 aa, Arabidopsis thaliana
  peptide (1)..(470): Ceres Seq. ID no. 12377574
LINSSHTLLHSLLSTHTHTHTHKMDSSNVEENLNPETKSAEEQNPLAIFHSSLPIASLSLTLFPSSTQFLKLFAHHPNKVKIPTQASSLTHLSLSSVSPFPSSRISFKSTIAANPLQSPLSIVPRRPVDPSSAAALRRAAVVWFRNDLRVHDNECLNSANDECVSVLPVYCFDPRDYGKSSSGFDKTGPFRAQFLIESVSELRKNLQARGSNLVVRVGKPEAVLVELAKEIGADAVYAHREVSHDEVKAEGKIETAMKEEGVEVKYFWGSTLYHLDDLPFKIEDLPSNYGAFKDKVQKLEIRKTIAALDQLKSLPSRGDVELGDIPSLLDLGISPTPRTSQEGKPTMVGGETEALTRLKSFAADCQARLSKGNQKGGNNSVFGANFSCKISPWLAMGSISPRSMFDELKKTISASTTSTTPRNGPGDTGLNWLMYELLWRDFFRFITKKYSSAKTQVEAGPATACTGAFA

SEQ ID NO: 22874 - protein, 447 aa, Arabidopsis thaliana
  peptide (1)..(447): Ceres Seq. ID no. 12377575
MDSSNVEENLNPETKSAEEQNPLAIFHSSLPIASLSLTLFPSSTQFLKLFAHHPNKVKIPTQASSLTHLSLSSVSPFPSSRISFKSTIAANPLQSPLSIVPRRPVDPSSAAALRRAAVVWFRNDLRVHDNECLNSANDECVSVLPVYCFDPRDYGKSSSGFDKTGPFRAQFLIESVSELRKNLQARGSNLVVRVGKPEAVLVELAKEIGADAVYAHREVSHDEVKAEGKIETAMKEEGVEVKYFWGSTLYHLDDLPFKIEDLPSNYGAFKDKVQKLEIRKTIAALDQLKSLPSRGDVELGDIPSLLDLGISPTPRTSQEGKPTMVGGETEALTRLKSFAADCQARLSKGNQKGGNNSVFGANFSCKISPWLAMGSISPRSMFDELKKTISASTTSTTPRNGPGDTGLNWLMYELLWRDFFRFITKKYSSAKTQVEAGPATACTGAFA

SEQ ID NO: 22875 - DNA, 1154 bp, Arabidopsis thaliana
  misc_feature (1)..(1154): Ceres Seq. ID no. 12327110
  misc_feature (1)..(1154): Ortholog of  Ceres SEQ ID NO 13594651 as cited in SEQ ID NO 52212
accaaccaacaaacactcttctcagtggctttttttttaattgatcggatcctccaagcagcagccgaagacgaccgccggcgatttccggttggcaattgttctcatctgatctgctttctcgcgctccaagtttaatggaagcattaactacttcaagggttgtgccagttcaggtcccctgtagaaagctctcttcactttttgctaatttttcttgccttgagttaaggagatatccttgtagaggtcttgtctccattatgaaccatcccaaattgcttcgtccagtgactgcttctgtgcagcctcacgagttgtcgactttggggcatgaaggcaacattgttccttctaaagaaattcttgatctttggagaagtgttgaagcggtatgtttcgatgtggacagcacggtttgtgtggatgaaggtattgatgaacttgctgagttttgtggagctggaaaggctgttgctgaatggactgccagagctatgggtggatctgttccatttgaagaagctctagctgcaagactttctttattcaagccttctctttcaaaagtagaggaatatctcgacaagagacccccaaggctatctcctggcattgaagagttggtcaagaaactcagagccaataacattgatgtctatttgatatctggaggttttcgacagatgatcaatcctgtagcatcgattcttggcatccctcgggagaatatctttgccaacaatcttctatttggaaactccggcgagtttctgggatttgatgagaacgaacctacgtcaagaagtggaggcaaagccaaggcagtgcaacaaatacgaaagggtcgtctctacaagactatggccatgattggagatggtgctactgatctcgaagcacgtaaacctggtggcgcagatttgttcatatgctacgctggagttcagcttcgtgaagccgttgcagcaaatgcagactggcttatctttaagtttgaatctctcataaactcattggactaaaagcctctatagtgattattctcgtttagctaaactcattattcatatctccaaatttgtacccttttatgaatttgtatcaaataccaattgaatcaacaaatgtttttgccaaaaaccctgacgtag

SEQ ID NO: 22876 - protein, 295 aa, Arabidopsis thaliana
  peptide (1)..(295): Ceres Seq. ID no. 12327111
MEALTTSRVVPVQVPCRKLSSLFANFSCLELRRYPCRGLVSIMNHPKLLRPVTASVQPHELSTLGHEGNIVPSKEILDLWRSVEAVCFDVDSTVCVDEGIDELAEFCGAGKAVAEWTARAMGGSVPFEEALAARLSLFKPSLSKVEEYLDKRPPRLSPGIEELVKKLRANNIDVYLISGGFRQMINPVASILGIPRENIFANNLLFGNSGEFLGFDENEPTSRSGGKAKAVQQIRKGRLYKTMAMIGDGATDLEARKPGGADLFICYAGVQLREAVAANADWLIFKFESLINSLD

SEQ ID NO: 22877 - protein, 253 aa, Arabidopsis thaliana
  peptide (1)..(253): Ceres Seq. ID no. 12327112
MNHPKLLRPVTASVQPHELSTLGHEGNIVPSKEILDLWRSVEAVCFDVDSTVCVDEGIDELAEFCGAGKAVAEWTARAMGGSVPFEEALAARLSLFKPSLSKVEEYLDKRPPRLSPGIEELVKKLRANNIDVYLISGGFRQMINPVASILGIPRENIFANNLLFGNSGEFLGFDENEPTSRSGGKAKAVQQIRKGRLYKTMAMIGDGATDLEARKPGGADLFICYAGVQLREAVAANADWLIFKFESLINSLD

SEQ ID NO: 22878 - protein, 175 aa, Arabidopsis thaliana
  peptide (1)..(175): Ceres Seq. ID no. 12327113
MGGSVPFEEALAARLSLFKPSLSKVEEYLDKRPPRLSPGIEELVKKLRANNIDVYLISGGFRQMINPVASILGIPRENIFANNLLFGNSGEFLGFDENEPTSRSGGKAKAVQQIRKGRLYKTMAMIGDGATDLEARKPGGADLFICYAGVQLREAVAANADWLIFKFESLINSLD

SEQ ID NO: 22879 - DNA, 1125 bp, Arabidopsis thaliana
  misc_feature (1)..(1125): Ceres Seq. ID no. 12343421
  misc_feature (1)..(1125): Ortholog of  Ceres SEQ ID NO 15177965 as cited in SEQ ID NO 58545
atcagaaacacaattccttcttcttcttcttcttcttcttgtctccgatgtcagccatggatgttatgattcactcttcaagctttctcctcccttgcgacgaaactagtacagggacgagatacgctctcgttgttctgaaccagagtttgccacgattcactcctcttctctgggaacatgagcagcaaaacttcgtctctgtgctgatggaggcgctaatcgcatctacgacgaattgcctctcttcttccctaatgaagacgctttggccattcgaaacaggtataagccggatgttatcaaaggagatatggattctatacgtcgtgacgtcctcgacttttatataaacttgggaactaaggttatagatgaatctcatgatcaagacaccacagatcttgataaatgcattttgtatatccgtcactctactttgaatcaagagacttccggactccagattcttgccactggagcacttggaggaagatttgatcaagccggtaatctcaacgtcttatatcgatatccagatacaaggatagtccttttatctgacgattgcctcatccaactccttccaaagactcatcgacatgaaatacatattcagtcttctctagaagggcctcactgtggactcatacccattggaactccatctgctaaaaccacaacctcagggcttcaatgggatctcagcaacactgagatgagatttggtgggttgataagtacatccaacttggttaaagaagagaaaatcacagtcgaatcggattcggatcttctctggactatatccatcaagaaaacaggactttccatacaagaccatacaccttaggcccggtaacaaaacacactttagtatattatacgctactatgatgttcctgatgcaacgaactagttcaacattattgtgttgatttgttgttcactgtactagctaataatacttgtaccattactgtcgttatacattaagatgcttttttctttggttctgtcattgtttatgtggggctttgttgatttgtcgtactcaaaattgtgactggatgttggttagatattggaatctacttgtgcggtatatgagaaaagacaaaattc

SEQ ID NO: 22880 - protein, 179 aa, Arabidopsis thaliana
  peptide (1)..(179): Ceres Seq. ID no. 12343422
MDSIRRDVLDFYINLGTKVIDESHDQDTTDLDKCILYIRHSTLNQETSGLQILATGALGGRFDQAGNLNVLYRYPDTRIVLLSDDCLIQLLPKTHRHEIHIQSSLEGPHCGLIPIGTPSAKTTTSGLQWDLSNTEMRFGGLISTSNLVKEEKITVESDSDLLWTISIKKTGLSIQDHTP

SEQ ID NO: 22881 - protein, 116 aa, Arabidopsis thaliana
  peptide (1)..(116): Ceres Seq. ID no. 12343423
QKHNSFFFFFFFLSPMSAMDVMIHSSSFLLPCDETSTGTRYALVVLNQSLPRFTPLLWEHEQQNFVSVLMEALIASTTNCLSSSLMKTLWPFETGISRMLSKEIWILYVVTSSTFI

SEQ ID NO: 22882 - protein, 101 aa, Arabidopsis thaliana
  peptide (1)..(101): Ceres Seq. ID no. 12343424
MSAMDVMIHSSSFLLPCDETSTGTRYALVVLNQSLPRFTPLLWEHEQQNFVSVLMEALIASTTNCLSSSLMKTLWPFETGISRMLSKEIWILYVVTSSTFI

SEQ ID NO: 22883 - DNA, 1178 bp, Arabidopsis thaliana
  misc_feature (1)..(1178): Ceres Seq. ID no. 12325264
  misc_feature (1)..(1178): Ortholog of  Ceres SEQ ID NO 13623732 as cited in SEQ ID NO 0
ataaaatccatggctgaagcttgcagagttaggaggatgaagctaggaagccaaggccttgaggtatctgcgcaaggccttggctgcatggccctctccgctcgatacggtgctcccaagccggaaactgacgccatcgctctcctccaccatgctattaactccggtgttactttctttgacacctctgacatgtatggtcctgaaaccaacgagttgctcctcggaaaggctctgaaagatggggtgaaggagaaagtggagcttgcgaccaaatttggattctttatagtagagggggaaatttctgaggtaagaggagatcctgagtatgtaagggcagcgtgtgaggctagtttaaagaggctagatattgcctgcattgatctttattatcagcatcgaatcgatactcgtgtccctatcgaaatcactatgagagaactgaagaagctagttgaagagggtaagataaagtgtattggtctgtcagaagcttcagcttcaactatcagaagagcacatgctgttcacccgataactgcggtgcaaatagaatggtccttatggtcgagagacgcggaagaagatatcattcctatctgcagggaacttgggattggaatcgtagcttatagccctctaggaagaggcttcttagcagcaggacccaaacttgctgagaatctggaaaacgatgacttcagaaagactctaccaagattccaacaagaaaacgtagaccacaacaagattctctttgagaaagtttctgcaatggctgagaagaaagggtgcactccagcacaactagccttagcatgggttcatcaccagggagatgatgtttgccccattccaggaaccactaagattgaaaacctcaaccagaacattagagctttgtcagtaaaactcactcctgaagaaatatctgagctcgagtcccttgccaaaccagagtctgtgaaaggagaaagatacatggcctcaatgtccaccttcaagaactccaacactccaccgttgtcttcctggaaagccacttaaaaccgcatgagagtttctctagctaaacctactaaaattaatatgctaagggcttgtgtaagcccacaaaaataatatgtaagagtttgtgttgatgttcagagtgttcaatgtataattttctatgc

SEQ ID NO: 22884 - protein, 349 aa, Arabidopsis thaliana
  peptide (1)..(349): Ceres Seq. ID no. 12325265
IKSMAEACRVRRMKLGSQGLEVSAQGLGCMALSARYGAPKPETDAIALLHHAINSGVTFFDTSDMYGPETNELLLGKALKDGVKEKVELATKFGFFIVEGEISEVRGDPEYVRAACEASLKRLDIACIDLYYQHRIDTRVPIEITMRELKKLVEEGKIKCIGLSEASASTIRRAHAVHPITAVQIEWSLWSRDAEEDIIPICRELGIGIVAYSPLGRGFLAAGPKLAENLENDDFRKTLPRFQQENVDHNKILFEKVSAMAEKKGCTPAQLALAWVHHQGDDVCPIPGTTKIENLNQNIRALSVKLTPEEISELESLAKPESVKGERYMASMSTFKNSNTPPLSSWKAT

SEQ ID NO: 22885 - protein, 346 aa, Arabidopsis thaliana
  peptide (1)..(346): Ceres Seq. ID no. 12325266
MAEACRVRRMKLGSQGLEVSAQGLGCMALSARYGAPKPETDAIALLHHAINSGVTFFDTSDMYGPETNELLLGKALKDGVKEKVELATKFGFFIVEGEISEVRGDPEYVRAACEASLKRLDIACIDLYYQHRIDTRVPIEITMRELKKLVEEGKIKCIGLSEASASTIRRAHAVHPITAVQIEWSLWSRDAEEDIIPICRELGIGIVAYSPLGRGFLAAGPKLAENLENDDFRKTLPRFQQENVDHNKILFEKVSAMAEKKGCTPAQLALAWVHHQGDDVCPIPGTTKIENLNQNIRALSVKLTPEEISELESLAKPESVKGERYMASMSTFKNSNTPPLSSWKAT

SEQ ID NO: 22886 - protein, 337 aa, Arabidopsis thaliana
  peptide (1)..(337): Ceres Seq. ID no. 12325267
MKLGSQGLEVSAQGLGCMALSARYGAPKPETDAIALLHHAINSGVTFFDTSDMYGPETNELLLGKALKDGVKEKVELATKFGFFIVEGEISEVRGDPEYVRAACEASLKRLDIACIDLYYQHRIDTRVPIEITMRELKKLVEEGKIKCIGLSEASASTIRRAHAVHPITAVQIEWSLWSRDAEEDIIPICRELGIGIVAYSPLGRGFLAAGPKLAENLENDDFRKTLPRFQQENVDHNKILFEKVSAMAEKKGCTPAQLALAWVHHQGDDVCPIPGTTKIENLNQNIRALSVKLTPEEISELESLAKPESVKGERYMASMSTFKNSNTPPLSSWKAT

SEQ ID NO: 22887 - DNA, 1210 bp, Arabidopsis thaliana
  misc_feature (1)..(1210): Ceres Seq. ID no. 12482646
  misc_feature (1)..(1210): Ortholog of  Ceres SEQ ID NO 14306675 as cited in SEQ ID NO 52939
  misc_feature (1)..(1210): Ortholog of  Ceres SEQ ID NO 12608114 as cited in SEQ ID NO 57218
aaagagaaaacgtatgagttgcttaaaccataaacctcaagctcaaaattttatcaaccttataaagtttcgttttctcgagattttgaatcttttcagctaaaaaagatcacagctttttgcgttttctggatgagtttgagataagagaagatgaagattcagtgtaacgtttgtgaggcggcggaagcgacggttctatgttgcgccgacgaggctgctctttgttgggcttgcgatgagaaaattcacgccgctaataaactcgccggaaaacatcagagagtccctctctctgcctctgcctcttccatacccaaatgtgacatttgtcaggaagcatctggattcttcttttgtctgcaagatagagctttgctatgtaggaaatgtgatgttgcaatccacactgtgaatcctcatgtttcagctcaccagagattnnttctcactggaatcaaagttggtcttgaatctatagacactggtccttctactaaatcctcacctaccaatgatgataaaaccatggagaccaaaccttttgttcaatctatacctgagcctcaaaagatggccttcgatcatcatcatcaccagcagcagcaggaacagcaggaaggagttataccgggaactaaagtcaatgatcagacatcgacaaagcttcctctcgtaagtagcggatcaactactggaagcattcctcagtggcaaatagaggagattttcgggctaaccgactttgatcagagctatgaatacatggagaataatggatcatctaaggcggatactagtagacgaggagattcagacagttcttcgatgatgagatctgcagaagaagatggagaagataacaataactgcttgggaggtgagacatcatgggcggttccacagattcagtctccacctacagcgtctggtctaaactggcctaagcattttcaccaccactctgtgtttgttccggacataacttcttcaactccttataccggttcatccccgaatcaaagggttgggaaacggcggcgacggttctagcatttgtaattatcttttagccgcttgagaaaagagattggcagctttctcagtagatgtaagatcacataaatgatttggaaacttgtaatgtagtgatctgtgagagtcggtgttctttgttagctgaaaaaacaaaaagatgtttatttggtcg

SEQ ID NO: 22888 - protein, 299 aa, Arabidopsis thaliana
  peptide (1)..(299): Ceres Seq. ID no. 12482647
  misc_feature (97)..(97): Xaa is any aa, unknown or other
  misc_feature (98)..(98): Xaa is any aa, unknown or other
MKIQCNVCEAAEATVLCCADEAALCWACDEKIHAANKLAGKHQRVPLSASASSIPKCDICQEASGFFFCLQDRALLCRKCDVAIHTVNPHVSAHQRXXLTGIKVGLESIDTGPSTKSSPTNDDKTMETKPFVQSIPEPQKMAFDHHHHQQQQEQQEGVIPGTKVNDQTSTKLPLVSSGSTTGSIPQWQIEEIFGLTDFDQSYEYMENNGSSKADTSRRGDSDSSSMMRSAEEDGEDNNNCLGGETSWAVPQIQSPPTASGLNWPKHFHHHSVFVPDITSSTPYTGSSPNQRVGKRRRRF

SEQ ID NO: 22889 - protein, 174 aa, Arabidopsis thaliana
  peptide (1)..(174): Ceres Seq. ID no. 12482648
METKPFVQSIPEPQKMAFDHHHHQQQQEQQEGVIPGTKVNDQTSTKLPLVSSGSTTGSIPQWQIEEIFGLTDFDQSYEYMENNGSSKADTSRRGDSDSSSMMRSAEEDGEDNNNCLGGETSWAVPQIQSPPTASGLNWPKHFHHHSVFVPDITSSTPYTGSSPNQRVGKRRRRF

SEQ ID NO: 22890 - protein, 159 aa, Arabidopsis thaliana
  peptide (1)..(159): Ceres Seq. ID no. 12482649
MAFDHHHHQQQQEQQEGVIPGTKVNDQTSTKLPLVSSGSTTGSIPQWQIEEIFGLTDFDQSYEYMENNGSSKADTSRRGDSDSSSMMRSAEEDGEDNNNCLGGETSWAVPQIQSPPTASGLNWPKHFHHHSVFVPDITSSTPYTGSSPNQRVGKRRRRF

SEQ ID NO: 22891 - DNA, 2017 bp, Arabidopsis thaliana
  misc_feature (1)..(2017): Ceres Seq. ID no. 13497447
  misc_feature (1)..(2017): Ortholog of  Ceres SEQ ID NO 14313147 as cited in SEQ ID NO 54166
  misc_feature (1)..(2017): Ortholog of  Ceres SEQ ID NO 13598882 as cited in SEQ ID NO 0
atatatccaaacaaatgaatgtgttaaaccttcactcttctctccacacaaaattcaaaaacctcacatttcacttctctcttctcgcttcttctagatctcaccggtttatctagctccggtttgattcatctccggttatggggagagaatgaggagttaccgttttagtgattatctacacatgtctgtttcattctctaacgatatggatttgttttgtggagaagactccggtgtgttttccggtgagtcaacggttgatttctcgtcttccgaggttgattcatggcctggtgattctatcgcttgttttatcgaagacgagcgtcacttcgttcctggacatgattatctctctagatttcaaactcgatctctcgatgcttccgctagagaagattccgtcgcatggattctcaaggtacaagcgtattataactttcagcctttaacggcgtacctcgccgttaactatatggatcggtttctttacgctcgtcgattaccggaaacgagtggttggccaatgcaacttttagcagtggcatgcttgtctttagctgcaaagatggaggaaattctcgttccttctctttttgattttcaggttgcaggagtgaagtatttatttgaagcaaaaactataaaaagaatggaacttcttgttctaagtgtgttagattggagactaagatcggttacaccgtttgatttcattagcttctttgcttacaagatcgatccttcgggtacctttctcgggttctttatctcccatgctacagagattatactctccaacataaaagaagcgagctttcttgagtactggccatcgagtatagctgcagccgcgattctctgtgtagcgaacgagttaccttctctatcctctgttgtcaatccccacgagagccctgagacttggtgtgacggattgagcaaagagaagatagtgagatgctatagactgatgaaagcgatggccatcgagaataaccggttaaatacaccaaaagtgatagcaaagcttcgagtgagtgtaagggcatcatcgacgttaacaaggccaagtgatgaatcctctttctcatcctcttctccttgtaaaaggagaaaattaagtggctattcatgggtaggtgatgaaacatctacctctaattaaaatttggggagtgaaagtagaggaccaaggaaacaaaacctagaagaaaaaaaaccctcttctgtttaagtagagtatattttttaacaagtacatagtaataagggagtgatgaagaaaagtaaaagtgtttattggctgagttaaagtaattaagagttttccaaccaaggggaaggaataagagttttggttacaatttcttttatggaaagggtaaaaattgggttttggggttggttggttggttgggagagacgaagctcatcattaatggctttgcagattcccaagaaagcaaaatgagtaagtgagtgtaacacacacgtgttagagaaaagatatgatcatgtgagtgtgtgtgtgtgagagagagagagaagagtatttgcattagagtcctcatcacacaggtactgatggataagacaggggagcgtttgcaaaagatttgtgagtggagatttttctgagctctttgtcttaatggatcgcagcagttcatgggacccttcctcagcttcatcatcaaacaaaaaaaaaatcaagttgcgaagtatatataatttgtttttttgtttggatttttaagatttttgattccttgtgtgtgacttcacgtgacggaggcgtgtgtctcacgtgtttgttttctcttcaaatcttttattttggcgggaaattttgtgtttttgatttctacgtattcgtggactccaaatgagttttgtcacggtgcgttttagtagcgtttgcatgcgtgtaaggtgtcacgtatgtgtatatatatgatttttttttggtttcttgaaaggttgaattttataaataaaacgtttctattat

SEQ ID NO: 22892 - protein, 339 aa, Arabidopsis thaliana
  peptide (1)..(339): Ceres Seq. ID no. 13497448
MRSYRFSDYLHMSVSFSNDMDLFCGEDSGVFSGESTVDFSSSEVDSWPGDSIACFIEDERHFVPGHDYLSRFQTRSLDASAREDSVAWILKVQAYYNFQPLTAYLAVNYMDRFLYARRLPETSGWPMQLLAVACLSLAAKMEEILVPSLFDFQVAGVKYLFEAKTIKRMELLVLSVLDWRLRSVTPFDFISFFAYKIDPSGTFLGFFISHATEIILSNIKEASFLEYWPSSIAAAAILCVANELPSLSSVVNPHESPETWCDGLSKEKIVRCYRLMKAMAIENNRLNTPKVIAKLRVSVRASSTLTRPSDESSFSSSSPCKRRKLSGYSWVGDETSTSN

SEQ ID NO: 22893 - protein, 328 aa, Arabidopsis thaliana
  peptide (1)..(328): Ceres Seq. ID no. 13497449
MSVSFSNDMDLFCGEDSGVFSGESTVDFSSSEVDSWPGDSIACFIEDERHFVPGHDYLSRFQTRSLDASAREDSVAWILKVQAYYNFQPLTAYLAVNYMDRFLYARRLPETSGWPMQLLAVACLSLAAKMEEILVPSLFDFQVAGVKYLFEAKTIKRMELLVLSVLDWRLRSVTPFDFISFFAYKIDPSGTFLGFFISHATEIILSNIKEASFLEYWPSSIAAAAILCVANELPSLSSVVNPHESPETWCDGLSKEKIVRCYRLMKAMAIENNRLNTPKVIAKLRVSVRASSTLTRPSDESSFSSSSPCKRRKLSGYSWVGDETSTSN

SEQ ID NO: 22894 - protein, 320 aa, Arabidopsis thaliana
  peptide (1)..(320): Ceres Seq. ID no. 13497450
MDLFCGEDSGVFSGESTVDFSSSEVDSWPGDSIACFIEDERHFVPGHDYLSRFQTRSLDASAREDSVAWILKVQAYYNFQPLTAYLAVNYMDRFLYARRLPETSGWPMQLLAVACLSLAAKMEEILVPSLFDFQVAGVKYLFEAKTIKRMELLVLSVLDWRLRSVTPFDFISFFAYKIDPSGTFLGFFISHATEIILSNIKEASFLEYWPSSIAAAAILCVANELPSLSSVVNPHESPETWCDGLSKEKIVRCYRLMKAMAIENNRLNTPKVIAKLRVSVRASSTLTRPSDESSFSSSSPCKRRKLSGYSWVGDETSTSN

SEQ ID NO: 22895 - DNA, 1298 bp, Arabidopsis thaliana
  misc_feature (1)..(1298): Ceres Seq. ID no. 12339159
  misc_feature (1)..(1298): Ortholog of  Ceres SEQ ID NO 13495070 as cited in SEQ ID NO 53216
  misc_feature (1)..(1298): Ortholog of  Ceres SEQ ID NO 15176717 as cited in SEQ ID NO 0
aaaaaaagagacttaaaactctctctctctctctcttggtcttcctcactcttaacgaaaatggactctttaacactcttcttcaccggtgcactcgtcgccgtcggtatctactggttcctctgcgttctcggtccagcagagcgtaaaggcaaacgagccgtagatctctctggtggctcaatctccgccgagaaagtccaagacaactacaaacagtactggtctttcttccgccgtccaaaagaaatcgaaaccgccgagaaagttccagacttcgtcgacacattctacaatctcgtcaccgacatatacgagtggggatggggacaatccttccacttctcaccatcaatccccggaaaatctcacaaagacgccacgcgcctccacgaagagatggccgtagatctgatccaagtcaaacctggtcaaaagatcctagacgtcggatgcggtgtcggcggtccgatgcgagcgattgcatctcactcgcgagctaacgtagtcgggattacaataacgagtatcaggtgaacagagctcgtctccacaataagaaagctggtctcgacgcgctttgcgaggtcgtgtgtggtaacttcctccagatgccgttcgatgacaacagtttcgacggtgcttattccatcgaagccacgtgtcacgcgccgaagctggaagaagtgtacgcagagatctacagggtgttgaaacccggatctatgtatgtgtcgtacgagtgggttacgacggagaaatttaaggcggaggatgacgaacacgtggaggtaatccaagggattgagagaggcgatgcgttaccagggcttagggcttacgtggatatagctgagacggctaaaaaggttgggtttgagatagtgaaggagaaggatctggcgagtccaccggctgagccgtggtggactaggcttaagatgggtaggcttgcttattggaggaatcacattgtggttcagattttgtcagcggttggagttgctcctaaaggaactgttgatgttcatgagatgttgtttaagactgctgattatttgaccagaggaggtgaaaccggaatattctctccgatgcatatgattctctgcagaaaaccggagtcaccggaggagagttcttgagaaaggtagaaaggaaacatcaccggaaaaagtatggagaattttctcaatttgtttttatttttaagttaaatcaacttggttattgtactatttttgtgttttaatttggtttgtgtttcaagaattattagtttttttttgttttgttgc

SEQ ID NO: 22896 - protein, 178 aa, Arabidopsis thaliana
  peptide (1)..(178): Ceres Seq. ID no. 12339161
KKRDLKLSLSLSWSSSLLTKMDSLTLFFTGALVAVGIYWFLCVLGPAERKGKRAVDLSGGSISAEKVQDNYKQYWSFFRRPKEIETAEKVPDFVDTFYNLVTDIYEWGWGQSFHFSPSIPGKSHKDATRLHEEMAVDLIQVKPGQKILDVGCGVGGPMRAIASHSRANVVGITITSIR

SEQ ID NO: 22897 - protein, 177 aa, Arabidopsis thaliana
  peptide (1)..(177): Ceres Seq. ID no. 12339162
MPFDDNSFDGAYSIEATCHAPKLEEVYAEIYRVLKPGSMYVSYEWVTTEKFKAEDDEHVEVIQGIERGDALPGLRAYVDIAETAKKVGFEIVKEKDLASPPAEPWWTRLKMGRLAYWRNHIVVQILSAVGVAPKGTVDVHEMLFKTADYLTRGGETGIFSPMHMILCRKPESPEESS

SEQ ID NO: 22898 - protein, 158 aa, Arabidopsis thaliana
  peptide (1)..(158): Ceres Seq. ID no. 12339163
MDSLTLFFTGALVAVGIYWFLCVLGPAERKGKRAVDLSGGSISAEKVQDNYKQYWSFFRRPKEIETAEKVPDFVDTFYNLVTDIYEWGWGQSFHFSPSIPGKSHKDATRLHEEMAVDLIQVKPGQKILDVGCGVGGPMRAIASHSRANVVGITITSIR

SEQ ID NO: 22899 - DNA, 1111 bp, Arabidopsis thaliana
  misc_feature (1)..(1111): Ceres Seq. ID no. 12327170
  misc_feature (1)..(1111): Ortholog of  Ceres SEQ ID NO 12593170 as cited in SEQ ID NO 63263
  misc_feature (1)..(1111): Ortholog of  Ceres SEQ ID NO 14301882 as cited in SEQ ID NO 64381
  misc_feature (1)..(1111): Ortholog of  Ceres SEQ ID NO 13597851 as cited in SEQ ID NO 64869
  misc_feature (1)..(1111): Ortholog of  Ceres SEQ ID NO 13662420 as cited in SEQ ID NO 68680
atcagtttgctttcacagtggagtcggtgctctcttttttttcttctctctttcttttcacctctcgccggatcccggcgatcttataggaggcaaatctatcagtatcgttattctaggatctctaacaaacaatgaatcgccaccacgatcccaatcctttcgatgaggacgaagaaatcgtcaatcctttttcgaaaggtggtggaagggttcctgctgcatctaggccagttgaatatggtcaaagccttgatgctactgttgatattccattggataatatgaatgactcttcacagaaacagagaaagcttgctgactgggaagctgagctcaggaagaaagaaatggatataaagcgaagagaggaagctattgctaaatttggtgtgcagatagatgataaaaactggccaccgtttttcccaatcatacaccatgacattgctaaagagataccagttcatgcacaaaagctgcagtatctggctttcgctagttggttaggtatcgttctgtgtctggtattcaatgtcattgcaacgatggtctgctggattaaaggcggaggtgttaaaatctttttcctggccacaatatatgcattgatcggatgtccactctcttatgtactatggtacaggccactctaccgagccatgaggactgacagtgctttgaagtttggttggtttttcttcacctacttgattcacattggcttctgcatcgttgctgccatcgcccctccaatctttttccatggaaaatcattaacgggtgtgcttgcagcaattgatgtcatctcagacagtttattagctgggatcttctactttatcggattcggtctcttctgcttggagtcactgctgagtctatgggttcttcagaaaatttacctctactttaggggaaacaagtgaaaaggagataaagaggaagatgatggtaattttcccttacgatataaggtctgaaatatgtgtatctcctatgaatgtaattaccattttaccgtttgatgcgttgtgttgattgaggtaaattctttagttactatagtagcaagagagagtggttgttcggccatttctttatgtttttt

SEQ ID NO: 22900 - protein, 264 aa, Arabidopsis thaliana
  peptide (1)..(264): Ceres Seq. ID no. 12327171
MNRHHDPNPFDEDEEIVNPFSKGGGRVPAASRPVEYGQSLDATVDIPLDNMNDSSQKQRKLADWEAELRKKEMDIKRREEAIAKFGVQIDDKNWPPFFPIIHHDIAKEIPVHAQKLQYLAFASWLGIVLCLVFNVIATMVCWIKGGGVKIFFLATIYALIGCPLSYVLWYRPLYRAMRTDSALKFGWFFFTYLIHIGFCIVAAIAPPIFFHGKSLTGVLAAIDVISDSLLAGIFYFIGFGLFCLESLLSLWVLQKIYLYFRGNK

SEQ ID NO: 22901 - protein, 214 aa, Arabidopsis thaliana
  peptide (1)..(214): Ceres Seq. ID no. 12327172
MNDSSQKQRKLADWEAELRKKEMDIKRREEAIAKFGVQIDDKNWPPFFPIIHHDIAKEIPVHAQKLQYLAFASWLGIVLCLVFNVIATMVCWIKGGGVKIFFLATIYALIGCPLSYVLWYRPLYRAMRTDSALKFGWFFFTYLIHIGFCIVAAIAPPIFFHGKSLTGVLAAIDVISDSLLAGIFYFIGFGLFCLESLLSLWVLQKIYLYFRGNK

SEQ ID NO: 22902 - protein, 192 aa, Arabidopsis thaliana
  peptide (1)..(192): Ceres Seq. ID no. 12327173
MDIKRREEAIAKFGVQIDDKNWPPFFPIIHHDIAKEIPVHAQKLQYLAFASWLGIVLCLVFNVIATMVCWIKGGGVKIFFLATIYALIGCPLSYVLWYRPLYRAMRTDSALKFGWFFFTYLIHIGFCIVAAIAPPIFFHGKSLTGVLAAIDVISDSLLAGIFYFIGFGLFCLESLLSLWVLQKIYLYFRGNK

SEQ ID NO: 22903 - DNA, 1894 bp, Arabidopsis thaliana
  misc_feature (1)..(1894): Ceres Seq. ID no. 12327192
  misc_feature (1)..(1894): Ortholog of  Ceres SEQ ID NO 15176035 as cited in SEQ ID NO 0
atggactccaatttctctgatcattccctctaatttcggatttttgcatcttctccgatcatcttcaccactatgggtgcttcatcttctacagacgacaaagaatcatcggagaaacgagaaatcgaaagccttgctgcttcaaccggagctcttcctctgcttaaacgatccttctccaaactcgtcgattctcaaaccaatactgttccttttcaatccttgaagcaaagttttggtttgagctacgatacaattactactgaaggagagcaaaaagtttcagacttgtttcccaaattgttggagcatttaggatcatctttagtagatttgttcttcgtgcctgataaagaaggattgagttgggttgagtttgctagtggttatgtcaaatgttgtggaagaatgtcgaattcgatgtctttcaacactttgttgagagtttactatgtgacagctaaaaatgcaggcttttctccaaagcttgagtttgaatctgatgaagctgattgtaagattaacgggtcgatttcggttagtgaattgcttgtgtttctttggatgtgttggacaatgtcttgggatggtcgaagctctaaagctgctgaaatgaaagggtgtttgtttcttccggatattagtcatttgattctatcagcagtggtgtcttgcactgattctgaatctggaaatagtttggatgtttgggagactgatgtttctggtttagaacttgaacttcctatcgggaaattcttaacgtgggctttgatgacagttccttgcctcactgagtgcctttctcacttttgtaactcgaggcttcaaaatgtgacaagtgcagaggatggatctggaccttcaaagtccactgctgtagatgattctgcgtccaagacaagcgaaaacacccttctaacatgtggaagggcatgggcgatttctttgacgagcaaaagtacaataagcgaggagattttgagctcatgttttcccggcaatagcggtgaaccaaatgaacatcttctataccgctcatattatcacgggaaaggcatgaatcgactgtggtccaacgttgaagggtatcatgctcctatactagtgataatttctgcaagttgtaaagtcgaacatgaggctacttcaagcgagaggaagtgggtcattggtgcaatcttgcagcaaggttttgagaacagagatgcattttatggaagctctgggaacttgttctccataagtccagtctttcacgcattctcatcttctggtaaggagaaaaactttgcgtatagccatctgcaccctgctggcggagtgtacgacgcacatcccaagcctgttggaattggattcgggggaacacttggaaatgagagaattttcattgatgaagactttgctaaaatcacagtccgtcatcatgcagttgataaaacttaccagtcaggctctcttttcccaaaccagggttatttaccagtagaggctttggttctagatattgaagcatgggggttaggtggaaacaaggctagggaaattcaacaaaaataccagaaaagagaagagcttttcactaaccaacgtcgaaagatcgacttgaaaacgtttacgaactgggaagattcacctgagaaaatgatgatggatatgatgggtaatcctaatgctcctagaaaggaagagaggtaatgaatgaaagacgagaactggtttgatatatacacacatatacgttgttgtctcttaaaatatatatgcaagaaactcttttgctgttcatgagctcttggattcaatgtgtaagttatgtatactagtgttgccaaaacttgaaccagccagttgatttgatatttgcctataaaaattggtttttattccc

SEQ ID NO: 22904 - protein, 542 aa, Arabidopsis thaliana
  peptide (1)..(542): Ceres Seq. ID no. 12327193
MGASSSTDDKESSEKREIESLAASTGALPLLKRSFSKLVDSQTNTVPFQSLKQSFGLSYDTITTEGEQKVSDLFPKLLEHLGSSLVDLFFVPDKEGLSWVEFASGYVKCCGRMSNSMSFNTLLRVYYVTAKNAGFSPKLEFESDEADCKINGSISVSELLVFLWMCWTMSWDGRSSKAAEMKGCLFLPDISHLILSAVVSCTDSESGNSLDVWETDVSGLELELPIGKFLTWALMTVPCLTECLSHFCNSRLQNVTSAEDGSGPSKSTAVDDSASKTSENTLLTCGRAWAISLTSKSTISEEILSSCFPGNSGEPNEHLLYRSYYHGKGMNRLWSNVEGYHAPILVIISASCKVEHEATSSERKWVIGAILQQGFENRDAFYGSSGNLFSISPVFHAFSSSGKEKNFAYSHLHPAGGVYDAHPKPVGIGFGGTLGNERIFIDEDFAKITVRHHAVDKTYQSGSLFPNQGYLPVEALVLDIEAWGLGGNKAREIQQKYQKREELFTNQRRKIDLKTFTNWEDSPEKMMMDMMGNPNAPRKEER

SEQ ID NO: 22905 - protein, 430 aa, Arabidopsis thaliana
  peptide (1)..(430): Ceres Seq. ID no. 12327194
MSNSMSFNTLLRVYYVTAKNAGFSPKLEFESDEADCKINGSISVSELLVFLWMCWTMSWDGRSSKAAEMKGCLFLPDISHLILSAVVSCTDSESGNSLDVWETDVSGLELELPIGKFLTWALMTVPCLTECLSHFCNSRLQNVTSAEDGSGPSKSTAVDDSASKTSENTLLTCGRAWAISLTSKSTISEEILSSCFPGNSGEPNEHLLYRSYYHGKGMNRLWSNVEGYHAPILVIISASCKVEHEATSSERKWVIGAILQQGFENRDAFYGSSGNLFSISPVFHAFSSSGKEKNFAYSHLHPAGGVYDAHPKPVGIGFGGTLGNERIFIDEDFAKITVRHHAVDKTYQSGSLFPNQGYLPVEALVLDIEAWGLGGNKAREIQQKYQKREELFTNQRRKIDLKTFTNWEDSPEKMMMDMMGNPNAPRKEER

SEQ ID NO: 22906 - protein, 426 aa, Arabidopsis thaliana
  peptide (1)..(426): Ceres Seq. ID no. 12327195
MSFNTLLRVYYVTAKNAGFSPKLEFESDEADCKINGSISVSELLVFLWMCWTMSWDGRSSKAAEMKGCLFLPDISHLILSAVVSCTDSESGNSLDVWETDVSGLELELPIGKFLTWALMTVPCLTECLSHFCNSRLQNVTSAEDGSGPSKSTAVDDSASKTSENTLLTCGRAWAISLTSKSTISEEILSSCFPGNSGEPNEHLLYRSYYHGKGMNRLWSNVEGYHAPILVIISASCKVEHEATSSERKWVIGAILQQGFENRDAFYGSSGNLFSISPVFHAFSSSGKEKNFAYSHLHPAGGVYDAHPKPVGIGFGGTLGNERIFIDEDFAKITVRHHAVDKTYQSGSLFPNQGYLPVEALVLDIEAWGLGGNKAREIQQKYQKREELFTNQRRKIDLKTFTNWEDSPEKMMMDMMGNPNAPRKEER

SEQ ID NO: 22907 - DNA, 1670 bp, Arabidopsis thaliana
  misc_feature (1)..(1670): Ceres Seq. ID no. 12334991
  misc_feature (1)..(1670): Ortholog of  Ceres SEQ ID NO 13662164 as cited in SEQ ID NO 67158
atcttcaaatgaaaatcgctgggctctcgctgtcaacgctgggcgtgagtgagatctaacaatcggtagcgaattttgtaaattttgttccggttttgaagtctcaatctcggggttccggttttagcaactacttcttctgacatttcagctgttctagttgatctttatatactttatatgatctgggattttgaagagtttttagggaggaaccaaaatttctgagagagaaaaatgaagttatcgagctgcgttttgatcttccttctatgtaacacattctcctcgatttctgctttccgtctgagtcggagtcaaccaactgagcgaatttcaggtagtgctggtgatgtgttggaagatgatcccgtgggaagactgaaagtctttgtttatgagcttccaagtaaatacaacaagaagatacttcagaaggatccgagatgtctaaaccacatgtttgctgctgagatatatatgcaacggtttcttttatctagcccagttcgaacacttaatcccgaggaagctgattggttctacgtacctgtgtacaccacttgtgatctcacgcctaatgggcttcctcttccttttaaatctccacgaatgatgagaagtgccattcagcttattgcttccaattggccatactggaatcgcacagaaggagcagaccacttctttgttgtgcctcatgactttggagcctgtttccattatcaagaagagaaggcaataggaagaggaatactacccttgcttcaacgagctacactggtgcagacatttggacaaaggaatcatgtttgcttgaaagaaggttcaatcactgttcctccatatgctccaccacagaagatgcagtcacacttaattcccgaaaaaactcctcgatccatcttcgtttatttcagaggattgttttatgatgtgggaaatgaccctgagggtggttattatgcgaggggtgcaagagcagctgtatgggaaaacttcaaagacaatccgctgtttgacatctcaacagagcacccaacaacatattatgaggacatgcagagagcaatcttctgcctatgcccacttggatgggccccatggagtccaagactggtggaagcagtgatattcggttgcatccctgtgatcatagcagacgacatcgtgttaccttttgcagatgcaatcccttgggaagatattggtgtgtttgtggatgagaaagatgtcccttacctggacacaatactcacatcgatcccaccagaggttatactgagaaaacagaggttgttggcaaacccgtcgatgaaacaagccatgctgttcccgcaaccggctcaaccaggggatgcgtttcatcaagtattgaatgggttggctcgtaagctgcctcatgagaggagtgtgtatctgagaccaggtgagaagctgttgaactggacggcaggaccggtcgctgatctgaaaccttggtaaggaccagtgttggaatttgattgaatgagctattgtttggttggtttctgtcttctcgtgtctgtattttgtagaatcataacttttttttgctatgtagaagggaaaaagctttgtcattgtaatgtaactagaatccttttgacatctcacgagaaagacaagtaaaagaaaaattattgttg

SEQ ID NO: 22908 - protein, 415 aa, Arabidopsis thaliana
  peptide (1)..(415): Ceres Seq. ID no. 12334992
MKLSSCVLIFLLCNTFSSISAFRLSRSQPTERISGSAGDVLEDDPVGRLKVFVYELPSKYNKKILQKDPRCLNHMFAAEIYMQRFLLSSPVRTLNPEEADWFYVPVYTTCDLTPNGLPLPFKSPRMMRSAIQLIASNWPYWNRTEGADHFFVVPHDFGACFHYQEEKAIGRGILPLLQRATLVQTFGQRNHVCLKEGSITVPPYAPPQKMQSHLIPEKTPRSIFVYFRGLFYDVGNDPEGGYYARGARAAVWENFKDNPLFDISTEHPTTYYEDMQRAIFCLCPLGWAPWSPRLVEAVIFGCIPVIIADDIVLPFADAIPWEDIGVFVDEKDVPYLDTILTSIPPEVILRKQRLLANPSMKQAMLFPQPAQPGDAFHQVLNGLARKLPHERSVYLRPGEKLLNWTAGPVADLKPW

SEQ ID NO: 22909 - protein, 341 aa, Arabidopsis thaliana
  peptide (1)..(341): Ceres Seq. ID no. 12334993
MFAAEIYMQRFLLSSPVRTLNPEEADWFYVPVYTTCDLTPNGLPLPFKSPRMMRSAIQLIASNWPYWNRTEGADHFFVVPHDFGACFHYQEEKAIGRGILPLLQRATLVQTFGQRNHVCLKEGSITVPPYAPPQKMQSHLIPEKTPRSIFVYFRGLFYDVGNDPEGGYYARGARAAVWENFKDNPLFDISTEHPTTYYEDMQRAIFCLCPLGWAPWSPRLVEAVIFGCIPVIIADDIVLPFADAIPWEDIGVFVDEKDVPYLDTILTSIPPEVILRKQRLLANPSMKQAMLFPQPAQPGDAFHQVLNGLARKLPHERSVYLRPGEKLLNWTAGPVADLKPW

SEQ ID NO: 22910 - protein, 334 aa, Arabidopsis thaliana
  peptide (1)..(334): Ceres Seq. ID no. 12334994
MQRFLLSSPVRTLNPEEADWFYVPVYTTCDLTPNGLPLPFKSPRMMRSAIQLIASNWPYWNRTEGADHFFVVPHDFGACFHYQEEKAIGRGILPLLQRATLVQTFGQRNHVCLKEGSITVPPYAPPQKMQSHLIPEKTPRSIFVYFRGLFYDVGNDPEGGYYARGARAAVWENFKDNPLFDISTEHPTTYYEDMQRAIFCLCPLGWAPWSPRLVEAVIFGCIPVIIADDIVLPFADAIPWEDIGVFVDEKDVPYLDTILTSIPPEVILRKQRLLANPSMKQAMLFPQPAQPGDAFHQVLNGLARKLPHERSVYLRPGEKLLNWTAGPVADLKPW

SEQ ID NO: 22911 - DNA, 1246 bp, Arabidopsis thaliana
  misc_feature (1)..(1246): Ceres Seq. ID no. 12334716
  misc_feature (1)..(1246): Ortholog of  Ceres SEQ ID NO 14309314 as cited in SEQ ID NO 0
gatccaaccagagccatcatcatccttccaatggctattacttgagaactcttctgattaaacatagcaacaacaacaactcttcttctcctctctttctcacttcaatttagcgatggctgcaactgcaatctcttctctttccttcccagctttgggtcaatcggacaagatctccaatttcgcatcttctcgtcctctcgcctccgcaattcgcatctgcacaaagttttctcgcctttctttgaattcgcgttccacttcgaaatctcttattcactgcatgtccaatgttaccgccgatgtgcctcctgtatcagagacaaagtcgaaattcctaaaagcttacaagcgacccatcccgagtatctacaacacggttttgcaggagctcattgtccagcagcatttgatgaggtataagaagacttatcgttatgatcctgtttttgcccttggatttgtcactgtatatgatcagctcatggaaggatatccgagtgatcaagaccgagatgccatttttaaggcttacattgaagccttgaatgaggatcctaagcaataccgaattgatgctcagaagatggaggaatgggcacgaagtcagacttctgcttcactagttgacttttcctctaaagaaggagatattgaagcagttcttaaggacattgcaggaagagctggtagtaaggaggggtttagttacagcaggttcttcgctgttgggctctttcgtttgcttgagcttgcaagtgctactgatccaactgtcttggacaagctttgtgcatccctaaatatcaacaagaaaagcgtggatcgggacctggatgtgtatcgtaacctgctttcaaagcttgtccaagccaatgaattgcttaaggagtatgtcgagagggagaagaagaagcaagaagaaagagcccaatctcagaaggctaacgaaacaatctccaagtgtctgggagatactctatataacccatctttcttggttgaacggaaatcttagaaaatcatttgtgacttctttttttgttttcttagcaacaactatgcccaagaacatatatatctcatttctaagaacatttcagacgtgtatatgtttgctttttttcctttcaattacatgagtttacataatgttgattcatgtagtattttatacattgatgaggttactgttgtgctgttactagtatatgacaagtttctttaagatttaggcactgtctcc

SEQ ID NO: 22912 - protein, 300 aa, Arabidopsis thaliana
  peptide (1)..(300): Ceres Seq. ID no. 12334717
MAATAISSLSFPALGQSDKISNFASSRPLASAIRICTKFSRLSLNSRSTSKSLIHCMSNVTADVPPVSETKSKFLKAYKRPIPSIYNTVLQELIVQQHLMRYKKTYRYDPVFALGFVTVYDQLMEGYPSDQDRDAIFKAYIEALNEDPKQYRIDAQKMEEWARSQTSASLVDFSSKEGDIEAVLKDIAGRAGSKEGFSYSRFFAVGLFRLLELASATDPTVLDKLCASLNINKKSVDRDLDVYRNLLSKLVQANELLKEYVEREKKKQEERAQSQKANETISKCLGDTLYNPSFLVERKS

SEQ ID NO: 22913 - protein, 244 aa, Arabidopsis thaliana
  peptide (1)..(244): Ceres Seq. ID no. 12334718
MSNVTADVPPVSETKSKFLKAYKRPIPSIYNTVLQELIVQQHLMRYKKTYRYDPVFALGFVTVYDQLMEGYPSDQDRDAIFKAYIEALNEDPKQYRIDAQKMEEWARSQTSASLVDFSSKEGDIEAVLKDIAGRAGSKEGFSYSRFFAVGLFRLLELASATDPTVLDKLCASLNINKKSVDRDLDVYRNLLSKLVQANELLKEYVEREKKKQEERAQSQKANETISKCLGDTLYNPSFLVERKS

SEQ ID NO: 22914 - protein, 201 aa, Arabidopsis thaliana
  peptide (1)..(201): Ceres Seq. ID no. 12334719
MRYKKTYRYDPVFALGFVTVYDQLMEGYPSDQDRDAIFKAYIEALNEDPKQYRIDAQKMEEWARSQTSASLVDFSSKEGDIEAVLKDIAGRAGSKEGFSYSRFFAVGLFRLLELASATDPTVLDKLCASLNINKKSVDRDLDVYRNLLSKLVQANELLKEYVEREKKKQEERAQSQKANETISKCLGDTLYNPSFLVERKS

SEQ ID NO: 22915 - DNA, 1277 bp, Arabidopsis thaliana
  misc_feature (1)..(1277): Ceres Seq. ID no. 12334866
  misc_feature (1)..(1277): Ortholog of  Ceres SEQ ID NO 14302146 as cited in SEQ ID NO 0
atctgaaaccaatctgttcatatgatgaagaagtttctctcgttctcctccaacgcgtagaaaattctgacggcttaacgatgtggcgaagatctgttgtttctcgtttctcttcaagaatctctgtttcttcttcgttaccaaaccctagactgattccttggtcccgcgaattatgtgccgttaatagcttctcccagcctccggtctcgacggaatcaactgctaagttagggatcactggtgttagatctgatgccaatcgagtttttgccactgctactgccgccgctacagctacagctaccaccggtgagatttcgtctagagttgcggctttggctggattagggcatcactacgctcgttgttattgggagctttctaaagctaaacttagtatgcttgtggttgcaacttctggaactgggtatattctgggtacgggaaatgctgcaattagcttcccggggctttgttacacatgtgcaggaaccatgatgattgctgcatctgctaattccttgaatcagatttttgagataagcaatgattctaagatgaaaagaacgatgctaaggccattgccttcaggacgtattagtgttccacacgctgttgcatgggctactattgctggtgcttctggtgcttgtttgttggccagcaagactaatatgttggctgctggacttgcatctgccaatcttgtactttatgcgtttgtttatactccgttgaagcaacttcaccctatcaatacatgggttggcgctgttgttggtgctatcccacccttgcttgggtgggcggcagcgtctggtcagatttcatacaattcgatgattcttccagctgctctttacttttggcagatacctcattttatggcccttgcacatctctgccgcaatgattatgcagctggaggttacaagatgttgtcactctttgatccgtcagggaagagaatagcagcagtggctctaaggaactgcttttacatgatccctctcggtttcatcgcctatgactgggggttaacctcaagttggttttgcctcgaatcaacacttctcacactagcaatcgctgcaacagcattttcattctactctccatgataacctttaagcaagctattgaatttttggaaacagaaattaaaaaaaaaatctgaaaagttcttaagtttaatctttggttaataatgaagtggagaacgcatacaagtttatgtattttttctcatctccacataattgtattttttctcc

SEQ ID NO: 22916 - protein, 373 aa, Arabidopsis thaliana
  peptide (1)..(373): Ceres Seq. ID no. 12334867
LKPICSYDEEVSLVLLQRVENSDGLTMWRRSVVSRFSSRISVSSSLPNPRLIPWSRELCAVNSFSQPPVSTESTAKLGITGVRSDANRVFATATAAATATATTGEISSRVAALAGLGHHYARCYWELSKAKLSMLVVATSGTGYILGTGNAAISFPGLCYTCAGTMMIAASANSLNQIFEISNDSKMKRTMLRPLPSGRISVPHAVAWATIAGASGACLLASKTNMLAAGLASANLVLYAFVYTPLKQLHPINTWVGAVVGAIPPLLGWAAASGQISYNSMILPAALYFWQIPHFMALAHLCRNDYAAGGYKMLSLFDPSGKRIAAVALRNCFYMIPLGFIAYDWGLTSSWFCLESTLLTLAIAATAFSFYSP

SEQ ID NO: 22917 - protein, 347 aa, Arabidopsis thaliana
  peptide (1)..(347): Ceres Seq. ID no. 12334868
MWRRSVVSRFSSRISVSSSLPNPRLIPWSRELCAVNSFSQPPVSTESTAKLGITGVRSDANRVFATATAAATATATTGEISSRVAALAGLGHHYARCYWELSKAKLSMLVVATSGTGYILGTGNAAISFPGLCYTCAGTMMIAASANSLNQIFEISNDSKMKRTMLRPLPSGRISVPHAVAWATIAGASGACLLASKTNMLAAGLASANLVLYAFVYTPLKQLHPINTWVGAVVGAIPPLLGWAAASGQISYNSMILPAALYFWQIPHFMALAHLCRNDYAAGGYKMLSLFDPSGKRIAAVALRNCFYMIPLGFIAYDWGLTSSWFCLESTLLTLAIAATAFSFYSP

SEQ ID NO: 22918 - protein, 240 aa, Arabidopsis thaliana
  peptide (1)..(240): Ceres Seq. ID no. 12334869
MLVVATSGTGYILGTGNAAISFPGLCYTCAGTMMIAASANSLNQIFEISNDSKMKRTMLRPLPSGRISVPHAVAWATIAGASGACLLASKTNMLAAGLASANLVLYAFVYTPLKQLHPINTWVGAVVGAIPPLLGWAAASGQISYNSMILPAALYFWQIPHFMALAHLCRNDYAAGGYKMLSLFDPSGKRIAAVALRNCFYMIPLGFIAYDWGLTSSWFCLESTLLTLAIAATAFSFYSP

SEQ ID NO: 22919 - DNA, 1205 bp, Arabidopsis thaliana
  misc_feature (1)..(1205): Ceres Seq. ID no. 12327635
  misc_feature (1)..(1205): Ortholog of  Ceres SEQ ID NO 15174863 as cited in SEQ ID NO 51281
  misc_feature (1)..(1205): Ortholog of  Ceres SEQ ID NO 12614972 as cited in SEQ ID NO 61986
  misc_feature (1)..(1205): Ortholog of  Ceres SEQ ID NO 12625706 as cited in SEQ ID NO 64144
  misc_feature (1)..(1205): Ortholog of  Ceres SEQ ID NO 13584933 as cited in SEQ ID NO 65009
  misc_feature (1)..(1205): Ortholog of  Ceres SEQ ID NO 12634984 as cited in SEQ ID NO 0
  misc_feature (1)..(1205): Ortholog of  Ceres SEQ ID NO 13599377 as cited in SEQ ID NO 0
acaacactcgacacagaagcaaaaacaaaaatgggtgagaaagatattccaaggaacttgaaggaagaagaagaaaaccaaagtgaagattccaaaagtttgatctcttcacttccttcagacatagattgctctgggaccaagttgtacaagtatcaaggatgttggtacgataaagacattctccaagcaatcctcaaattcaacaaaatctttcagccacaagaaaccgatataattgttgcttctttccccaaatcaggtacgacttggctcaaggcactcacattcgcactcgctcaaagatcaaaacatacttcagaaaatcatcctctgctaactcataatcctcatgagctagtgccgtacctcgagctcgatctttatctcaaaagctcgaaaccggatatgtccaagttaccatcatcatctccgagattgttctcaacccacatgtctttcgatgcgcttaaagtaccaatgaaggagactccttgcaagatagtgtatgtgtgcaggaacgtaaaagacgtgttggtatcactttggtgtttcgaaaactccattagtggagaaaacaatttaagtctcgaggctttgttcgagtctttatgtagcggagttaacttatgcggtcccttgtgggaaaatgtgttaggctattggagaggaagcttggaagatcctaagcatgtgcttttcttgaggtacgaggagttgaagacggagcctcgtgtgcaaatcaagagacttgcagagttcttagattttccattcacaaaggaagaagaagatagtggaggtgtagacaagatcttggaactttgttctctaagaaaccttagcggtttggagatcaacaaaacaggaagcttgtcggaaggagtaagtttcaagagttttttccgtaaaggggaagttggtgattggaagagttatatgactcctgaaatggaaaacaaaatcgacatgattgttgaggagaaacttcaaggctctggtttgatattgtagagttcatatctctatgtatatgtgaacaggtttaatctcaaacctaataatgctggtttgttcttttcttgtatgcaatgtaataaaagttactttgatgtaaggttaagagtttaagattctgagcgatgtgtcgtttttgtttcctttgataatcaataaagctagcggcttttcttcttcgccaaggc

SEQ ID NO: 22920 - protein, 337 aa, Arabidopsis thaliana
  peptide (1)..(337): Ceres Seq. ID no. 12327636
TTLDTEAKTKMGEKDIPRNLKEEEENQSEDSKSLISSLPSDIDCSGTKLYKYQGCWYDKDILQAILKFNKIFQPQETDIIVASFPKSGTTWLKALTFALAQRSKHTSENHPLLTHNPHELVPYLELDLYLKSSKPDMSKLPSSSPRLFSTHMSFDALKVPMKETPCKIVYVCRNVKDVLVSLWCFENSISGENNLSLEALFESLCSGVNLCGPLWENVLGYWRGSLEDPKHVLFLRYEELKTEPRVQIKRLAEFLDFPFTKEEEDSGGVDKILELCSLRNLSGLEINKTGSLSEGVSFKSFFRKGEVGDWKSYMTPEMENKIDMIVEEKLQGSGLIL

SEQ ID NO: 22921 - protein, 327 aa, Arabidopsis thaliana
  peptide (1)..(327): Ceres Seq. ID no. 12327637
MGEKDIPRNLKEEEENQSEDSKSLISSLPSDIDCSGTKLYKYQGCWYDKDILQAILKFNKIFQPQETDIIVASFPKSGTTWLKALTFALAQRSKHTSENHPLLTHNPHELVPYLELDLYLKSSKPDMSKLPSSSPRLFSTHMSFDALKVPMKETPCKIVYVCRNVKDVLVSLWCFENSISGENNLSLEALFESLCSGVNLCGPLWENVLGYWRGSLEDPKHVLFLRYEELKTEPRVQIKRLAEFLDFPFTKEEEDSGGVDKILELCSLRNLSGLEINKTGSLSEGVSFKSFFRKGEVGDWKSYMTPEMENKIDMIVEEKLQGSGLIL

SEQ ID NO: 22922 - protein, 201 aa, Arabidopsis thaliana
  peptide (1)..(201): Ceres Seq. ID no. 12327638
MSKLPSSSPRLFSTHMSFDALKVPMKETPCKIVYVCRNVKDVLVSLWCFENSISGENNLSLEALFESLCSGVNLCGPLWENVLGYWRGSLEDPKHVLFLRYEELKTEPRVQIKRLAEFLDFPFTKEEEDSGGVDKILELCSLRNLSGLEINKTGSLSEGVSFKSFFRKGEVGDWKSYMTPEMENKIDMIVEEKLQGSGLIL

SEQ ID NO: 22923 - DNA, 1041 bp, Arabidopsis thaliana
  misc_feature (1)..(1041): Ceres Seq. ID no. 12370421
  misc_feature (1)..(1041): Ortholog of  Ceres SEQ ID NO 13597604 as cited in SEQ ID NO 65175
ttttacgtttcttgatcatcttattgaactgggtttgatctaaagttgtattgatgggttctgaaggaccaacgggtgtgacgattcatatcacagggttcaagaagttccatggagtagctgagaatcctacagagaaaatggctaacaatttgaaagaatatttggctaagaattgtgtttcgaaagatgtgaatcttggaagttgtactgtgcttgagactgctggtcaaggagctcttgcttctctctatcagttgctacaatccgcggttaacacaaaagagtcagagtcgttgaccggaaaaaccatatgggttcactttggagttaatagtggcgctacaaaatttgcaattgagcaacaagctgtgaatgaagcgacttttcgttgtcctgatgaattgggttggaaacctcagaatttgccaattgttccctctgatggtccaatctcaactgtaagaaagactaatcttcctgttgaagagataacaaaggcgttggagaagaatggctttgaagtgataacatcagatgatgcaggtcgatttgtgtgtaactatgtctattaccattctctgagatttgcagagcagaataagaccagatcactctttgttcacgttcctcttttcgttgccgtggatgaagaaacccaaatgagattcactgtttctctgctggaggtactcgcttctatttgcaagtaatgttatcccaaatgtggctattcttattcatgaaatgtgcatcatggaccgattgtctccccacgggaaaaattcgcttatcaataaatggaatataagttcacttctctactatctcctcttcatatatgcatcatttcattcaagtttcataaactagattcattttcttcttcaaaagtggtatcaaatgaaaaatgatatatgcctacttgccagtggtgccaatgcaatgagatttggaaatatgcaatctttctgctcaaagtactaatcattttgaggaaaattcaatgtatgaatctgatttaagggtcttcttctgttt

SEQ ID NO: 22924 - protein, 219 aa, Arabidopsis thaliana
  peptide (1)..(219): Ceres Seq. ID no. 12370422
MGSEGPTGVTIHITGFKKFHGVAENPTEKMANNLKEYLAKNCVSKDVNLGSCTVLETAGQGALASLYQLLQSAVNTKESESLTGKTIWVHFGVNSGATKFAIEQQAVNEATFRCPDELGWKPQNLPIVPSDGPISTVRKTNLPVEEITKALEKNGFEVITSDDAGRFVCNYVYYHSLRFAEQNKTRSLFVHVPLFVAVDEETQMRFTVSLLEVLASICK

SEQ ID NO: 22925 - protein, 190 aa, Arabidopsis thaliana
  peptide (1)..(190): Ceres Seq. ID no. 12370423
MANNLKEYLAKNCVSKDVNLGSCTVLETAGQGALASLYQLLQSAVNTKESESLTGKTIWVHFGVNSGATKFAIEQQAVNEATFRCPDELGWKPQNLPIVPSDGPISTVRKTNLPVEEITKALEKNGFEVITSDDAGRFVCNYVYYHSLRFAEQNKTRSLFVHVPLFVAVDEETQMRFTVSLLEVLASICK

SEQ ID NO: 22926 - DNA, 1389 bp, Arabidopsis thaliana
  misc_feature (1)..(1389): Ceres Seq. ID no. 12334720
  misc_feature (1)..(1389): Ortholog of  Ceres SEQ ID NO 14303263 as cited in SEQ ID NO 1224
  misc_feature (1)..(1389): Ortholog of  Ceres SEQ ID NO 13593955 as cited in SEQ ID NO 54278
  misc_feature (1)..(1389): Ortholog of  Ceres SEQ ID NO 13597380 as cited in SEQ ID NO 64054
  misc_feature (1)..(1389): Ortholog of  Ceres SEQ ID NO 12625474 as cited in SEQ ID NO 64169
  misc_feature (1)..(1389): Ortholog of  Ceres SEQ ID NO 13597502 as cited in SEQ ID NO 64681
tttacatccatcgttccaagcttttaaagaagcaatattttttgtgttttgttttaagttttaacacacaaacacattacctcgaattcgatacgtcatagtaattagcaactatggaacgatgtcgttctggtcatcatcgcatcatttcttattatctctcttcttcgttgatactattttggtgtattttcgttctcgtgctgttatctacgacaagtactacaaatgctttagtgaaaatcccgaaaaacacgaccgttccggcggtaatagtgttcggtgattcaattgtcgatgccgggaataacgacgacatgataacagaagctagatgcgattatgctccctacggcattgattttgacggtggagttgctacgggaagattctctaatggcaaagtccctggtgatattgtagcggaagagctagggattaaacccaatataccggcatatcgaaatccgaatttaaaaccagaagagctcttaaccggtgtaacatttgcttctggtggtgctggttatgttcctttgacaaccaaaatagcgggaggaatacctttaccacagcaattgatatattttgaggaatatatagagaaattgaagcaaatggttggagaaaagaggacaaagttcataatcaagaatagcttgttcgttgttatatgtggtagtaacgatatcgccaacgacttctttactctccccccggtccggctacactacaccgtcgcttctttcaccgctcttatggccgacaatgctcgttcttttgctcagacactctatggatatggagcaagaagaatacttgtatttggtgcaccaccaataggatgtgttccttcgcagagaaccgtagcaggaggacctacaagagattgtgttgctaggtttaatgatgcagcaaaacttttcaatactaagctctctgcaaatattgatgtcttgtcaaggactctacaagacccaacaataatctatattgacatctatagtcctcttcttgatctcattttaaaccctcatcaatatggatttaaggtggccaataaaggatgttgcggaaccggattaatagaagttactgcgctatgcaacaactatacagcttctgtatgtcccataagatctgattatgtgttttgggacagttttcatcctactgaaaaagcttacagaattatagttgcaaagcttttggatagatacctcaacagattcttctaatcgatatagctcctatttcttagcatgttccatacacttttaaataatcatttcaactcaaagagagaattacacttctgtcaattttctctttttcaaggcttgtaatggtctcttatgatatttgatggttatatatatacaaggttat

SEQ ID NO: 22927 - protein, 374 aa, Arabidopsis thaliana
  peptide (1)..(374): Ceres Seq. ID no. 12334721
MERCRSGHHRIISYYLSSSLILFWCIFVLVLLSTTSTTNALVKIPKNTTVPAVIVFGDSIVDAGNNDDMITEARCDYAPYGIDFDGGVATGRFSNGKVPGDIVAEELGIKPNIPAYRNPNLKPEELLTGVTFASGGAGYVPLTTKIAGGIPLPQQLIYFEEYIEKLKQMVGEKRTKFIIKNSLFVVICGSNDIANDFFTLPPVRLHYTVASFTALMADNARSFAQTLYGYGARRILVFGAPPIGCVPSQRTVAGGPTRDCVARFNDAAKLFNTKLSANIDVLSRTLQDPTIIYIDIYSPLLDLILNPHQYGFKVANKGCCGTGLIEVTALCNNYTASVCPIRSDYVFWDSFHPTEKAYRIIVAKLLDRYLNRFF

SEQ ID NO: 22928 - protein, 306 aa, Arabidopsis thaliana
  peptide (1)..(306): Ceres Seq. ID no. 12334722
MITEARCDYAPYGIDFDGGVATGRFSNGKVPGDIVAEELGIKPNIPAYRNPNLKPEELLTGVTFASGGAGYVPLTTKIAGGIPLPQQLIYFEEYIEKLKQMVGEKRTKFIIKNSLFVVICGSNDIANDFFTLPPVRLHYTVASFTALMADNARSFAQTLYGYGARRILVFGAPPIGCVPSQRTVAGGPTRDCVARFNDAAKLFNTKLSANIDVLSRTLQDPTIIYIDIYSPLLDLILNPHQYGFKVANKGCCGTGLIEVTALCNNYTASVCPIRSDYVFWDSFHPTEKAYRIIVAKLLDRYLNRFF

SEQ ID NO: 22929 - protein, 206 aa, Arabidopsis thaliana
  peptide (1)..(206): Ceres Seq. ID no. 12334723
MVGEKRTKFIIKNSLFVVICGSNDIANDFFTLPPVRLHYTVASFTALMADNARSFAQTLYGYGARRILVFGAPPIGCVPSQRTVAGGPTRDCVARFNDAAKLFNTKLSANIDVLSRTLQDPTIIYIDIYSPLLDLILNPHQYGFKVANKGCCGTGLIEVTALCNNYTASVCPIRSDYVFWDSFHPTEKAYRIIVAKLLDRYLNRFF

SEQ ID NO: 22930 - DNA, 1907 bp, Arabidopsis thaliana
  misc_feature (1)..(1907): Ceres Seq. ID no. 12325994
  misc_feature (1)..(1907): Ortholog of  Ceres SEQ ID NO 14314108 as cited in SEQ ID NO 63184
acctttcttcttccttcttcatcattcatcattcatcattcatcattctcatatctctcttcttttactggggatcacaatatctatctagttgtaagttgtgaatgatagatcctgagccttcttgccgccacctcttgaacttaatgtacttgaaaccagtctccacatagcgatagagagagagatctgttatgtgtgtattcatcaagttctctttttttgggctcaaagtgtcaaaggagacattttcaattctgagttcttttgttttcttataataaaatctgggttttctgagattttcttcacatcgtccgaaacgtggacacattttgatcttttgggtgtcactgtgtcaataaaggttgaaactttgattacatttctctcaaaaggattaatttttatttctctatctgggtgagatttggattaattggtgaggaatcggaagaaactggcgagattacaagcgattgtgaaatatcagaatctaataagaggaagaagaggcatggcggctcctacagggaaagggccagtgataccaattctaggtttccttacatgtgtggcttttatctatctctcctttggagatttgtggttcggtctcaaaacggagggcgagttagcattcgtgaaacggaatgggacacagtttgtggtcgatggtaaggctctgtatgtgaatggttggaactcttattggttcatggaccatgctgtgaatgatcatagtagacaccgtgtcggagctatgcttgaagctggagctaaaatgggtctcactgtttgtagaacatgggcttttaatgatggaggctacaatgctcttcagatctctcctggtagattcgatgaacgagtctttaaggctttggatcatgtaatcgcagaggccaaaacacatggtgttaggttgcttctgagcttagtgaataacttacaagcttatggagggaagactcagtacgtcaattgggcatggcaagaaggtgtaggcctcagctcctccaatgattccttcttctttgacccatctatccgcagatacttcaagaattatctcacggtgctgctgacccgcaaaaactctttaaccgggattgagtacagaaacgacccaacaatttttgcatgggagttgataaacgagcctcgctgcatgtctgatgtctctggggatactctacaagactggattaacgaaatgacagcattcattaaatcaattgacaacaagcatcttctaaccgttggcttggaagggttctacggtcccaatagccctaaaaagctgacagttaaccccaacggtgggcctctgagcttgggtcagattttgttcgaaactctgattcgccaaacatcgattttgcctcggttcatatctaccctgatcactggtttcacgatcaagggtttgaagaaaaactcaagttcgttgtaaaatggatgctatctcacattgaagatggggacaaggaactgaagaagcctgttctgttcactgagtttggcctctcgaatctgaacaaggactatgatccatcgcagcgggatcggttctacagaaccatctttgatgttatttacaaatcagccaagcggaagcggtctggtgcaggaacactagtgtggcagtttctgatagaaggcatggaaggtttcaacgatgactttggaatagtcccatgggaacaagactccattcagagattaatgattgaacagtcttgcagattgagtcgaatcactggacgccatcttcttgacaaaaagtccatagaaatgtgttcccatagaccatgagaatacagtttctttttttgttcttgcctctcatgtggccatataaccaaactcaaacatttatataaaagagtaaatttaaccttccc

SEQ ID NO: 22931 - protein, 312 aa, Arabidopsis thaliana
  peptide (1)..(312): Ceres Seq. ID no. 12325995
MAAPTGKGPVIPILGFLTCVAFIYLSFGDLWFGLKTEGELAFVKRNGTQFVVDGKALYVNGWNSYWFMDHAVNDHSRHRVGAMLEAGAKMGLTVCRTWAFNDGGYNALQISPGRFDERVFKALDHVIAEAKTHGVRLLLSLVNNLQAYGGKTQYVNWAWQEGVGLSSSNDSFFFDPSIRRYFKNYLTVLLTRKNSLTGIEYRNDPTIFAWELINEPRCMSDVSGDTLQDWINEMTAFIKSIDNKHLLTVGLEGFYGPNSPKKLTVNPNGGPLSLGQILFETLIRQTSILPRFISTLITGFTIKGLKKNSSSL

SEQ ID NO: 22932 - protein, 245 aa, Arabidopsis thaliana
  peptide (1)..(245): Ceres Seq. ID no. 12325996
MDHAVNDHSRHRVGAMLEAGAKMGLTVCRTWAFNDGGYNALQISPGRFDERVFKALDHVIAEAKTHGVRLLLSLVNNLQAYGGKTQYVNWAWQEGVGLSSSNDSFFFDPSIRRYFKNYLTVLLTRKNSLTGIEYRNDPTIFAWELINEPRCMSDVSGDTLQDWINEMTAFIKSIDNKHLLTVGLEGFYGPNSPKKLTVNPNGGPLSLGQILFETLIRQTSILPRFISTLITGFTIKGLKKNSSSL

SEQ ID NO: 22933 - protein, 230 aa, Arabidopsis thaliana
  peptide (1)..(230): Ceres Seq. ID no. 12325997
MLEAGAKMGLTVCRTWAFNDGGYNALQISPGRFDERVFKALDHVIAEAKTHGVRLLLSLVNNLQAYGGKTQYVNWAWQEGVGLSSSNDSFFFDPSIRRYFKNYLTVLLTRKNSLTGIEYRNDPTIFAWELINEPRCMSDVSGDTLQDWINEMTAFIKSIDNKHLLTVGLEGFYGPNSPKKLTVNPNGGPLSLGQILFETLIRQTSILPRFISTLITGFTIKGLKKNSSSL

SEQ ID NO: 22934 - DNA, 1827 bp, Arabidopsis thaliana
  misc_feature (1)..(1827): Ceres Seq. ID no. 12372037
  misc_feature (1)..(1827): Ortholog of  Ceres SEQ ID NO 14307843 as cited in SEQ ID NO 20508
  misc_feature (1)..(1827): Ortholog of  Ceres SEQ ID NO 15170811 as cited in SEQ ID NO 52649
  misc_feature (1)..(1827): Ortholog of  Ceres SEQ ID NO 13638331 as cited in SEQ ID NO 58047
  misc_feature (1)..(1827): Ortholog of  Ceres SEQ ID NO 15225845 as cited in SEQ ID NO 65125
  misc_feature (1)..(1827): Ortholog of  Ceres SEQ ID NO 15170135 as cited in SEQ ID NO 67647
agaacaaggaaaaaagagaggctttttcgttttgatcctcctactcttcttcattagtgaaagctacttataaagtccaaatcttgaagtgcgtgcacggtgcaccacgaatccacgatccagtgagcagcagcaactccatctccggagctctagattcagataagaacaatggcgattccgatgcctactcgccagctattcatcgacggcgaatggagagaacccatcttgaagaagcgaatcccgatcgttaatccagctactgaagaggtcattggtgatattcctgcagctacaacggaggacgtggatgttgctgtcaacgctgctcgaagagcattatcaaggaataaagggaaagattgggccaaagcacctggagctgttcgtgctaagtatttacgtgctattgctgctaaggtaaatgaaagaaagacggatctggcaaagctcgaggcgcttgattgtggtaaaccattggatgaagcagtatgggatatggatgatgttgctggatgttttgaattttatgctgaccttgctgaaggattagatgctaagcagaaagcaccagtctcgcttcccatggagagttttaagagttatgttctgaagcaacctctcggagttgtgggacttattacaccatggaattacccccttttgatggctgtttggaaggtggctccttcccttgctgcagggtgcactgcgattctcaagccatcagagctggcatcagttacttgtttggagcttgctgatatttgtcgagaagttggtcttcctcctggggtcctcaatgttttgactggtttcggttcggaagctggtgctcctttggcatcacatcctggcgtggacaagattgcatttactggaagtttcgccacaggaagtaaggtcatgacagccgctgctcagttggtgaagcctgtttctatggaacttggtgggaagagccctctcattgtgtttgatgacgttgatcttgataaagctgctgaatgggctcttttcggttgcttctggacaaatggtcaaatctgcagtgcaacttcccgccttcttgttcacgaaagcatcgcatctgagttcatagagaagcttgtaaaatggagcaagaacattaaaatttcagaccccatggaagaaggatgcaggcttggtcctgtagttagcaaaggacagtacgagaagatattgaagtttatctcaacggccaagagtgaaggagcaacgatcttgcatggtggttcccgacctgagcatctggaaaagggcttcttcattgaaccaaccatcataactgatgtaaccacttcaatgcaaatatggagagaagaagttttcgggcctgttctttgcgtgaaaacatttgccagtgaggacgaggcaattgagctagcaaatgactctcattacggactaggagctgcagtgatatctaatgacacagaaagatgtgaccgtataagcgaggcctttgaagctgggattgtctggattaactgctcgcagccttgctttacccaagccccatggggtggtgtcaaacgcagtgggtttggacgagaacttggagaatggggacttgataactacttgagtgtgaagcaagtgactctctacacttcaaacgatccctggggatggtacaaatctcccaactaagtaatgaatacattgtcatggaaatggaaaccaaaccaaatgctgtctgttcaaatctttgtgcttttattatcagtctgtctagttcggtcctgaaactcttttgtaaaacctgttgaatttataatgaataaaagatgctttgctgat

SEQ ID NO: 22935 - protein, 501 aa, Arabidopsis thaliana
  peptide (1)..(501): Ceres Seq. ID no. 12372038
MAIPMPTRQLFIDGEWREPILKKRIPIVNPATEEVIGDIPAATTEDVDVAVNAARRALSRNKGKDWAKAPGAVRAKYLRAIAAKVNERKTDLAKLEALDCGKPLDEAVWDMDDVAGCFEFYADLAEGLDAKQKAPVSLPMESFKSYVLKQPLGVVGLITPWNYPLLMAVWKVAPSLAAGCTAILKPSELASVTCLELADICREVGLPPGVLNVLTGFGSEAGAPLASHPGVDKIAFTGSFATGSKVMTAAAQLVKPVSMELGGKSPLIVFDDVDLDKAAEWALFGCFWTNGQICSATSRLLVHESIASEFIEKLVKWSKNIKISDPMEEGCRLGPVVSKGQYEKILKFISTAKSEGATILHGGSRPEHLEKGFFIEPTIITDVTTSMQIWREEVFGPVLCVKTFASEDEAIELANDSHYGLGAAVISNDTERCDRISEAFEAGIVWINCSQPCFTQAPWGGVKRSGFGRELGEWGLDNYLSVKQVTLYTSNDPWGWYKSPN

SEQ ID NO: 22936 - protein, 497 aa, Arabidopsis thaliana
  peptide (1)..(497): Ceres Seq. ID no. 12372039
MPTRQLFIDGEWREPILKKRIPIVNPATEEVIGDIPAATTEDVDVAVNAARRALSRNKGKDWAKAPGAVRAKYLRAIAAKVNERKTDLAKLEALDCGKPLDEAVWDMDDVAGCFEFYADLAEGLDAKQKAPVSLPMESFKSYVLKQPLGVVGLITPWNYPLLMAVWKVAPSLAAGCTAILKPSELASVTCLELADICREVGLPPGVLNVLTGFGSEAGAPLASHPGVDKIAFTGSFATGSKVMTAAAQLVKPVSMELGGKSPLIVFDDVDLDKAAEWALFGCFWTNGQICSATSRLLVHESIASEFIEKLVKWSKNIKISDPMEEGCRLGPVVSKGQYEKILKFISTAKSEGATILHGGSRPEHLEKGFFIEPTIITDVTTSMQIWREEVFGPVLCVKTFASEDEAIELANDSHYGLGAAVISNDTERCDRISEAFEAGIVWINCSQPCFTQAPWGGVKRSGFGRELGEWGLDNYLSVKQVTLYTSNDPWGWYKSPN

SEQ ID NO: 22937 - protein, 391 aa, Arabidopsis thaliana
  peptide (1)..(391): Ceres Seq. ID no. 12372040
MDDVAGCFEFYADLAEGLDAKQKAPVSLPMESFKSYVLKQPLGVVGLITPWNYPLLMAVWKVAPSLAAGCTAILKPSELASVTCLELADICREVGLPPGVLNVLTGFGSEAGAPLASHPGVDKIAFTGSFATGSKVMTAAAQLVKPVSMELGGKSPLIVFDDVDLDKAAEWALFGCFWTNGQICSATSRLLVHESIASEFIEKLVKWSKNIKISDPMEEGCRLGPVVSKGQYEKILKFISTAKSEGATILHGGSRPEHLEKGFFIEPTIITDVTTSMQIWREEVFGPVLCVKTFASEDEAIELANDSHYGLGAAVISNDTERCDRISEAFEAGIVWINCSQPCFTQAPWGGVKRSGFGRELGEWGLDNYLSVKQVTLYTSNDPWGWYKSPN

SEQ ID NO: 22938 - DNA, 1466 bp, Arabidopsis thaliana
  misc_feature (1)..(1466): Ceres Seq. ID no. 12326356
  misc_feature (1)..(1466): Ortholog of  Ceres SEQ ID NO 14302734 as cited in SEQ ID NO 66748
aaaaacaaaaaaacaaagaggatttaagggttacgagtcgcctccccaaaacccttgtccctagtctcttctgcttcttcttcttcaaaatctctctcttcaccaaatcctcagaagatgagcaacgacaaggatagcttcaacgtctccgatcttactgctgctcttaaggacgaggatcgagctggccttgtcaatgctctaaagaacaagctgcagaatctggctggtcagcgttctgatgtgctcgagaatctgactcccaatgtgagaaagcgcgttgatgccttgagggatatacagagccaacatgatgaactagaggcaaaattccgtgaggagagagctattcttgaagccaagtatcaaacgctgtatcagcctttgtatgtcaagcgttatgagattgtgaatggcactactgaagttgaactggctccagaggatgataccaaggtggaccaaggagaggagaaaactgcagaagagaaaggagttccaagtttctggctgacagctctgaaaaataacgatgttatttccgaggaggtcacagagcgtgatgaaggggctctcaaatatcttaaagatattaagtggtgcaagattgaagagcctaaaggattcaaacttgagtttttctttgacacgaatccgtattttaagaacactgtcttgacaaagtcttatcatatgattgatgaagatgagccactgcttgagaaggctatggggacagaaattgattggtatcctggaaagtgtctaactcagaagattctcaagaagaagcctaagaaaggttcaaagaatactaaaccaatcaccaaactcgaagattgtgaaagcttcttcaacttctttagtcctccagaagttccggatgaagatgaagatatcgacgaggaaagagctgaggatcttcaaaacctgatggaacaagattatgacattggatctactattcgggaaaagattattcctcgtgctgtctcatggtttactggtgaggctatggaagcagaggattttgaaatagatgacgatgaggaagatgacattgatgaggatgaaggtgaggaagacgaagaggatgaggatgaggaggacgatgatgatgaggatgaagaagaaagcaagaccaaaaagaagccatcaatcggaaacaagaagggagggagatctcagatagttggtgaaggtaaacaagatgagaggccacccgaatgcaagcaacagtaatcttttactacgctctaccagatataaaaggattgcgtgaaaatataattcaggtcattctctgttcatcaagaatgaggattgagaaaaggttttgggatttttaaaagtgaaattcatcttgtaggagtttcgttcgtttttctattggtgtgtttattttctctaaagcactttaataatataccttggtatttaatttatgaatcaagcatcatcatctc

SEQ ID NO: 22939 - protein, 374 aa, Arabidopsis thaliana
  peptide (1)..(374): Ceres Seq. ID no. 12326357
MSNDKDSFNVSDLTAALKDEDRAGLVNALKNKLQNLAGQRSDVLENLTPNVRKRVDALRDIQSQHDELEAKFREERAILEAKYQTLYQPLYVKRYEIVNGTTEVELAPEDDTKVDQGEEKTAEEKGVPSFWLTALKNNDVISEEVTERDEGALKYLKDIKWCKIEEPKGFKLEFFFDTNPYFKNTVLTKSYHMIDEDEPLLEKAMGTEIDWYPGKCLTQKILKKKPKKGSKNTKPITKLEDCESFFNFFSPPEVPDEDEDIDEERAEDLQNLMEQDYDIGSTIREKIIPRAVSWFTGEAMEAEDFEIDDDEEDDIDEDEGEEDEEDEDEEDDDDEDEEESKTKKKPSIGNKKGGRSQIVGEGKQDERPPECKQQ

SEQ ID NO: 22940 - DNA, 1970 bp, Arabidopsis thaliana
  misc_feature (1)..(1970): Ceres Seq. ID no. 12371409
  misc_feature (1)..(1970): Ortholog of  Ceres SEQ ID NO 13590904 as cited in SEQ ID NO 66072
aaaaaagaatacacagaccagtcttcgtgtgctcgtaattggcgattctcaaattcgatctccgtacaaacaatggccgaaacctcgaagcaagtcaacggcgacgatgcccaggatcttcactcgcttctttcttctccggcgagggatttcctcgttcgtaatgacggcgaacaggtgaaagttgacagcttgttagggaagaagattggattgtatttttcagctgcttggtgtggaccgtgtcagcggtttactccacagctggtggaagtctacaacgagctctcttcgaaagttggttttgagattgtgtttgtgtcaggtgatgaggatgaagagtcatttggagattatttcagaaagatgccctggctcgctgttccgtttactgattcggaaacccgtgaccgtttggatgagttgtttaaggttaggggaatacctaacctagtgatggttgatgatcatggtaaacttgtgaatgagaatggtgttggggtcatacgaagctatggagctgatgcttatcctttcacaccagagaaaatgaaggagatcaaagaggatgaagatagagctcggagaggacagaccttaagatctgtcttggtgactccttcacgagactttgtgatttcgcctgacggaaacaaggtacccgtatcagagcttgagggaaaaaccattggccttctcttctctgtggcctcttacaggaaatgcacagagcttactccaaagcttgttgagttttatacgaagctgaaggagaataaggaggattttgagattgtgttgatatctcttgaagatgatgaggagtcttttaatcaagacttcaagaccaagccatggctagcattgccgttcaacgacaaaagtggatcaaaattggctcggcatttcatgctgtcaacactaccgacactggtcattctcggccctgatggaaaaacccgtcactcgaatgtcgctgaagctattgatgactatggagttcttgcgtatcctttcactccagagaagtttcaagaactcaaggagctagaaaaggcaaaggtagaggctcaaacgctcgagtcacttcttgtctcaggtgatctcaactacgttctcggaaaagatggggcaaaggtgcttgtttcggatctggtggggaagactattcttatgtacttctcagctcactggtgtcctccttgtcgcgcttttacaccaaagcttgttgaagtatacaagcagataaaggagcggaatgaagcgtttgaattgatcttcatctccagtgaccgtgaccaggaatcattcgatgagtactattcgcaaatgccgtggctggctcttccatttggtgatcctaggaaagcatccttggcaaaaacctttaaggttggtgggatcccaatgctagcagctctgggaccaactgggcaaaccgtaacaaaagaagcaagggaccttgtcgtagcccatggagccgatgcttacccttttactgaggaacgtttgaaggagattgaagctaagtacgatgagatagcaaaagattggcctaagaaggtgaaacatgttctccatgaagaacatgagctagaactaactcgtgttcaggtttacacatgcgataagtgtgaggaagaagggacaatatggtcttaccattgcgacgaatgcgactttgatcttcacgccaagtgtgctttaaacgaggacacaaaagaaaacggcgatgaggctgtgaaagttggtggcgacgagtccaaagatggttgggtttgtgaaggaaacgtatgcaccaaggcctgataggtagcttcaggcacagttatgtcactatgtgtatgcaaagctatttcctttctttgtataattgctaagagtgagaatgtgtggttacaatctgatatctgattaagaccttggagataaactctgttaatctaaagtaataataaaagaatcttctt

SEQ ID NO: 22941 - protein, 602 aa, Arabidopsis thaliana
  peptide (1)..(602): Ceres Seq. ID no. 12371410
KKEYTDQSSCARNWRFSNSISVQTMAETSKQVNGDDAQDLHSLLSSPARDFLVRNDGEQVKVDSLLGKKIGLYFSAAWCGPCQRFTPQLVEVYNELSSKVGFEIVFVSGDEDEESFGDYFRKMPWLAVPFTDSETRDRLDELFKVRGIPNLVMVDDHGKLVNENGVGVIRSYGADAYPFTPEKMKEIKEDEDRARRGQTLRSVLVTPSRDFVISPDGNKVPVSELEGKTIGLLFSVASYRKCTELTPKLVEFYTKLKENKEDFEIVLISLEDDEESFNQDFKTKPWLALPFNDKSGSKLARHFMLSTLPTLVILGPDGKTRHSNVAEAIDDYGVLAYPFTPEKFQELKELEKAKVEAQTLESLLVSGDLNYVLGKDGAKVLVSDLVGKTILMYFSAHWCPPCRAFTPKLVEVYKQIKERNEAFELIFISSDRDQESFDEYYSQMPWLALPFGDPRKASLAKTFKVGGIPMLAALGPTGQTVTKEARDLVVAHGADAYPFTEERLKEIEAKYDEIAKDWPKKVKHVLHEEHELELTRVQVYTCDKCEEEGTIWSYHCDECDFDLHAKCALNEDTKENGDEAVKVGGDESKDGWVCEGNVCTKA

SEQ ID NO: 22942 - protein, 578 aa, Arabidopsis thaliana
  peptide (1)..(578): Ceres Seq. ID no. 12371411
MAETSKQVNGDDAQDLHSLLSSPARDFLVRNDGEQVKVDSLLGKKIGLYFSAAWCGPCQRFTPQLVEVYNELSSKVGFEIVFVSGDEDEESFGDYFRKMPWLAVPFTDSETRDRLDELFKVRGIPNLVMVDDHGKLVNENGVGVIRSYGADAYPFTPEKMKEIKEDEDRARRGQTLRSVLVTPSRDFVISPDGNKVPVSELEGKTIGLLFSVASYRKCTELTPKLVEFYTKLKENKEDFEIVLISLEDDEESFNQDFKTKPWLALPFNDKSGSKLARHFMLSTLPTLVILGPDGKTRHSNVAEAIDDYGVLAYPFTPEKFQELKELEKAKVEAQTLESLLVSGDLNYVLGKDGAKVLVSDLVGKTILMYFSAHWCPPCRAFTPKLVEVYKQIKERNEAFELIFISSDRDQESFDEYYSQMPWLALPFGDPRKASLAKTFKVGGIPMLAALGPTGQTVTKEARDLVVAHGADAYPFTEERLKEIEAKYDEIAKDWPKKVKHVLHEEHELELTRVQVYTCDKCEEEGTIWSYHCDECDFDLHAKCALNEDTKENGDEAVKVGGDESKDGWVCEGNVCTKA

SEQ ID NO: 22943 - protein, 480 aa, Arabidopsis thaliana
  peptide (1)..(480): Ceres Seq. ID no. 12371412
MPWLAVPFTDSETRDRLDELFKVRGIPNLVMVDDHGKLVNENGVGVIRSYGADAYPFTPEKMKEIKEDEDRARRGQTLRSVLVTPSRDFVISPDGNKVPVSELEGKTIGLLFSVASYRKCTELTPKLVEFYTKLKENKEDFEIVLISLEDDEESFNQDFKTKPWLALPFNDKSGSKLARHFMLSTLPTLVILGPDGKTRHSNVAEAIDDYGVLAYPFTPEKFQELKELEKAKVEAQTLESLLVSGDLNYVLGKDGAKVLVSDLVGKTILMYFSAHWCPPCRAFTPKLVEVYKQIKERNEAFELIFISSDRDQESFDEYYSQMPWLALPFGDPRKASLAKTFKVGGIPMLAALGPTGQTVTKEARDLVVAHGADAYPFTEERLKEIEAKYDEIAKDWPKKVKHVLHEEHELELTRVQVYTCDKCEEEGTIWSYHCDECDFDLHAKCALNEDTKENGDEAVKVGGDESKDGWVCEGNVCTKA

SEQ ID NO: 22944 - DNA, 1095 bp, Arabidopsis thaliana
  misc_feature (1)..(1095): Ceres Seq. ID no. 12422727
  misc_feature (1)..(1095): Ortholog of  Ceres SEQ ID NO 13654728 as cited in SEQ ID NO 62302
  misc_feature (1)..(1095): Ortholog of  Ceres SEQ ID NO 13597134 as cited in SEQ ID NO 64501
  misc_feature (1)..(1095): Ortholog of  Ceres SEQ ID NO 15179047 as cited in SEQ ID NO 0
atctatctacgcatcatcgatctcgaagtacgtttcggttttcaggccaatctctgaatctgcgtgacaaaagcaacaaattacatatctctctctctgcgcgacttcgaagatcaacatccatggcgtcacaggtaaggtcagtaaaagttggcaatctctcttcaggagcaactgagcatgatattaaagagtttttctctttctctggtgaagttgaaagcatcgatatccaaagtaacgagcatagtgcttatgtcacatttaaagaaactcaaggagcagagactgctgtgctcttatctggaccgagtattgccgatcaatcagtcatcattgagttggctcccaactacagtccaccagcagcccctcatgctgaaacacagagcagcggtgcagaatctgttgtccagaaggcagaagatgttgtgagcagcatgttagcaaagggtttcattcttgggaaagatgctgtcggcaaagcaaaagcttttgatgagaaacatggtttcacctcaaccgccaccgcaggagttgcttcactagaccaaaaaatcggtcttagccagaaacttacagctggaacaagcttggtgaacgaaaaaatcaaggcggtggaccaaaactttcaggtaacagagaggaccaagtctgtgtatgcagctgcggagcagactgtgagcagtgcaggaagcgctgtgatgaagaaccgttacgtgttaactggtgtgagctgggccgcaggagcattcaatagagtggctcaagcagctggagaggttggacagaaaacaaaagagaaggttgaagctgagcaaccatcgcaaccagcacagtcgcagcagcaactgccagaagggtattctccgattcattcgtccgaatactcgaagaactaatatcatcaagttaaacagtttcctttgtttctccttgttggtttctttgacatggaagttggaaatctggtttggtctttgggatgtaccatataagctatgcctggattttccctaccactattagactatagtttgggttttttccaatatacatatttaataagttgacatttaaatctttctttacccc

SEQ ID NO: 22945 - protein, 299 aa, Arabidopsis thaliana
  peptide (1)..(299): Ceres Seq. ID no. 12422728
LSTHHRSRSTFRFSGQSLNLRDKSNKLHISLSARLRRSTSMASQVRSVKVGNLSSGATEHDIKEFFSFSGEVESIDIQSNEHSAYVTFKETQGAETAVLLSGPSIADQSVIIELAPNYSPPAAPHAETQSSGAESVVQKAEDVVSSMLAKGFILGKDAVGKAKAFDEKHGFTSTATAGVASLDQKIGLSQKLTAGTSLVNEKIKAVDQNFQVTERTKSVYAAAEQTVSSAGSAVMKNRYVLTGVSWAAGAFNRVAQAAGEVGQKTKEKVEAEQPSQPAQSQQQLPEGYSPIHSSEYSKN

SEQ ID NO: 22946 - protein, 259 aa, Arabidopsis thaliana
  peptide (1)..(259): Ceres Seq. ID no. 12422729
MASQVRSVKVGNLSSGATEHDIKEFFSFSGEVESIDIQSNEHSAYVTFKETQGAETAVLLSGPSIADQSVIIELAPNYSPPAAPHAETQSSGAESVVQKAEDVVSSMLAKGFILGKDAVGKAKAFDEKHGFTSTATAGVASLDQKIGLSQKLTAGTSLVNEKIKAVDQNFQVTERTKSVYAAAEQTVSSAGSAVMKNRYVLTGVSWAAGAFNRVAQAAGEVGQKTKEKVEAEQPSQPAQSQQQLPEGYSPIHSSEYSKN

SEQ ID NO: 22947 - protein, 153 aa, Arabidopsis thaliana
  peptide (1)..(153): Ceres Seq. ID no. 12422730
MLAKGFILGKDAVGKAKAFDEKHGFTSTATAGVASLDQKIGLSQKLTAGTSLVNEKIKAVDQNFQVTERTKSVYAAAEQTVSSAGSAVMKNRYVLTGVSWAAGAFNRVAQAAGEVGQKTKEKVEAEQPSQPAQSQQQLPEGYSPIHSSEYSKN

SEQ ID NO: 22948 - DNA, 1110 bp, Arabidopsis thaliana
  misc_feature (1)..(1110): Ceres Seq. ID no. 13509156
  misc_feature (1)..(1110): Ortholog of  Ceres SEQ ID NO 13594416 as cited in SEQ ID NO 51058
  misc_feature (1)..(1110): Ortholog of  Ceres SEQ ID NO 15177991 as cited in SEQ ID NO 53915
  misc_feature (1)..(1110): Ortholog of  Ceres SEQ ID NO 15174347 as cited in SEQ ID NO 58577
  misc_feature (1)..(1110): Ortholog of  Ceres SEQ ID NO 13596609 as cited in SEQ ID NO 63070
  misc_feature (1)..(1110): Ortholog of  Ceres SEQ ID NO 12616895 as cited in SEQ ID NO 63909
  misc_feature (1)..(1110): Ortholog of  Ceres SEQ ID NO 14302096 as cited in SEQ ID NO 68356
  misc_feature (1)..(1110): Ortholog of  Ceres SEQ ID NO 13598574 as cited in SEQ ID NO 69083
cccactcaaattctgtttcagtgttcttcaaattctcaatctttctctcaattcatctaaagggttcctcaaagtttcaatctttctctctgaatctaaaccatggctcgttgtagcaacaatctcgtagggatactcaatttcctagtatttcttctctcgatcccaatcttagctggtggaatctggctaagccaaaaagggtcaacagagtgtgaaagattcctagacaaaccagtgattgctcttggtgttttccttatggttgtagcaatagctggtctaataggttcatgttgtagagtcacatggcttctttgggtttatctctttgtcatgttccttttgattctccttgtgttctgtataacagtttttgcctttgttgttactaacaaaggagctggtgaagctattgaaggaaaaggttataaagagtataaacttggtgattactctacttggttacagaaacgtgttgagaatggtaaaaattggaataagattaggagttgtcttgtggagagcaaagtttgttctaagcttgaagccaagtttgttaatgttcctgtcaatagtttctacaaggaacatcttactgctcttcagtctggttgctgcaaaccttcagatgaatgtggtttcgagtacgtaaacccaacaacctggaccaagaacacaacgggaacacacactaatccagactgccaaacctgggacaacgcaaaagaaaagctctgcttcgattgtcaatcttgtaaagcgggtctactcgacaacgtcaaaagcgcttggaagaaagttgcaatcgttaacatcgtcttccttgtcttcctcatcattgtctactctgttggttgctgtgctttcaggaacaacaagagggatgacagttattcccgtacctacggatataagccttgaacatagtttatcgggttttaggacagagattcgttgatacattgttggagtttggttttatgtttgatgatttttatctttggtgttttgatgagacctattgcttgtacagctcacttatgagactattatcagtatgttctgccttttgggctaaaccttgatattgatttattatatncnttt

SEQ ID NO: 22949 - protein, 273 aa, Arabidopsis thaliana
  peptide (1)..(273): Ceres Seq. ID no. 13509157
MARCSNNLVGILNFLVFLLSIPILAGGIWLSQKGSTECERFLDKPVIALGVFLMVVAIAGLIGSCCRVTWLLWVYLFVMFLLILLVFCITVFAFVVTNKGAGEAIEGKGYKEYKLGDYSTWLQKRVENGKNWNKIRSCLVESKVCSKLEAKFVNVPVNSFYKEHLTALQSGCCKPSDECGFEYVNPTTWTKNTTGTHTNPDCQTWDNAKEKLCFDCQSCKAGLLDNVKSAWKKVAIVNIVFLVFLIIVYSVGCCAFRNNKRDDSYSRTYGYKP

SEQ ID NO: 22950 - protein, 220 aa, Arabidopsis thaliana
  peptide (1)..(220): Ceres Seq. ID no. 13509158
MVVAIAGLIGSCCRVTWLLWVYLFVMFLLILLVFCITVFAFVVTNKGAGEAIEGKGYKEYKLGDYSTWLQKRVENGKNWNKIRSCLVESKVCSKLEAKFVNVPVNSFYKEHLTALQSGCCKPSDECGFEYVNPTTWTKNTTGTHTNPDCQTWDNAKEKLCFDCQSCKAGLLDNVKSAWKKVAIVNIVFLVFLIIVYSVGCCAFRNNKRDDSYSRTYGYKP

SEQ ID NO: 22951 - protein, 195 aa, Arabidopsis thaliana
  peptide (1)..(195): Ceres Seq. ID no. 13509159
MFLLILLVFCITVFAFVVTNKGAGEAIEGKGYKEYKLGDYSTWLQKRVENGKNWNKIRSCLVESKVCSKLEAKFVNVPVNSFYKEHLTALQSGCCKPSDECGFEYVNPTTWTKNTTGTHTNPDCQTWDNAKEKLCFDCQSCKAGLLDNVKSAWKKVAIVNIVFLVFLIIVYSVGCCAFRNNKRDDSYSRTYGYKP

SEQ ID NO: 22952 - DNA, 895 bp, Arabidopsis thaliana
  misc_feature (1)..(895): Ceres Seq. ID no. 12393234
  misc_feature (1)..(895): Ortholog of  Ceres SEQ ID NO 13638835 as cited in SEQ ID NO 52005
  misc_feature (1)..(895): Ortholog of  Ceres SEQ ID NO 12614289 as cited in SEQ ID NO 68735
  misc_feature (1)..(895): Ortholog of  Ceres SEQ ID NO 14309007 as cited in SEQ ID NO 0
accattagggctctctctaaattcctcagtctcgtgagaatcgtcatcgtcttcacggagctcactcgaagatgttaacggcagatataccaccgaatcattcaatctacatccaaaacctcaatgaaaggatcaagaaagaggaattgaagagatctctttactgtttgttctctcagtttgggagaatacttgatgtggttgctttgaagactccgaagctccgaggacaagcttgggttacttttagtgaagtcactgctgctggtcatgctgttcgtcagatgcaaaattttcccttctatgataaaccaatgcgcttacaatatgcaaaagcaaagtcagattgtctagctaaagctgagggaactttcgttccaaaagataagaagaggaagcaagaagaaaaagttgaaagaaagcgtgaagaatcccaacgaccaaacacagctaatggtccaagtgctaatggtccaagtgccaataacggagtccctgcgccttcgttccagccgagcgggcaagaaacaatgccaccaaacaacatactcttcattcagaatctcccacacgagacaacaagcatgatgctccagcttctcttcgaacagtaccctggattcaaagagataagaatgatcgacgcaaaaccaggaatcgcgtttgtagagtacgaagacgatgttcaagcttccatagctatgcaacctcttcaaggtttcaaaatcactccccagaatccaatggtcatctctttcgccaagaaatgataagagtcttgtttttgtttgtttgttgtcctttaagacgatagtactggaccaaccaaacctggtgtgtataaccaaccaacggttctattggttaacggattaatccggttttggtttaatcg

SEQ ID NO: 22953 - protein, 232 aa, Arabidopsis thaliana
  peptide (1)..(232): Ceres Seq. ID no. 12393235
MLTADIPPNHSIYIQNLNERIKKEELKRSLYCLFSQFGRILDVVALKTPKLRGQAWVTFSEVTAAGHAVRQMQNFPFYDKPMRLQYAKAKSDCLAKAEGTFVPKDKKRKQEEKVERKREESQRPNTANGPSANGPSANNGVPAPSFQPSGQETMPPNNILFIQNLPHETTSMMLQLLFEQYPGFKEIRMIDAKPGIAFVEYEDDVQASIAMQPLQGFKITPQNPMVISFAKK

SEQ ID NO: 22954 - protein, 161 aa, Arabidopsis thaliana
  peptide (1)..(161): Ceres Seq. ID no. 12393236
MQNFPFYDKPMRLQYAKAKSDCLAKAEGTFVPKDKKRKQEEKVERKREESQRPNTANGPSANGPSANNGVPAPSFQPSGQETMPPNNILFIQNLPHETTSMMLQLLFEQYPGFKEIRMIDAKPGIAFVEYEDDVQASIAMQPLQGFKITPQNPMVISFAKK

SEQ ID NO: 22955 - protein, 151 aa, Arabidopsis thaliana
  peptide (1)..(151): Ceres Seq. ID no. 12393237
MRLQYAKAKSDCLAKAEGTFVPKDKKRKQEEKVERKREESQRPNTANGPSANGPSANNGVPAPSFQPSGQETMPPNNILFIQNLPHETTSMMLQLLFEQYPGFKEIRMIDAKPGIAFVEYEDDVQASIAMQPLQGFKITPQNPMVISFAKK

SEQ ID NO: 22956 - DNA, 748 bp, Arabidopsis thaliana
  misc_feature (1)..(748): Ceres Seq. ID no. 12334180
  misc_feature (1)..(748): Ortholog of  Ceres SEQ ID NO 12600643 as cited in SEQ ID NO 20529
atccaccacatatttatgtttgatccaaaagccaacacaagcaaagaaattaaaagtgttcttgttgctgtagaacacaaacagaacaaacaaaaaatcaattgaagagtctctcagtcgttaggggaagcaaatagagaaatggctagctttactgcctccgcttccaccgtctccgccgctcgtccggctctccttctcaagcctaccgtcgccatctctgctcctgttcttggtttgcctccaatgggtaagaagaagggaggagtgagatgttcaatggagacaaagcaaggaaacgtctcagtcatgggggctggagtttcagctgcagcaacagctgctttgacggcggtgatgagcaatcccgcgatggctttggttgatgagaggatgtcaacagaaggaacaggattaccctttggtctaagcaacaacctcttgggttggattctgtttggagtctttggtttgatctggactttcttcttcgtctacacttcatctctcgaggaggatgaagaatctggtctttcactctgaaggaagaatcaatctttcgtcttctcatttccattttcatgtgagaacatgaatcaagtgttcacccttctagtttcttgtaattgttaagtaaagactaaaaactattttcatgtgtgtttactttcccccattctctttatcttgtcataacattgataaggaggagattatgtgattattaaatatcatgcatgacatgttc

SEQ ID NO: 22957 - protein, 133 aa, Arabidopsis thaliana; identical to SEQ ID NO: 20530
  peptide (1)..(133): Ceres Seq. ID no. 12334181

SEQ ID NO: 22958 - protein, 98 aa, Arabidopsis thaliana; identical to SEQ ID NO: 20531
  peptide (1)..(98): Ceres Seq. ID no. 12334182

SEQ ID NO: 22959 - protein, 87 aa, Arabidopsis thaliana; identical to SEQ ID NO: 20532
  peptide (1)..(87): Ceres Seq. ID no. 12334183

SEQ ID NO: 22960 - DNA, 1358 bp, Arabidopsis thaliana
  misc_feature (1)..(1358): Ceres Seq. ID no. 12324690
  misc_feature (1)..(1358): Ortholog of  Ceres SEQ ID NO 13655375 as cited in SEQ ID NO 63347
  misc_feature (1)..(1358): Ortholog of  Ceres SEQ ID NO 12626166 as cited in SEQ ID NO 64505
  misc_feature (1)..(1358): Ortholog of  Ceres SEQ ID NO 13654415 as cited in SEQ ID NO 68820
  misc_feature (1)..(1358): Ortholog of  Ceres SEQ ID NO 14303290 as cited in SEQ ID NO 0
aagttcataactgaaaaataaaaataagacagaaaacaaagttaaaaataaaataaaaacggaagagagaaaataaataaataaaatcactcaaagaatttccacagtttttctttccatgttgatttagcccattcgtagacttcctccgcgccgccgttagacgccgcctcggaagtatcagcaaccgccgtggtgttcgtcgccttcaaagactcgtttctctcctctctctgagatctgaatttgagatgtttaaaaaaatgagtgctactacaagcaagacggatcagaaagcggcattagacattgcatcatggctattcaatgtggttacttccgttggaatcatcctcgttaacaaagctttaatggctacttatggctttagtttcgctactacattaaccggtttgcatttcggaacaacgacattgttgacaactttcttgacatggcttggttatatccaaccttctcagcttccttggcctgatcttttgaaattcgttttgttcgctaacttctctatcgttgggatgaacgtcagtctcatgtggaattctgttggcttctaccagattgcgaagctgagtatgatcccggtttcttgtcttctagaagttatgcttgacaatgtcaggtattcaagagatacaaagcttagcattttgttagttcttgctggtgttgccgtctgtactgtaaccgatgttagtgtcaatctcaacggatttctagctgccgctattgctgtctggagcaccgcgcttcagcaatactatgtacattatctacaacggaaatattcactcggttctttcaatttactggcgcataccgctccagttcaagctgcgtcattgttgttggtcggaccatttctagactactggttgactaaccaaagagtggatgcatacaacttttcatttgtatctctgttcttcttaatactctcgtgcagtatcgcggttgggaccaatctcagccaattcatctgtattggaagattcacggcggtgtctttccaagtacttggtcacatgaagacaattctggttttggttttgggattcactttcttcggtaaggaaggattaaacctacaagtagtgcttggaatgctgattgctatactcggtatgatctggtacggtaatgcatcttctaaaccgggtggtaaagaacgtcgtagcctgtctattcccataaccaagtcacagaaactatctgaaacaaacgaatctgatgaaaaggtgtagaagaaagaagtgaatcgcattgacatagaaacaaaaacaagatactcagatacaaacaggtagagttatcaaatgggatattatttataaacc

SEQ ID NO: 22961 - protein, 337 aa, Arabidopsis thaliana
  peptide (1)..(337): Ceres Seq. ID no. 12324691
MFKKMSATTSKTDQKAALDIASWLFNVVTSVGIILVNKALMATYGFSFATTLTGLHFGTTTLLTTFLTWLGYIQPSQLPWPDLLKFVLFANFSIVGMNVSLMWNSVGFYQIAKLSMIPVSCLLEVMLDNVRYSRDTKLSILLVLAGVAVCTVTDVSVNLNGFLAAAIAVWSTALQQYYVHYLQRKYSLGSFNLLAHTAPVQAASLLLVGPFLDYWLTNQRVDAYNFSFVSLFFLILSCSIAVGTNLSQFICIGRFTAVSFQVLGHMKTILVLVLGFTFFGKEGLNLQVVLGMLIAILGMIWYGNASSKPGGKERRSLSIPITKSQKLSETNESDEKV

SEQ ID NO: 22962 - protein, 333 aa, Arabidopsis thaliana
  peptide (1)..(333): Ceres Seq. ID no. 12324692
MSATTSKTDQKAALDIASWLFNVVTSVGIILVNKALMATYGFSFATTLTGLHFGTTTLLTTFLTWLGYIQPSQLPWPDLLKFVLFANFSIVGMNVSLMWNSVGFYQIAKLSMIPVSCLLEVMLDNVRYSRDTKLSILLVLAGVAVCTVTDVSVNLNGFLAAAIAVWSTALQQYYVHYLQRKYSLGSFNLLAHTAPVQAASLLLVGPFLDYWLTNQRVDAYNFSFVSLFFLILSCSIAVGTNLSQFICIGRFTAVSFQVLGHMKTILVLVLGFTFFGKEGLNLQVVLGMLIAILGMIWYGNASSKPGGKERRSLSIPITKSQKLSETNESDEKV

SEQ ID NO: 22963 - protein, 297 aa, Arabidopsis thaliana
  peptide (1)..(297): Ceres Seq. ID no. 12324693
MATYGFSFATTLTGLHFGTTTLLTTFLTWLGYIQPSQLPWPDLLKFVLFANFSIVGMNVSLMWNSVGFYQIAKLSMIPVSCLLEVMLDNVRYSRDTKLSILLVLAGVAVCTVTDVSVNLNGFLAAAIAVWSTALQQYYVHYLQRKYSLGSFNLLAHTAPVQAASLLLVGPFLDYWLTNQRVDAYNFSFVSLFFLILSCSIAVGTNLSQFICIGRFTAVSFQVLGHMKTILVLVLGFTFFGKEGLNLQVVLGMLIAILGMIWYGNASSKPGGKERRSLSIPITKSQKLSETNESDEKV

SEQ ID NO: 22964 - DNA, 1113 bp, Arabidopsis thaliana
  misc_feature (1)..(1113): Ceres Seq. ID no. 12371633
  misc_feature (1)..(1113): Ortholog of  Ceres SEQ ID NO 13596609 as cited in SEQ ID NO 63070
  misc_feature (1)..(1113): Ortholog of  Ceres SEQ ID NO 12616895 as cited in SEQ ID NO 63909
  misc_feature (1)..(1113): Ortholog of  Ceres SEQ ID NO 13598574 as cited in SEQ ID NO 69083
aaattctcactgacccatttgttttctctcaatcttttgcagaaccctgaaccaaattttgcatctttctctttgaattttgtgtctttctttaattctttggaggggtttttcaaaagcaacaaccttgaaaaaatgggtatgggcacaagcactttcgttatcagatgggtcaatcttcttacaatgctattggctgtggcagtgataatatttggggtgtggatgagtacacacaatgatggttgcagaaggtcacttacatttccagttatagctcttggtggtttcatcttcttgatatccataatcggatttcttggcgcgtgcaagagaagtgtggcgcttctttggatttatcttgccgtgctcctgatcgttttgatcgcgattcttgtctttaccgtactggcgttcattgtaacaaacaatggttctggccatactaaccctggtttaaggtacaaggagtataagctgaatgattacagctcatggtttctaaaacagcttaacaacaccagtaactggataagactaaagagttgtcttgttaaatccgagcaatgtcggaagctttccaagaaatacaagaccatcaaacagttgaaatccgcagaattaaccccgatagaagctggatgttgtcgaccaccatctgagtgtggttatcctgcggtgaatgcttcttactatgacttgagctttcattcgataagttctaacaaagattgtaagctttacaagaatttgaggactatcaagtgctacaactgtgattcttgcaaagctggagttgctcagtacatgaaaaccgagtggcgacttgttgcgatcttcaatgtggtcctgtttgttgtcttgtcaatggtttactttgttggatgctgtgcgagaagaaatgctgctagttaccgatccaaagcttagaaaccgaagcccgggttaaagaaaacacttcaccggattctcccaagctacagatgaatcacattctcttccatgttggtgaatgcttccaagagagacacaagagcaacaacttctcatcgttctttttactctgtaatctatatgttgttgaaacagagcaaaaatttgatcagatttttc

SEQ ID NO: 22965 - protein, 309 aa, Arabidopsis thaliana
  peptide (1)..(309): Ceres Seq. ID no. 12371634
KFSLTHLFSLNLLQNPEPNFASFSLNFVSFFNSLEGFFKSNNLEKMGMGTSTFVIRWVNLLTMLLAVAVIIFGVWMSTHNDGCRRSLTFPVIALGGFIFLISIIGFLGACKRSVALLWIYLAVLLIVLIAILVFTVLAFIVTNNGSGHTNPGLRYKEYKLNDYSSWFLKQLNNTSNWIRLKSCLVKSEQCRKLSKKYKTIKQLKSAELTPIEAGCCRPPSECGYPAVNASYYDLSFHSISSNKDCKLYKNLRTIKCYNCDSCKAGVAQYMKTEWRLVAIFNVVLFVVLSMVYFVGCCARRNAASYRSKA

SEQ ID NO: 22966 - protein, 264 aa, Arabidopsis thaliana
  peptide (1)..(264): Ceres Seq. ID no. 12371635
MGMGTSTFVIRWVNLLTMLLAVAVIIFGVWMSTHNDGCRRSLTFPVIALGGFIFLISIIGFLGACKRSVALLWIYLAVLLIVLIAILVFTVLAFIVTNNGSGHTNPGLRYKEYKLNDYSSWFLKQLNNTSNWIRLKSCLVKSEQCRKLSKKYKTIKQLKSAELTPIEAGCCRPPSECGYPAVNASYYDLSFHSISSNKDCKLYKNLRTIKCYNCDSCKAGVAQYMKTEWRLVAIFNVVLFVVLSMVYFVGCCARRNAASYRSKA

SEQ ID NO: 22967 - protein, 262 aa, Arabidopsis thaliana
  peptide (1)..(262): Ceres Seq. ID no. 12371636
MGTSTFVIRWVNLLTMLLAVAVIIFGVWMSTHNDGCRRSLTFPVIALGGFIFLISIIGFLGACKRSVALLWIYLAVLLIVLIAILVFTVLAFIVTNNGSGHTNPGLRYKEYKLNDYSSWFLKQLNNTSNWIRLKSCLVKSEQCRKLSKKYKTIKQLKSAELTPIEAGCCRPPSECGYPAVNASYYDLSFHSISSNKDCKLYKNLRTIKCYNCDSCKAGVAQYMKTEWRLVAIFNVVLFVVLSMVYFVGCCARRNAASYRSKA

SEQ ID NO: 22968 - DNA, 1321 bp, Arabidopsis thaliana
  misc_feature (1)..(1321): Ceres Seq. ID no. 13500046
  misc_feature (1)..(1321): Ortholog of  Ceres SEQ ID NO 14302757 as cited in SEQ ID NO 56631
  misc_feature (1)..(1321): Ortholog of  Ceres SEQ ID NO 13662567 as cited in SEQ ID NO 62884
tctgcaatttgaattcaaaatttaaaccactctacttttgaatctctctctcactaaacctagaaagtagaaaaccctagcatttgtgatcttcaacgggaaaaatgacgactgtgactccgtccgccggtcgtgagctctcgaatccgccgtccgacggcatttctaatctccgattttctaataacagtgatcatctcctcgtttcttcatgggataagcgtgtgagattgtatgatgtgagcaccaattcgttgaaaggagagttcttacatggcggagcagtactcgattgctgttttcacgatgacttctccggcttcagtgttggcgctgattacaaagtccgacggattgtattcaatgtcggcaaagaggacattttggggacacatgacaaagcagtgcgatgtgttgagtattcttacgctgcgggacaagtgatcactggatcttgggataaaacagttaaatgttgggatccaagaggcgctagtgggcctgaacgcacccaagtgggaacatatttgcaaccagaacgtgtttactctatgtctcttgttggacatcgtttggtagtggctacagcaggaaggcatgtaaacatctatgatctcagaaatatgtctcagcctgagcaaagaagggagtcttcactgaaataccagacgagatgtgtgcgttgttatcctaatggaacaggctatgctcttagctctgttgaaggaagggttgcaatggagttttttgatctgtcagaggctgctcaagctaaaaaatatgctttcaaatgtcatcggaaatcagaggctggaagggacattgtttaccctgtaaattccattgccttccatccaatctatggcacctttgcaactggaggctgtgatggtttcgtcaacatttgggatggtaacaacaagaagaggctatatcagtactcaaagtatccaacgagtatctcggcactgtcattcagtcgagatggtcagctgctggctgttgcttcaagttacacatttgaagagggagagaaatcgcaagaaccggaggccatctttgtaagaagcgtgaatgaaatcgaagtgaaaccaaaaccgaaagtatacccgaatcctgcggcgtagaaaggaagaaacacaagttatttcctatgttggttgtttttgtatttgctaggagtgttccaaagattgaatcaacgtatgtttgagcttttaaataactagtgaaatatccacattcaccgtatatgtttaaatttctgtagtcaaactctcttgtcaaacatataatataagatgacaaatttccagtgttt

SEQ ID NO: 22969 - protein, 340 aa, Arabidopsis thaliana
  peptide (1)..(340): Ceres Seq. ID no. 13500047
MTTVTPSAGRELSNPPSDGISNLRFSNNSDHLLVSSWDKRVRLYDVSTNSLKGEFLHGGAVLDCCFHDDFSGFSVGADYKVRRIVFNVGKEDILGTHDKAVRCVEYSYAAGQVITGSWDKTVKCWDPRGASGPERTQVGTYLQPERVYSMSLVGHRLVVATAGRHVNIYDLRNMSQPEQRRESSLKYQTRCVRCYPNGTGYALSSVEGRVAMEFFDLSEAAQAKKYAFKCHRKSEAGRDIVYPVNSIAFHPIYGTFATGGCDGFVNIWDGNNKKRLYQYSKYPTSISALSFSRDGQLLAVASSYTFEEGEKSQEPEAIFVRSVNEIEVKPKPKVYPNPAA

SEQ ID NO: 22970 - protein, 191 aa, Arabidopsis thaliana
  peptide (1)..(191): Ceres Seq. ID no. 13500048
MSLVGHRLVVATAGRHVNIYDLRNMSQPEQRRESSLKYQTRCVRCYPNGTGYALSSVEGRVAMEFFDLSEAAQAKKYAFKCHRKSEAGRDIVYPVNSIAFHPIYGTFATGGCDGFVNIWDGNNKKRLYQYSKYPTSISALSFSRDGQLLAVASSYTFEEGEKSQEPEAIFVRSVNEIEVKPKPKVYPNPAA

SEQ ID NO: 22971 - DNA, 888 bp, Arabidopsis thaliana
  misc_feature (1)..(888): Ceres Seq. ID no. 12384885
  misc_feature (1)..(888): Ortholog of  Ceres SEQ ID NO 15178880 as cited in SEQ ID NO 0
acaaacaaaacaaaaccagagatttcgttatccactgaagttcgtttgcttctgtcaaatttgccaaatcgtaaccaaaaaaagatggcagcttcttctccatctctccttctaccactaggttcagcatctagaaatggtctaaccaccaagaatccaaattcatcaagatatatagctgcaagagtcatagcttcagaaacaagagagcaaagctgtaaaatcagtaatctctctagccgtagagaagcaatgcttttggtactcggcgtctcaggaggattatcaatgagctcacttgcggcgtatgcagctggtttacctccagaagataaaccaagactctgtgaagcagaatgcgagaaagagcttgaaaatgttccaatggtaactacagagtcagggcttcagtataaggatattaaagttggtagaggcccgagtccaccggttggttttcaggttgctgctaattatgtggctatggttccatcagggcaaatattcgacagttctctggagaaaggtctaccgtatctatttcgcgttggctctggccaggtgatcaaaggacttgatgaaggaatcttgagtatgaaagctggtggcaaacgtagactctacatcccagggcctttggcgtttccaaagggtctagtttcagctccagggaggccgagagttgcgccaaacagcccggtgatatttgacgtgagcttagagttcataccaggtctcgattcagaggaagagtgaaactctgttttttcaagtgcaaattgtaatcttccatacacaattacaagattctatgtatgatatttatctcattgtactcattcattgaagaacatcacattgattaaaaacgtcagtatttttcaatcc

SEQ ID NO: 22972 - protein, 251 aa, Arabidopsis thaliana
  peptide (1)..(251): Ceres Seq. ID no. 12384886
TNKTKPEISLSTEVRLLLSNLPNRNQKKMAASSPSLLLPLGSASRNGLTTKNPNSSRYIAARVIASETREQSCKISNLSSRREAMLLVLGVSGGLSMSSLAAYAAGLPPEDKPRLCEAECEKELENVPMVTTESGLQYKDIKVGRGPSPPVGFQVAANYVAMVPSGQIFDSSLEKGLPYLFRVGSGQVIKGLDEGILSMKAGGKRRLYIPGPLAFPKGLVSAPGRPRVAPNSPVIFDVSLEFIPGLDSEEE

SEQ ID NO: 22973 - protein, 223 aa, Arabidopsis thaliana
  peptide (1)..(223): Ceres Seq. ID no. 12384887
MAASSPSLLLPLGSASRNGLTTKNPNSSRYIAARVIASETREQSCKISNLSSRREAMLLVLGVSGGLSMSSLAAYAAGLPPEDKPRLCEAECEKELENVPMVTTESGLQYKDIKVGRGPSPPVGFQVAANYVAMVPSGQIFDSSLEKGLPYLFRVGSGQVIKGLDEGILSMKAGGKRRLYIPGPLAFPKGLVSAPGRPRVAPNSPVIFDVSLEFIPGLDSEEE

SEQ ID NO: 22974 - protein, 167 aa, Arabidopsis thaliana
  peptide (1)..(167): Ceres Seq. ID no. 12384888
MLLVLGVSGGLSMSSLAAYAAGLPPEDKPRLCEAECEKELENVPMVTTESGLQYKDIKVGRGPSPPVGFQVAANYVAMVPSGQIFDSSLEKGLPYLFRVGSGQVIKGLDEGILSMKAGGKRRLYIPGPLAFPKGLVSAPGRPRVAPNSPVIFDVSLEFIPGLDSEEE

SEQ ID NO: 22975 - DNA, 1316 bp, Arabidopsis thaliana
  misc_feature (1)..(1316): Ceres Seq. ID no. 12334911
  misc_feature (1)..(1316): Ortholog of  Ceres SEQ ID NO 13589020 as cited in SEQ ID NO 68432
aaggaatcaaaattgtcagccgaacaacaaaaaaaacaagggcttttcagaaaaataaaaaacctttaaaccctttttttgtgtatccgattccgtcgcaagtacattcggactctttcacggcgtcaatgtctgagaacgcagccaacaacatcatggagaccaagatttgtacagacgccatcgtgtctgaattacagaagaagaaagttcatctcttttactgcttagagtgcgaagaacttgctcgcaacatcgccgctgaatctgatcacatcactctccaatccatcaactggaggagttttgctgatggattcccgaatctatttatcaacaacgcacatgatatccgaggccagcacgttgcgttccttgcttcattcagttcccctgctgtcatctttgagcagatctctgtcatttacttgctccctcgattgtttgttgcgtccttcactttggtgttgcctttcttccccactggctcctttgagagaatggaagaggaaggagatgtagcaactgcttttaccatggcaaggattgtctctaatatccccatttcacgcggtggtccgactagtgttgtcatctatgacattcacgctttgcaggaaaggttttactttgccgatcaggttcttcctttgtttgagactggaatcccgttgttgactaaacgccttcaacagcttcctgaaactgagaaagtcatagttgcatttcctgatgatggagcctggaagcgtttccataagctgttggatcattatcccacggttgtgtgtacaaaggttcgtgaaggcgataagagaatagtcaggctgaaggaaggaaaccctgctggttgtcacgttgttatcgtggatgatcttgtgcagtctgggggtacactcattgaatgccagaaagtattggcagcgcatggagctgtgaaggtgagtgcttatgtaactcatggtgtcttcccaaagagctcgtgggagcgtttcacccacaagaagaacggattagaagaagcgtttgcttacttctggatcacggattcttgtccacagacggttaaggccatcggaaacaaggctcctttcgaagtcttgagcctcgctggatccattgctgatgctctgcagatttgaagcagtagagataaagcctggttctttgctcgttttggacttttggtggttttatactcttaagagatgtgctttggatgatcatttatgaaataatcatatcacttttgctgaaataactagacagattgttgaaaccttgtactctgttcttgttgattgatcttcttttgc

SEQ ID NO: 22976 - protein, 379 aa, Arabidopsis thaliana
  peptide (1)..(379): Ceres Seq. ID no. 12334912
GIKIVSRTTKKTRAFQKNKKPLNPFFVYPIPSQVHSDSFTASMSENAANNIMETKICTDAIVSELQKKKVHLFYCLECEELARNIAAESDHITLQSINWRSFADGFPNLFINNAHDIRGQHVAFLASFSSPAVIFEQISVIYLLPRLFVASFTLVLPFFPTGSFERMEEEGDVATAFTMARIVSNIPISRGGPTSVVIYDIHALQERFYFADQVLPLFETGIPLLTKRLQQLPETEKVIVAFPDDGAWKRFHKLLDHYPTVVCTKVREGDKRIVRLKEGNPAGCHVVIVDDLVQSGGTLIECQKVLAAHGAVKVSAYVTHGVFPKSSWERFTHKKNGLEEAFAYFWITDSCPQTVKAIGNKAPFEVLSLAGSIADALQI

SEQ ID NO: 22977 - protein, 337 aa, Arabidopsis thaliana
  peptide (1)..(337): Ceres Seq. ID no. 12334913
MSENAANNIMETKICTDAIVSELQKKKVHLFYCLECEELARNIAAESDHITLQSINWRSFADGFPNLFINNAHDIRGQHVAFLASFSSPAVIFEQISVIYLLPRLFVASFTLVLPFFPTGSFERMEEEGDVATAFTMARIVSNIPISRGGPTSVVIYDIHALQERFYFADQVLPLFETGIPLLTKRLQQLPETEKVIVAFPDDGAWKRFHKLLDHYPTVVCTKVREGDKRIVRLKEGNPAGCHVVIVDDLVQSGGTLIECQKVLAAHGAVKVSAYVTHGVFPKSSWERFTHKKNGLEEAFAYFWITDSCPQTVKAIGNKAPFEVLSLAGSIADALQI

SEQ ID NO: 22978 - protein, 328 aa, Arabidopsis thaliana
  peptide (1)..(328): Ceres Seq. ID no. 12334914
METKICTDAIVSELQKKKVHLFYCLECEELARNIAAESDHITLQSINWRSFADGFPNLFINNAHDIRGQHVAFLASFSSPAVIFEQISVIYLLPRLFVASFTLVLPFFPTGSFERMEEEGDVATAFTMARIVSNIPISRGGPTSVVIYDIHALQERFYFADQVLPLFETGIPLLTKRLQQLPETEKVIVAFPDDGAWKRFHKLLDHYPTVVCTKVREGDKRIVRLKEGNPAGCHVVIVDDLVQSGGTLIECQKVLAAHGAVKVSAYVTHGVFPKSSWERFTHKKNGLEEAFAYFWITDSCPQTVKAIGNKAPFEVLSLAGSIADALQI

SEQ ID NO: 22979 - DNA, 1516 bp, Arabidopsis thaliana
  misc_feature (1)..(1516): Ceres Seq. ID no. 13494209
  misc_feature (1)..(1516): Ortholog of  Ceres SEQ ID NO 15172093 as cited in SEQ ID NO 54938
ctcaaattcaaaatttaacacacaaacacaaacacacacaccaaaaaaaacacagaccttaaaaaaataaaaatggttgatatggattggaagaggaagatggtatcatcagatttaccaaactcacctaagctttcttcaaagcttcacgtaactattccatcaccgttcaaaatcgtccctgtttcatctccgatctcatgttcagcacctgctctttgctctgcttacgagctttaccttcgtctccctgagctaagaaagctctggtcatctcgtgattttcctcaatggacatcagagccgattctcaaaccagctcttcaagctttggagatcagtttcagattagttttcgccgtttgttctgatactagaccgtacatcaaccaccgtgaatggaaccggaggctagattctctcatcacgaagcagatccagcttgtagcagcgatctgcgaagatgaagaagaagaaggtatatcagcggaggctccggtcggcggtggacggagttcgttgagtttgttaccgcagctagctacgtggaggagatcagaggctttggggaagaagatcttatatacgatcgataacgagatgagtcggtgtaagtacacgctcggactcggtgaacaaaacatcgccggaaaaccaaatctccggtacgatgcgatttgccgaccaaacgagatctatagcctcaaggataatccatacgcagatcatatcgataatcacgagaatcaaactctctatatcattcaccagatcctcgaatcgtggatctacgcatctggaaatcttctgaatcgaatcgtctcaagtatcgaagaagagaaattcggaaaagcttcaaacgatgtttacttgctggagaagatctggaaaattttagcggagattgaagatcttcatatgttgatggatccggaagattttttgaaattgaagaaacagttacagatcaaatcgacgggtaaaaacgatgcgttttgtttcagatctaaaggattagtggagatgatgaagatgtcgaaagatctgagacagaaagtaccggcggtcttggcggttgaggtagatccaaccggaggaccaagattacaagaggcggcgatgaagctttacgcgaggaagacagagtgcgataagattcatttgcttcaggggatgcaagcggtggaagcggcggcgaagagtttcttctttgggtataggcagttagtggcggctatgatgggaagtgcggagatgaacgcgacggcgagtcaagagtcgtgtgactcactgagtcagatatttatggagccgacgtatttcccgagccttgacgcggcaaagacgtttctgggagagttttggagtcatttgggatgattaaattttaatttctgctggtataattatttaatataaatttaaattggtggtttggtttaatttagtttgtaagatagtgaaatttttggaacatttgacgatccatatttgaatacaaattcatttttatatg

SEQ ID NO: 22980 - protein, 435 aa, Arabidopsis thaliana
  peptide (1)..(435): Ceres Seq. ID no. 13494210
MVDMDWKRKMVSSDLPNSPKLSSKLHVTIPSPFKIVPVSSPISCSAPALCSAYELYLRLPELRKLWSSRDFPQWTSEPILKPALQALEISFRLVFAVCSDTRPYINHREWNRRLDSLITKQIQLVAAICEDEEEEGISAEAPVGGGRSSLSLLPQLATWRRSEALGKKILYTIDNEMSRCKYTLGLGEQNIAGKPNLRYDAICRPNEIYSLKDNPYADHIDNHENQTLYIIHQILESWIYASGNLLNRIVSSIEEEKFGKASNDVYLLEKIWKILAEIEDLHMLMDPEDFLKLKKQLQIKSTGKNDAFCFRSKGLVEMMKMSKDLRQKVPAVLAVEVDPTGGPRLQEAAMKLYARKTECDKIHLLQGMQAVEAAAKSFFFGYRQLVAAMMGSAEMNATASQESCDSLSQIFMEPTYFPSLDAAKTFLGEFWSHLG

SEQ ID NO: 22981 - protein, 432 aa, Arabidopsis thaliana
  peptide (1)..(432): Ceres Seq. ID no. 13494211
MDWKRKMVSSDLPNSPKLSSKLHVTIPSPFKIVPVSSPISCSAPALCSAYELYLRLPELRKLWSSRDFPQWTSEPILKPALQALEISFRLVFAVCSDTRPYINHREWNRRLDSLITKQIQLVAAICEDEEEEGISAEAPVGGGRSSLSLLPQLATWRRSEALGKKILYTIDNEMSRCKYTLGLGEQNIAGKPNLRYDAICRPNEIYSLKDNPYADHIDNHENQTLYIIHQILESWIYASGNLLNRIVSSIEEEKFGKASNDVYLLEKIWKILAEIEDLHMLMDPEDFLKLKKQLQIKSTGKNDAFCFRSKGLVEMMKMSKDLRQKVPAVLAVEVDPTGGPRLQEAAMKLYARKTECDKIHLLQGMQAVEAAAKSFFFGYRQLVAAMMGSAEMNATASQESCDSLSQIFMEPTYFPSLDAAKTFLGEFWSHLG

SEQ ID NO: 22982 - protein, 426 aa, Arabidopsis thaliana
  peptide (1)..(426): Ceres Seq. ID no. 13494212
MVSSDLPNSPKLSSKLHVTIPSPFKIVPVSSPISCSAPALCSAYELYLRLPELRKLWSSRDFPQWTSEPILKPALQALEISFRLVFAVCSDTRPYINHREWNRRLDSLITKQIQLVAAICEDEEEEGISAEAPVGGGRSSLSLLPQLATWRRSEALGKKILYTIDNEMSRCKYTLGLGEQNIAGKPNLRYDAICRPNEIYSLKDNPYADHIDNHENQTLYIIHQILESWIYASGNLLNRIVSSIEEEKFGKASNDVYLLEKIWKILAEIEDLHMLMDPEDFLKLKKQLQIKSTGKNDAFCFRSKGLVEMMKMSKDLRQKVPAVLAVEVDPTGGPRLQEAAMKLYARKTECDKIHLLQGMQAVEAAAKSFFFGYRQLVAAMMGSAEMNATASQESCDSLSQIFMEPTYFPSLDAAKTFLGEFWSHLG

SEQ ID NO: 22983 - DNA, 1084 bp, Arabidopsis thaliana
  misc_feature (1)..(1084): Ceres Seq. ID no. 13580622
  misc_feature (1)..(1084): Ortholog of  Ceres SEQ ID NO 13595507 as cited in SEQ ID NO 56651
  misc_feature (1)..(1084): Ortholog of  Ceres SEQ ID NO 15227285 as cited in SEQ ID NO 58357
tcttcttcgatcttcttcctctcgtcaggtttcgtggttctaatcctcgttttattctttctccaaggaagatggctctaaaggagcagctagataaattcaacaaacagcaagtgaaatgccaatctactctttcgagcattgcttcttcaagagaaagaacgagttcttcgaggcagaatgtgcctttgcctgcggcaatcactcagaagaagcctgatgcagctcctgtcaagttttcaagcgataccgagcgacttcagaacattaacaacattagaaaagctcctgttggagctcaaatcaagcgtgtcattgatcttctctatgagagaaggctagccttgacgccagagcaaataaatgaatggtgtcatgtagatatgcatgctaataaggctgtttttgatagtttaaggaagaatccgaaagcgcattatgatggaagaaggttctcttataaggctacgcacgatgttaatgataagaaccagcttctttcgttggtgagaaaataccttgatgggattgcggtggttgatctcaaagacgcttacccgaatgtaatggaggatttgaaggctctgagtgcttcaggggacatctacttgctatcaaattcacaagaggacattgcatacccaaatgatttcaagtgtgagattaaggttgatgacgaatttaaagctctattccgtgacataaacatcccgaacgacatgctggacgtggagaaggagctgctgaaaatcggtttgaagccggcgacaaacactgcggagaggagagctgctgcacagacccatggcatatcgaataaaccgaaggataagaagaagaagaaacaagagatcagcaagagaaccaaactcaccaatgcccatcttcccgagcttttccagaaccttaacggcagcagttcccggaactgaacctcataaatggatgatcatgcggttctaaattcaaattgagcctgaattttcttgtaattgtaattgttactatcttgagtttacaaattacaatggttctcatgtattctcacgacatttgctagaaatatagaataaacacatttgtg

SEQ ID NO: 22984 - protein, 309 aa, Arabidopsis thaliana
  peptide (1)..(309): Ceres Seq. ID no. 13580623
FFDLLPLVRFRGSNPRFILSPRKMALKEQLDKFNKQQVKCQSTLSSIASSRERTSSSRQNVPLPAAITQKKPDAAPVKFSSDTERLQNINNIRKAPVGAQIKRVIDLLYERRLALTPEQINEWCHVDMHANKAVFDSLRKNPKAHYDGRRFSYKATHDVNDKNQLLSLVRKYLDGIAVVDLKDAYPNVMEDLKALSASGDIYLLSNSQEDIAYPNDFKCEIKVDDEFKALFRDINIPNDMLDVEKELLKIGLKPATNTAERRAAAQTHGISNKPKDKKKKKQEISKRTKLTNAHLPELFQNLNGSSSRN

SEQ ID NO: 22985 - protein, 286 aa, Arabidopsis thaliana
  peptide (1)..(286): Ceres Seq. ID no. 13580624
MALKEQLDKFNKQQVKCQSTLSSIASSRERTSSSRQNVPLPAAITQKKPDAAPVKFSSDTERLQNINNIRKAPVGAQIKRVIDLLYERRLALTPEQINEWCHVDMHANKAVFDSLRKNPKAHYDGRRFSYKATHDVNDKNQLLSLVRKYLDGIAVVDLKDAYPNVMEDLKALSASGDIYLLSNSQEDIAYPNDFKCEIKVDDEFKALFRDINIPNDMLDVEKELLKIGLKPATNTAERRAAAQTHGISNKPKDKKKKKQEISKRTKLTNAHLPELFQNLNGSSSRN

SEQ ID NO: 22986 - protein, 182 aa, Arabidopsis thaliana
  peptide (1)..(182): Ceres Seq. ID no. 13580625
MHANKAVFDSLRKNPKAHYDGRRFSYKATHDVNDKNQLLSLVRKYLDGIAVVDLKDAYPNVMEDLKALSASGDIYLLSNSQEDIAYPNDFKCEIKVDDEFKALFRDINIPNDMLDVEKELLKIGLKPATNTAERRAAAQTHGISNKPKDKKKKKQEISKRTKLTNAHLPELFQNLNGSSSRN

SEQ ID NO: 22987 - DNA, 972 bp, Arabidopsis thaliana
  misc_feature (1)..(972): Ceres Seq. ID no. 12370363
  misc_feature (1)..(972): Ortholog of  Ceres SEQ ID NO 15171175 as cited in SEQ ID NO 57476
  misc_feature (1)..(972): Ortholog of  Ceres SEQ ID NO 15178436 as cited in SEQ ID NO 57919
  misc_feature (1)..(972): Ortholog of  Ceres SEQ ID NO 13655808 as cited in SEQ ID NO 64901
acacacaattcttcgcggcttcttttagcttctaagcttcagagcagcaaaaaaaaaacaatggagaagcgccggagatagatctgctttcttccattctccggaccttctctagttcacgaaccaacttcttccactttattctcattcgttggagaaatggactctctcgcaaccgatccagctttcattgattcggatgtatacctcaggttaggacttattattgagggcaaacgattgaaaaagccaccgactgttctctcacgcctctcttcttctctggagagatctctgttactcaatcatgatgacaagattctgcttggatcgccagactctgttaccgtgtttgacgggagatctccccctgagatcagtattgcacactacttggatcgcattttcaagtactcttgctgcagtccctcctgcttcgtcattgcgcatatctacattgatcactttctccataagacccgagcccttctcaaaccccttaatgtccaccgccttatcattacaactgtcatgttagctgctaaagtcttcgatgataggtatttcaacaatgcatactacgcaagagtgggaggtgtgactacgagagagttaaacagattggagatggagttgttgtttacccttgacttcaagcttcaggtagatcctcagacgtttcacacacactgttgtcagttagaaaagcagaacagcgacggcttccagatcgagtggcccataaaagaagcatgccgagccaacaaagagacttggcagaagaggacacccgactcactctgctctcaaaccacagcacgctgatcggcaagggtaagataggattattttgtgttttagtagtgatgattcttttgcatgattgattgtttgtgacaattgtgtgtagtagaaaatctgaaatttctaccaactcattctttaagaagttgctataatatagtttccttg

SEQ ID NO: 22988 - protein, 221 aa, Arabidopsis thaliana
  peptide (1)..(221): Ceres Seq. ID no. 12370364
MDSLATDPAFIDSDVYLRLGLIIEGKRLKKPPTVLSRLSSSLERSLLLNHDDKILLGSPDSVTVFDGRSPPEISIAHYLDRIFKYSCCSPSCFVIAHIYIDHFLHKTRALLKPLNVHRLIITTVMLAAKVFDDRYFNNAYYARVGGVTTRELNRLEMELLFTLDFKLQVDPQTFHTHCCQLEKQNSDGFQIEWPIKEACRANKETWQKRTPDSLCSQTTAR

SEQ ID NO: 22989 - DNA, 1133 bp, Arabidopsis thaliana
  misc_feature (1)..(1133): Ceres Seq. ID no. 12324313
  misc_feature (1)..(1133): Ortholog of  Ceres SEQ ID NO 13594828 as cited in SEQ ID NO 56431
  misc_feature (1)..(1133): Ortholog of  Ceres SEQ ID NO 14316363 as cited in SEQ ID NO 57222
  misc_feature (1)..(1133): Ortholog of  Ceres SEQ ID NO 15177754 as cited in SEQ ID NO 57945
  misc_feature (1)..(1133): Ortholog of  Ceres SEQ ID NO 13594354 as cited in SEQ ID NO 58082
  misc_feature (1)..(1133): Ortholog of  Ceres SEQ ID NO 14316408 as cited in SEQ ID NO 58228
  misc_feature (1)..(1133): Ortholog of  Ceres SEQ ID NO 13528075 as cited in SEQ ID NO 60188
  misc_feature (1)..(1133): Ortholog of  Ceres SEQ ID NO 13664389 as cited in SEQ ID NO 60564
  misc_feature (1)..(1133): Ortholog of  Ceres SEQ ID NO 13600483 as cited in SEQ ID NO 0
gttttcaattatttaaattttaaattaatccaacttatcgttgacggaaaatttgggagagaatattctcgatggggaaaggaggaggttgtgttccgagcaagaagaagaagccggccaccaccggcgatggtcccggaatcgatgatgataacgacgctactaatgctccgatccaaattgacgatgatcaaaccaccattgacggcgatcgaacaacggcgacgaatactggaggaacaacaacaccagcgattactactacggctgctaagatctcgtcaccgctcaagatcttcgtcgtgttctattcgatgtacggacatgtggagagcttagcgaagaggaaaaaagggagtggatagcgtcgaaggagtggaggcgacgttgtacagagttccggagacgctttcgcaggaggttgttgagcagatgaaggcgccggttaaggatttggagattccggagattacggcggcggaattgacggcggctgatggatttctgtttggatttccgactaggtatggttgtatggctgcgcagatgaaggcgttttttgattcgacgggatcattgtggaaggagcagagtcttgctggtaagcctgctggattctttgtgagcactggcactcaaggaggtggccaagagaccactgcatggacagcaatcacacagcttgtgcaccatgggatgctatttgtaccaataggctacacatttggagctggaatgttcaagatggactcgatacgtggaggctctccttatggagcaggtgtgttcgctggtgatgggtcaagagaagcaacagaaacagaattggctcttgctgaacatcaaggaaactacatggctgcaatagtcaaaagacttgctcaaccttaaaacaaaaacaaaaattgcttcctctatttgtctcttttcattcaattcctcctcctgctaaataatcataaaaaaaaaaatcttcctttcttttctcaattccatcgaaatttctttcttttctttatgagtgttttcagtttcgccattaatggttagtgtgtacatgtttctttatattatttgtctcttatttattccttgttgtaaaataaaaacaaaatttcattacgtgttctttc

SEQ ID NO: 22990 - protein, 152 aa, Arabidopsis thaliana
  peptide (1)..(152): Ceres Seq. ID no. 12324314
MKAPVKDLEIPEITAAELTAADGFLFGFPTRYGCMAAQMKAFFDSTGSLWKEQSLAGKPAGFFVSTGTQGGGQETTAWTAITQLVHHGMLFVPIGYTFGAGMFKMDSIRGGSPYGAGVFAGDGSREATETELALAEHQGNYMAAIVKRLAQP

SEQ ID NO: 22991 - protein, 118 aa, Arabidopsis thaliana
  peptide (1)..(118): Ceres Seq. ID no. 12324315
MAAQMKAFFDSTGSLWKEQSLAGKPAGFFVSTGTQGGGQETTAWTAITQLVHHGMLFVPIGYTFGAGMFKMDSIRGGSPYGAGVFAGDGSREATETELALAEHQGNYMAAIVKRLAQP

SEQ ID NO: 22992 - protein, 114 aa, Arabidopsis thaliana
  peptide (1)..(114): Ceres Seq. ID no. 12324316
MKAFFDSTGSLWKEQSLAGKPAGFFVSTGTQGGGQETTAWTAITQLVHHGMLFVPIGYTFGAGMFKMDSIRGGSPYGAGVFAGDGSREATETELALAEHQGNYMAAIVKRLAQP

SEQ ID NO: 22993 - DNA, 1183 bp, Arabidopsis thaliana
  misc_feature (1)..(1183): Ceres Seq. ID no. 12334613
  misc_feature (1)..(1183): Ortholog of  Ceres SEQ ID NO 14310701 as cited in SEQ ID NO 53113
  misc_feature (1)..(1183): Ortholog of  Ceres SEQ ID NO 14303079 as cited in SEQ ID NO 67486
atcattcatcatcatcagacatcaggtgcgtcataagctccacaaaaaactcatccatggcgattcttagttacatctcagcaacatcaaccacaccaccaattcctcaagatcaatctcccaattctcgtctaccaaccaaaatcattctacccaataagaaacctgagaaatggtccaccggagttgctcccggagagtacggtggtcctccgactaccaccaagctccgaaagtactggggaggtgaaaaagaagatcccattacttccacagacttaatctggaacagagattttatggatcaaatgaagaaattgtttgatgatcctaatgattcttctctcgacccatctccttcaaaggaaaagtcttctgggtttctgagctttagcagagttatgagtcttgacagtatggatgttgatttaagtaaagagcttgcatcgtcttctaaatccgttgtgaaaaatcgtcttgacacctccaagtcagaagctaaaaagcaaatgagtaaggctattgtgtctcctaaatggaagctggcacctacacgtcgtgagcaagagaaatgggatagagcaacgaaggctgcaactggtggcagtgatgtgatgtttagggagctgagacggccacgtggtgacccagaagtacaagctgctaaagacagggaacaatattttaagctgaaaaataagattcaggttctcacactcggtattggtggtgttggtttagtctcagcttatatctcatacaccccagagatagcacttagttttggtgctggcttgttgggttcacttgcatatatgaggatgcttggtaactctgtagatgccatggcagatggagccagaggagttgccaaaggtgcagctaaccagccacggttactagtccccgttgtgttggttatgatattcaatagatggaacgcaatacttgttcctgagtatggattcatgcatttggagttgataccaatgttggttgggttctttacttacaaaattgctacgttctttcaagctatagaagaagccatctccattactactcaaaaacccgaatcaatctctccagacacacaggccagtgattaataaggtcaaggtcagtgttgtaagaaatgtaattaaacacagaagtgttaatgtaataaaaactaataactcac

SEQ ID NO: 22994 - protein, 368 aa, Arabidopsis thaliana
  peptide (1)..(368): Ceres Seq. ID no. 12334614
HSSSSDIRCVISSTKNSSMAILSYISATSTTPPIPQDQSPNSRLPTKIILPNKKPEKWSTGVAPGEYGGPPTTTKLRKYWGGEKEDPITSTDLIWNRDFMDQMKKLFDDPNDSSLDPSPSKEKSSGFLSFSRVMSLDSMDVDLSKELASSSKSVVKNRLDTSKSEAKKQMSKAIVSPKWKLAPTRREQEKWDRATKAATGGSDVMFRELRRPRGDPEVQAAKDREQYFKLKNKIQVLTLGIGGVGLVSAYISYTPEIALSFGAGLLGSLAYMRMLGNSVDAMADGARGVAKGAANQPRLLVPVVLVMIFNRWNAILVPEYGFMHLELIPMLVGFFTYKIATFFQAIEEAISITTQKPESISPDTQASD

SEQ ID NO: 22995 - protein, 350 aa, Arabidopsis thaliana
  peptide (1)..(350): Ceres Seq. ID no. 12334615
MAILSYISATSTTPPIPQDQSPNSRLPTKIILPNKKPEKWSTGVAPGEYGGPPTTTKLRKYWGGEKEDPITSTDLIWNRDFMDQMKKLFDDPNDSSLDPSPSKEKSSGFLSFSRVMSLDSMDVDLSKELASSSKSVVKNRLDTSKSEAKKQMSKAIVSPKWKLAPTRREQEKWDRATKAATGGSDVMFRELRRPRGDPEVQAAKDREQYFKLKNKIQVLTLGIGGVGLVSAYISYTPEIALSFGAGLLGSLAYMRMLGNSVDAMADGARGVAKGAANQPRLLVPVVLVMIFNRWNAILVPEYGFMHLELIPMLVGFFTYKIATFFQAIEEAISITTQKPESISPDTQASD

SEQ ID NO: 22996 - protein, 269 aa, Arabidopsis thaliana
  peptide (1)..(269): Ceres Seq. ID no. 12334616
MDQMKKLFDDPNDSSLDPSPSKEKSSGFLSFSRVMSLDSMDVDLSKELASSSKSVVKNRLDTSKSEAKKQMSKAIVSPKWKLAPTRREQEKWDRATKAATGGSDVMFRELRRPRGDPEVQAAKDREQYFKLKNKIQVLTLGIGGVGLVSAYISYTPEIALSFGAGLLGSLAYMRMLGNSVDAMADGARGVAKGAANQPRLLVPVVLVMIFNRWNAILVPEYGFMHLELIPMLVGFFTYKIATFFQAIEEAISITTQKPESISPDTQASD

SEQ ID NO: 22997 - DNA, 1358 bp, Arabidopsis thaliana
  misc_feature (1)..(1358): Ceres Seq. ID no. 13499728
  misc_feature (1)..(1358): Ortholog of  Ceres SEQ ID NO 14302828 as cited in SEQ ID NO 65549
cattattacaccaccgttggcctccgacgacggctcaagcctatcttcgtcgccggcttctccgatggttaccaatcgcgtagacgtcttctggcacgaaggaatgctccgacacgacgccgtagaaggcgtcttcgacactggatacgaccctggattcctcgacgtattggagaagcacccggagaacgccgatcgcgtcaggaacatgctttcgattctccgacgcggtcccatcgctcctcatgtcaattggtttaccggtcttccagcaatcgtttcggagcttctaatgtttcacacttcagagtacattgagaagctagtggaggcagataaatcaggagaaaggtgtgaaattgccgcaggtactttcatgagcccaggctcgtgggaagctgctcttcttgcagctggaacaactctttcagcaatgcaacatattcttgattgccatgggaaaattgcatatgctctggtacgcccaccaggtcaccactcacagcctactcaggctgatgggtattgcttcctcaacaacgctgctcttgctgtcaagctggcattgaattcgggttcttgttcccgagttgcggttattgacatcgatgtacattatggaaatggcacagctgaagggttttatacatctgataaggttcttacggtgtcactccatatgaaccatggatcatggggatcgtcccacccgcagaaagggtcgattgatgaacttggtgaagacgtgggattgggttacaatctgaatgtccctttaccgaatggcacgggtgaccggggatatgaatatgccatgaatgagctggtggttcctgcagttagaaggtttggacccgatatggttgttctcgttgttggtcaagactctagcgcttttgatccaaacgggagacaaagcctgacaatgaatggatacagaaggattgggcagataatgaggggagttgcagaggagcacagccatggaaggttgcttatggtgcaagaaggcgggtatcatgtaacatatgcagcttactgcctccacgccatgctcgaaggggtgctgaagattccagaaccgcatctatctgatccgatcgcttattatcccgaagaagaagctaatgctgttgctgctgtggagtcaatcaaaacatatcacaccgaatttgttccatttctcagaggaacttgaaaatgggacgtatgaatgagtttatgttattcctcgttgtcttgtgaccttttggaacacagatccaaatcaatcaggtcaaaccgtatatatcaaaatacttgttgatcaaactatcttttgtatgaaaacttattcacacgatccgactttgtttttc

SEQ ID NO: 22998 - protein, 398 aa, Arabidopsis thaliana
  peptide (1)..(398): Ceres Seq. ID no. 13499729
IITPPLASDDGSSLSSSPASPMVTNRVDVFWHEGMLRHDAVEGVFDTGYDPGFLDVLEKHPENADRVRNMLSILRRGPIAPHVNWFTGLPAIVSELLMFHTSEYIEKLVEADKSGERCEIAAGTFMSPGSWEAALLAAGTTLSAMQHILDCHGKIAYALVRPPGHHSQPTQADGYCFLNNAALAVKLALNSGSCSRVAVIDIDVHYGNGTAEGFYTSDKVLTVSLHMNHGSWGSSHPQKGSIDELGEDVGLGYNLNVPLPNGTGDRGYEYAMNELVVPAVRRFGPDMVVLVVGQDSSAFDPNGRQSLTMNGYRRIGQIMRGVAEEHSHGRLLMVQEGGYHVTYAAYCLHAMLEGVLKIPEPHLSDPIAYYPEEEANAVAAVESIKTYHTEFVPFLRGT

SEQ ID NO: 22999 - protein, 377 aa, Arabidopsis thaliana
  peptide (1)..(377): Ceres Seq. ID no. 13499730
MVTNRVDVFWHEGMLRHDAVEGVFDTGYDPGFLDVLEKHPENADRVRNMLSILRRGPIAPHVNWFTGLPAIVSELLMFHTSEYIEKLVEADKSGERCEIAAGTFMSPGSWEAALLAAGTTLSAMQHILDCHGKIAYALVRPPGHHSQPTQADGYCFLNNAALAVKLALNSGSCSRVAVIDIDVHYGNGTAEGFYTSDKVLTVSLHMNHGSWGSSHPQKGSIDELGEDVGLGYNLNVPLPNGTGDRGYEYAMNELVVPAVRRFGPDMVVLVVGQDSSAFDPNGRQSLTMNGYRRIGQIMRGVAEEHSHGRLLMVQEGGYHVTYAAYCLHAMLEGVLKIPEPHLSDPIAYYPEEEANAVAAVESIKTYHTEFVPFLRGT

SEQ ID NO: 23000 - protein, 364 aa, Arabidopsis thaliana
  peptide (1)..(364): Ceres Seq. ID no. 13499731
MLRHDAVEGVFDTGYDPGFLDVLEKHPENADRVRNMLSILRRGPIAPHVNWFTGLPAIVSELLMFHTSEYIEKLVEADKSGERCEIAAGTFMSPGSWEAALLAAGTTLSAMQHILDCHGKIAYALVRPPGHHSQPTQADGYCFLNNAALAVKLALNSGSCSRVAVIDIDVHYGNGTAEGFYTSDKVLTVSLHMNHGSWGSSHPQKGSIDELGEDVGLGYNLNVPLPNGTGDRGYEYAMNELVVPAVRRFGPDMVVLVVGQDSSAFDPNGRQSLTMNGYRRIGQIMRGVAEEHSHGRLLMVQEGGYHVTYAAYCLHAMLEGVLKIPEPHLSDPIAYYPEEEANAVAAVESIKTYHTEFVPFLRGT

SEQ ID NO: 23001 - DNA, 1237 bp, Arabidopsis thaliana
  misc_feature (1)..(1237): Ceres Seq. ID no. 13487767
  misc_feature (1)..(1237): Ortholog of  Ceres SEQ ID NO 12609146 as cited in SEQ ID NO 52118
  misc_feature (1)..(1237): Ortholog of  Ceres SEQ ID NO 13594056 as cited in SEQ ID NO 55691
  misc_feature (1)..(1237): Ortholog of  Ceres SEQ ID NO 13638136 as cited in SEQ ID NO 58644
  misc_feature (1)..(1237): Ortholog of  Ceres SEQ ID NO 13596868 as cited in SEQ ID NO 62806
  misc_feature (1)..(1237): Ortholog of  Ceres SEQ ID NO 12587035 as cited in SEQ ID NO 63605
  misc_feature (1)..(1237): Ortholog of  Ceres SEQ ID NO 14301886 as cited in SEQ ID NO 64201
  misc_feature (1)..(1237): Ortholog of  Ceres SEQ ID NO 13595885 as cited in SEQ ID NO 69265
  misc_feature (1)..(1237): Ortholog of  Ceres SEQ ID NO 12566239 as cited in SEQ ID NO 0
  misc_feature (1)..(1237): Ortholog of  Ceres SEQ ID NO 13599119 as cited in SEQ ID NO 0
  misc_feature (1)..(1237): Ortholog of  Ceres SEQ ID NO 15179992 as cited in SEQ ID NO 0
aaagaaataaagtaatgaagaaaactagaaatgttgcttcttctcctattgaatgtgtccacctccagaccaaacccaccaccactcttgttcggtctttcttcttcttcctcttcaactctcaaacaatctcttcctttatcatcttctatctcttcctctgttccttcttctggttttgccaatcaccaaacctgactaacccttctcctcctcctctctccgtcgctccccttcgcggggatgccaattctccaccgccggaatcttcttcttctccggcgacgaaatcttctttaatgatttcttctagagatcccaatgccctctttagcggcggtggaatcagctttttagcaggagttagaactgtgaagtttagttatggttattctagtcttaaaggtaaaagagcaacaatggaggattacttcgaaactagaatctctgatgttaatggacaaatggttgctttctttggtgtctttgatggtcatggtggagcaagaactgcagaatatcttaaaaacaatcttttcaagaatttagttagtcatgatgattttatctcagacactaagaaagctattgttgaagtttttaagcagacagatgaagagtatcttattgaagaggcaggacaaccgaagaatgctggctcgactgctgcgactgcttttcttataggtgataagttgattgttgctaacgttggtgattctagagttgtagcgtcaagaaatggttcagctgttccactctctgatgatcataaacctgatagatcagatgagcgacaacggattgaagatgctggtggctttattatttgggctggaacatggcgagttggtggaattcttgcggtctctcgggcttttggagataagcaacttaagccatatgtgattgcggagccagaaattcaggaggaggatataagcacattggagtttattgttgttgctagtgatggactgtggaatgtgttgtcaaacaaggatgccgtggcaatagtacgagacatttcagatgcggaaacagcagcaagaaagcttgtgcaagaaggttacgcacggggtagctgcgacaatatcacttgcattgttgtacgattcgaggtttcttgagcaagaaccaaattcatattgttcttgttctatgaatgtaccatcttcagctgttgaatacactaacatatttgggttatacaattttataaaagaaagatatattt

SEQ ID NO: 23002 - protein, 375 aa, Arabidopsis thaliana
  peptide (1)..(375): Ceres Seq. ID no. 13487768
RNKVMKKTRNVASSPIECVHLQTKPTTTLVRSFFFFLFNSQTISSFIIFYLFLCSFFWFCQSPNLTNPSPPPLSVAPLRGDANSPPPESSSSPATKSSLMISSRDPNALFSGGGISFLAGVRTVKFSYGYSSLKGKRATMEDYFETRISDVNGQMVAFFGVFDGHGGARTAEYLKNNLFKNLVSHDDFISDTKKAIVEVFKQTDEEYLIEEAGQPKNAGSTAATAFLIGDKLIVANVGDSRVVASRNGSAVPLSDDHKPDRSDERQRIEDAGGFIIWAGTWRVGGILAVSRAFGDKQLKPYVIAEPEIQEEDISTLEFIVVASDGLWNVLSNKDAVAIVRDISDAETAARKLVQEGYARGSCDNITCIVVRFEVS

SEQ ID NO: 23003 - protein, 371 aa, Arabidopsis thaliana
  peptide (1)..(371): Ceres Seq. ID no. 13487769
MKKTRNVASSPIECVHLQTKPTTTLVRSFFFFLFNSQTISSFIIFYLFLCSFFWFCQSPNLTNPSPPPLSVAPLRGDANSPPPESSSSPATKSSLMISSRDPNALFSGGGISFLAGVRTVKFSYGYSSLKGKRATMEDYFETRISDVNGQMVAFFGVFDGHGGARTAEYLKNNLFKNLVSHDDFISDTKKAIVEVFKQTDEEYLIEEAGQPKNAGSTAATAFLIGDKLIVANVGDSRVVASRNGSAVPLSDDHKPDRSDERQRIEDAGGFIIWAGTWRVGGILAVSRAFGDKQLKPYVIAEPEIQEEDISTLEFIVVASDGLWNVLSNKDAVAIVRDISDAETAARKLVQEGYARGSCDNITCIVVRFEVS

SEQ ID NO: 23004 - protein, 276 aa, Arabidopsis thaliana
  peptide (1)..(276): Ceres Seq. ID no. 13487770
MISSRDPNALFSGGGISFLAGVRTVKFSYGYSSLKGKRATMEDYFETRISDVNGQMVAFFGVFDGHGGARTAEYLKNNLFKNLVSHDDFISDTKKAIVEVFKQTDEEYLIEEAGQPKNAGSTAATAFLIGDKLIVANVGDSRVVASRNGSAVPLSDDHKPDRSDERQRIEDAGGFIIWAGTWRVGGILAVSRAFGDKQLKPYVIAEPEIQEEDISTLEFIVVASDGLWNVLSNKDAVAIVRDISDAETAARKLVQEGYARGSCDNITCIVVRFEVS

SEQ ID NO: 23005 - DNA, 883 bp, Arabidopsis thaliana
  misc_feature (1)..(883): Ceres Seq. ID no. 12385048
  misc_feature (1)..(883): Ortholog of  Ceres SEQ ID NO 13599328 as cited in SEQ ID NO 1002
  misc_feature (1)..(883): Ortholog of  Ceres SEQ ID NO 14302544 as cited in SEQ ID NO 56628
  misc_feature (1)..(883): Ortholog of  Ceres SEQ ID NO 14302529 as cited in SEQ ID NO 59789
  misc_feature (1)..(883): Ortholog of  Ceres SEQ ID NO 13584819 as cited in SEQ ID NO 64536
  misc_feature (1)..(883): Ortholog of  Ceres SEQ ID NO 13663748 as cited in SEQ ID NO 67516
  misc_feature (1)..(883): Ortholog of  Ceres SEQ ID NO 12635897 as cited in SEQ ID NO 0
gaaaatactcttttaggtttcaacagcagcttagtctctctgatctctctacctccctcacaccctaaaactcagcaacaatggccgttaccttttcagatctacacacagaggagggtgtcaaatccgtggaggagcacctcgccggaaaaacctacatctccggagatcaattgtctgtggatgatgtcaaggtttacgctgccgttccagtgaaacccagcgatgccttccccaatgctagcaagtggtacgagtccgtggcttcccaacttgctaaaagtttccctggaaaggccgttggagtacaattcggtggctctgctgctgctgctccagctgttgaagctgaggcacctgcagctgcagctgatgatgatgatgacatggatctctttggtgacgagaccgaagaagaaaagaaagctgcagaggagagggaggctgctaagaaggacaccaagaagcctaaagagagtggaaagtcttgctgtgctcatggatgttaagccatgggatgatgaaaccgacntgaagaaactggaagaggctgttcgtggtgttgagatgcctggtcttttctggggagcctcaaaacttgtaccagttggttatgggatcaagaaactcacaattatgttcacgattgttgatgacctcgtgtccccggacaacctcattgaagacttcctcacctcagagcctaacaacgagtacatccagagttgtgacattgtcgctttcaacaagatttagagacttcaaatttctccttaccgaaacatatcagaatttcaagttttgttttcgtttgtgttgtttaccgaaatgtttctttcctagttgcaagaccgctttcatgttacaataacactaaattttc

SEQ ID NO: 23006 - protein, 176 aa, Arabidopsis thaliana
  peptide (1)..(176): Ceres Seq. ID no. 12385049
  misc_feature (103)..(103): Xaa is any aa, unknown or other
MPSPMLASGTSPWLPNLLKVSLERPLEYNSVALLLLLQLLKLRHLQLQLMMMMTWISLVTRPKKKRKLQRRGRLLRRTPRSLKRVESLAVLMDVKPWDDETDXKKLEEAVRGVEMPGLFWGASKLVPVGYGIKKLTIMFTIVDDLVSPDNLIEDFLTSEPNNEYIQSCDIVAFNKI

SEQ ID NO: 23007 - protein, 172 aa, Arabidopsis thaliana
  peptide (1)..(172): Ceres Seq. ID no. 12385050
  misc_feature (99)..(99): Xaa is any aa, unknown or other
MLASGTSPWLPNLLKVSLERPLEYNSVALLLLLQLLKLRHLQLQLMMMMTWISLVTRPKKKRKLQRRGRLLRRTPRSLKRVESLAVLMDVKPWDDETDXKKLEEAVRGVEMPGLFWGASKLVPVGYGIKKLTIMFTIVDDLVSPDNLIEDFLTSEPNNEYIQSCDIVAFNKI

SEQ ID NO: 23008 - protein, 142 aa, Arabidopsis thaliana
  peptide (1)..(142): Ceres Seq. ID no. 12385051
MAVTFSDLHTEEGVKSVEEHLAGKTYISGDQLSVDDVKVYAAVPVKPSDAFPNASKWYESVASQLAKSFPGKAVGVQFGGSAAAAPAVEAEAPAAAADDDDDMDLFGDETEEEKKAAEEREAAKKDTKKPKESGKSCCAHGC

SEQ ID NO: 23009 - DNA, 1438 bp, Arabidopsis thaliana
  misc_feature (1)..(1438): Ceres Seq. ID no. 12385386
  misc_feature (1)..(1438): Ortholog of  Ceres SEQ ID NO 13639243 as cited in SEQ ID NO 56820
  misc_feature (1)..(1438): Ortholog of  Ceres SEQ ID NO 13496409 as cited in SEQ ID NO 65697
gttaagtacttggcttctaacaaacgctgtctgaatcatatttcgattctgatttttcttcatggattcgtatagccaataagttttttcaatattcaaaacaaaaaccccatcaaaataatctccggaccagtttctctttcgattcagtcggaccggaaaaacaatggcgtctgtgaaccctttcgatctcttggacgatgacgcagaggatcccagccagattgttgcgtctaagccattgaaggttgtggctccggttcagactgctaagtctggtaagatgccgactaagccgcctcctccttctcaagctgtgagggaggcaaggaacgctcctggtggaggtcgtggtgctggacgtggagggagttatggtcgtggtggacgtggtggaaacaatagggattcaaggaacaatgatggtcctgccaatgaaaacggatatggtggaggctacagacgctcagaagaaggagatggagctagacgtggtgggcctgttggtggataccgtggtgatcgccgtggaagctacagcaatggtggtgattcaggtgactctgaaagaccacgcaagaactatgaccgtcacagtagaacagcgtacgggaatgaggataaacgtgatggagctggccgtgcgaattggggaaccactcaggatgatattactccggtgactgaagaatccacagctgttgtggacaagaatttgactgttgagaagcaagatggtgaaggtgaagcaactgatgcaaagaatgaaacacctgctgagaaagcagaggaaaagcctgaggacaaggagatgactttggaagagtatgagaaggttttggaggagaagaagaaagctctgcaggcgaccaaggttgaggaaaggaaggttgacactaaagcatttgaggccatgcaacagctctcaagcaaaaagagcaacaacgatgaagtcttcatcaaactgggaacagagaaggacaagcgcattactgagagagaagagaagacaaggaagtcattgagcatcaatgagtttctgaaacctgcggatggaaagagttactacagaccaagaggtggttaccaaggtggaagggaaggacgtggaccaagagaaggaaaccagagggacggtggaagaaacctgagggaaggagggagaaaccagagggacggaggagctgcagcacaggcaccaacaccggccattggggacagtgcacagttccctactttgggtaagtaaggcaatctctccggtttggtccttcagcttctgtctggactcgtttctctgtaatatctcactcggtttggattttgttcttctgattctatttttattgttatactcttccctttagagagctgaaggttttttgttttgcgaacccaattttgggagttttaagttaaatgaggccaaaaaatcaac

SEQ ID NO: 23010 - protein, 360 aa, Arabidopsis thaliana
  peptide (1)..(360): Ceres Seq. ID no. 12385387
MASVNPFDLLDDDAEDPSQIVASKPLKVVAPVQTAKSGKMPTKPPPPSQAVREARNAPGGGRGAGRGGSYGRGGRGGNNRDSRNNDGPANENGYGGGYRRSEEGDGARRGGPVGGYRGDRRGSYSNGGDSGDSERPRKNYDRHSRTAYGNEDKRDGAGRANWGTTQDDITPVTEESTAVVDKNLTVEKQDGEGEATDAKNETPAEKAEEKPEDKEMTLEEYEKVLEEKKKALQATKVEERKVDTKAFEAMQQLSSKKSNNDEVFIKLGTEKDKRITEREEKTRKSLSINEFLKPADGKSYYRPRGGYQGGREGRGPREGNQRDGGRNLREGGRNQRDGGAAAQAPTPAIGDSAQFPTLGK

SEQ ID NO: 23011 - protein, 321 aa, Arabidopsis thaliana
  peptide (1)..(321): Ceres Seq. ID no. 12385388
MPTKPPPPSQAVREARNAPGGGRGAGRGGSYGRGGRGGNNRDSRNNDGPANENGYGGGYRRSEEGDGARRGGPVGGYRGDRRGSYSNGGDSGDSERPRKNYDRHSRTAYGNEDKRDGAGRANWGTTQDDITPVTEESTAVVDKNLTVEKQDGEGEATDAKNETPAEKAEEKPEDKEMTLEEYEKVLEEKKKALQATKVEERKVDTKAFEAMQQLSSKKSNNDEVFIKLGTEKDKRITEREEKTRKSLSINEFLKPADGKSYYRPRGGYQGGREGRGPREGNQRDGGRNLREGGRNQRDGGAAAQAPTPAIGDSAQFPTLGK

SEQ ID NO: 23012 - DNA, 1470 bp, Arabidopsis thaliana
  misc_feature (1)..(1470): Ceres Seq. ID no. 12371593
  misc_feature (1)..(1470): Ortholog of  Ceres SEQ ID NO 13597710 as cited in SEQ ID NO 64509
agattcttcaaagacctagagtgtcttcgtcttcgacgacggcaaattcgtggaagctgtttcatcgattccggcttcactgaagcggcgtcgctcgacgtttattattccgacgactaggcctttgaggcagtttctgattaacttcaggcgataatggcaaacagaacagatccgttggcaaagaatataagaggaacgaatccgcagaatctggtagagaagattgtgcgaacgaagatttatcagcacaccttttggaaggagcagtgctttggtctcacggcggagacattggtggacaaagctatggagctcgaccatctaggtggtacctttggtggtagccgcaagcctactccgttcctttgcctcatattgaagatgcttcaaatccagcctgagaaggaaattgtcgtggagttcataaaaaatgatgactacaaatatgttcgtattcttggtgcgttctatctgcgtctcactgggactgatgttgatgtctatcgctacctcgaacctctctacaatgactaccggaaagtgagacaaaagttatctgatgggaagttttcgctgacacatgtggacgaagtcattgaggaacttctaaccaaggattattcttgtgatattgcaatgccacgtttgaagaaaaggtggacgcttgaacagaatggtttattagagccaaggaaaagtgttttggaagacgactttgaagaagaggaagaaaaggaggagaatgaagggattgctgatggatctgaagatgagatggatcagcgccgtaagagtcctgaaagagaaagagaaagagacagagacaggagacgcgacagtcatagacacagggatcgtgattatgacagagactatgatatggatcgagatcatgacagagactatgaaagagaacgtgggcatggtcgagaccgggatagggagagagacagggatcactatagagagcgagatagggacagggaaagaggcagagatagagaacgagacagaagagacagggcaaggcgcagaagtagaagcaggagtagggatcgtaagagacatgaaactgatgatgtgcgggatcgggaagaacctaagaaaaagaaagaaaagaaggagaagatgaaggaagatggaaccgatcatccaaatcctgaaattgcagagatgaatagactgagagcatcactgggaatgaaacccctcagggactgaactgtgaaatgaggacatctttatcaaaccgaaacttggttcatttgcccagctaaaccggttactacactgtgatcctactcactatagttttggtttttttgagtttacctgatccctctttaatgtagaacaaaatggagaatctgtaatggcattgtactgtatgttctctaaaccgtaaacgaattgtggtcgagaaattctgaatgtaacccggttcttgatattagttgtttttaaggt

SEQ ID NO: 23013 - protein, 355 aa, Arabidopsis thaliana
  peptide (1)..(355): Ceres Seq. ID no. 12371594
MANRTDPLAKNIRGTNPQNLVEKIVRTKIYQHTFWKEQCFGLTAETLVDKAMELDHLGGTFGGSRKPTPFLCLILKMLQIQPEKEIVVEFIKNDDYKYVRILGAFYLRLTGTDVDVYRYLEPLYNDYRKVRQKLSDGKFSLTHVDEVIEELLTKDYSCDIAMPRLKKRWTLEQNGLLEPRKSVLEDDFEEEEEKEENEGIADGSEDEMDQRRKSPERERERDRDRRRDSHRHRDRDYDRDYDMDRDHDRDYERERGHGRDRDRERDRDHYRERDRDRERGRDRERDRRDRARRRSRSRSRDRKRHETDDVRDREEPKKKKEKKEKMKEDGTDHPNPEIAEMNRLRASLGMKPLRD

SEQ ID NO: 23014 - protein, 304 aa, Arabidopsis thaliana
  peptide (1)..(304): Ceres Seq. ID no. 12371595
MELDHLGGTFGGSRKPTPFLCLILKMLQIQPEKEIVVEFIKNDDYKYVRILGAFYLRLTGTDVDVYRYLEPLYNDYRKVRQKLSDGKFSLTHVDEVIEELLTKDYSCDIAMPRLKKRWTLEQNGLLEPRKSVLEDDFEEEEEKEENEGIADGSEDEMDQRRKSPERERERDRDRRRDSHRHRDRDYDRDYDMDRDHDRDYERERGHGRDRDRERDRDHYRERDRDRERGRDRERDRRDRARRRSRSRSRDRKRHETDDVRDREEPKKKKEKKEKMKEDGTDHPNPEIAEMNRLRASLGMKPLRD

SEQ ID NO: 23015 - protein, 279 aa, Arabidopsis thaliana
  peptide (1)..(279): Ceres Seq. ID no. 12371596
MLQIQPEKEIVVEFIKNDDYKYVRILGAFYLRLTGTDVDVYRYLEPLYNDYRKVRQKLSDGKFSLTHVDEVIEELLTKDYSCDIAMPRLKKRWTLEQNGLLEPRKSVLEDDFEEEEEKEENEGIADGSEDEMDQRRKSPERERERDRDRRRDSHRHRDRDYDRDYDMDRDHDRDYERERGHGRDRDRERDRDHYRERDRDRERGRDRERDRRDRARRRSRSRSRDRKRHETDDVRDREEPKKKKEKKEKMKEDGTDHPNPEIAEMNRLRASLGMKPLRD

SEQ ID NO: 23016 - DNA, 1428 bp, Arabidopsis thaliana
  misc_feature (1)..(1428): Ceres Seq. ID no. 12340445
  misc_feature (1)..(1428): Ortholog of  Ceres SEQ ID NO 14302734 as cited in SEQ ID NO 66748
aaaaaaaaatctagggttttaaggtttcttatccttcctcttcctccgccagattcttttcttgcgaagatgagcaacgacaaggacagcatgaacatgtccgatctctccaccgctcttaacgaggaggatcgtgccgggcttgttaatgctcttaagaacaagttgcagaatttggctggacaacactctgatgtccttgaaaacttgactccaccagtcaggaagcgtgtcgagtttctaagagagattcagaaccaatatgatgagatggaagcaaaattctttgaggagagagcagctcttgaagctaagtatcaaaagttatatcagcctttatataccaagcgatatgagattgtgaatggtgtggtcgaagttgaaggtgcagctgaagaagtaaaatccgaacaaggagaagataaatcagctgaagagaaaggagtaccagatttctggcttattgcattgaagaacaatgaaattactgcggaagagataactgagcgagatgaaggggctctcaagtatctcaaagatatcaagtggagtagggttgaagaaccaaaagggttcaagcttgagtttttctttgatcagaatccttacttcaagaacactgtcttgaccaagacatatcacatgattgatgaagatgagcctatccttgagaaggccctcgggacggagattgagtggtatcctggaaagtgtttgacacagaagattctaaaaaagaagccaaagaaaggatccaaaaacacaaagccgatcactaagactgaggactgtgagagtttcttcaactttttcagtccacctcaagttcctgacgatgatgaggatcttgatgatgacatggctgatgaactccaaggacaaatggagcatgattatgatatcggttcaacaatcaaagagaaaatcatctcgcatgctgtgtcatggttcactggtgaagctgttaggcagatgaccttgatattgaggacgacgatgatgagattgatgaagatgatgatgaagaggacgaggaagatgatgaggatgacgaggaggatgatgatgaggatgatgacgaggaggaagaagcagatcaaggaaagaagagcaaaaagaagaaggctggaagaagtcaacttgcggaaggtcaagcaggtgagaggccaccagaatgtaagcagcagtgaagaagtgaagaatcttggcttagttatgatgaagaagaagagtgaagagtgtctttgagccgaggttgtgtttctttaatttgcagagtcatggtccggtttattatatatcagttttgggtgattggtttgctatttaaaaaaaaaaaatgggttctttggtttggtttgtgtctcttgatttttccttttgtaatgatcttatgaatttgtttcgagttaatgtcgttctctggtc

SEQ ID NO: 23017 - protein, 415 aa, Arabidopsis thaliana
  peptide (1)..(415): Ceres Seq. ID no. 12340446
KKKSRVLRFLILPLPPPDSFLAKMSNDKDSMNMSDLSTALNEEDRAGLVNALKNKLQNLAGQHSDVLENLTPPVRKRVEFLREIQNQYDEMEAKFFEERAALEAKYQKLYQPLYTKRYEIVNGVVEVEGAAEEVKSEQGEDKSAEEKGVPDFWLIALKNNEITAEEITERDEGALKYLKDIKWSRVEEPKGFKLEFFFDQNPYFKNTVLTKTYHMIDEDEPILEKALGTEIEWYPGKCLTQKILKKKPKKGSKNTKPITKTEDCESFFNFFSPPQVPDDDEDLDDDMADELQGQMEHDYDIGSTIKEKIISHAVSWFTGEAVRQMTLILRTTMMRLMKMMMKRTRKMMRMTRRMMMRMMTRRKKQIKERRAKRRRLEEVNLRKVKQVRGHQNVSSSEEVKNLGLVMMKKKSEECL

SEQ ID NO: 23018 - protein, 392 aa, Arabidopsis thaliana
  peptide (1)..(392): Ceres Seq. ID no. 12340447
MSNDKDSMNMSDLSTALNEEDRAGLVNALKNKLQNLAGQHSDVLENLTPPVRKRVEFLREIQNQYDEMEAKFFEERAALEAKYQKLYQPLYTKRYEIVNGVVEVEGAAEEVKSEQGEDKSAEEKGVPDFWLIALKNNEITAEEITERDEGALKYLKDIKWSRVEEPKGFKLEFFFDQNPYFKNTVLTKTYHMIDEDEPILEKALGTEIEWYPGKCLTQKILKKKPKKGSKNTKPITKTEDCESFFNFFSPPQVPDDDEDLDDDMADELQGQMEHDYDIGSTIKEKIISHAVSWFTGEAVRQMTLILRTTMMRLMKMMMKRTRKMMRMTRRMMMRMMTRRKKQIKERRAKRRRLEEVNLRKVKQVRGHQNVSSSEEVKNLGLVMMKKKSEECL

SEQ ID NO: 23019 - protein, 385 aa, Arabidopsis thaliana
  peptide (1)..(385): Ceres Seq. ID no. 12340448
MNMSDLSTALNEEDRAGLVNALKNKLQNLAGQHSDVLENLTPPVRKRVEFLREIQNQYDEMEAKFFEERAALEAKYQKLYQPLYTKRYEIVNGVVEVEGAAEEVKSEQGEDKSAEEKGVPDFWLIALKNNEITAEEITERDEGALKYLKDIKWSRVEEPKGFKLEFFFDQNPYFKNTVLTKTYHMIDEDEPILEKALGTEIEWYPGKCLTQKILKKKPKKGSKNTKPITKTEDCESFFNFFSPPQVPDDDEDLDDDMADELQGQMEHDYDIGSTIKEKIISHAVSWFTGEAVRQMTLILRTTMMRLMKMMMKRTRKMMRMTRRMMMRMMTRRKKQIKERRAKRRRLEEVNLRKVKQVRGHQNVSSSEEVKNLGLVMMKKKSEECL

SEQ ID NO: 23020 - DNA, 1161 bp, Arabidopsis thaliana
  misc_feature (1)..(1161): Ceres Seq. ID no. 12339842
  misc_feature (1)..(1161): Ortholog of  Ceres SEQ ID NO 14311535 as cited in SEQ ID NO 51559
  misc_feature (1)..(1161): Ortholog of  Ceres SEQ ID NO 15176200 as cited in SEQ ID NO 55188
gagatcttggtgtcctgtcttggagatgaagaggggaatgctaaggggaatgggtttcttcttcttgattctgattttaacatcaagaataggtgggagaaaccaggacatagtcctttgtatgggtatgatttttggtaccaacctcggcacaagaccatgatcagtacatcttggggagcacctaaagccttttcgaaaggtttcaatcttcagcatgttgctgatggcttgtatggaagtcatctacatgtttatagttggccaggaggtgaaatgaaacaattaattgaccttggaccgactggtctcttacctttggagattagattcttgcatgatccgtctaaagatacagggtttgttgggagtgccatgtcaagtaatatgataagatttttcaagaacagtgatgaaacatggagccatgaggtggttatatcagttaaacctctgaaagtagaaaactggatacttccagaaatgccggggcttatcaccgacttcttgatctccctcgatgaccgattcatttactttgtgaactggctccatggagacattcgtcagtacaacatagaggaccctaaaacccctgtcttaacaggacaaatttgggttggaggattactacaaaagggcagtcctgttaaggcggttggagaagacggcaacactttccaattcgaggttcctcagatcaaggggaactctctacgaggtggacctcaaatgattcagctgagcctcgatgggaaaagattgtatgcaacaaactcgctgtttagcgcatgggatcgtcagttttatcctgaaatcatggagaaaggctcacacataattcagattgatgttgatacagaaaaaggtggtctcaccataaaccctgatttctttgtggactttggtgatgaaccagacggtccttcactagcccacgagatgagatatccaggtggagactgcacttccgatatctggatttgaatttggctttgtttagtgtgtgttttgtgttaagtttaaattgagttttattatttgttgtgtgtttagtagagttgaataaaaagggagtaagatgacccagacaattaacacttgtttgtacattttgactcctatgtgtcttatgtaataaaactttctacaattccactt

SEQ ID NO: 23021 - protein, 328 aa, Arabidopsis thaliana
  peptide (1)..(328): Ceres Seq. ID no. 12339843
EILVSCLGDEEGNAKGNGFLLLDSDFNIKNRWEKPGHSPLYGYDFWYQPRHKTMISTSWGAPKAFSKGFNLQHVADGLYGSHLHVYSWPGGEMKQLIDLGPTGLLPLEIRFLHDPSKDTGFVGSAMSSNMIRFFKNSDETWSHEVVISVKPLKVENWILPEMPGLITDFLISLDDRFIYFVNWLHGDIRQYNIEDPKTPVLTGQIWVGGLLQKGSPVKAVGEDGNTFQFEVPQIKGNSLRGGPQMIQLSLDGKRLYATNSLFSAWDRQFYPEIMEKGSHIIQIDVDTEKGGLTINPDFFVDFGDEPDGPSLAHEMRYPGGDCTSDIWI

SEQ ID NO: 23022 - protein, 275 aa, Arabidopsis thaliana
  peptide (1)..(275): Ceres Seq. ID no. 12339844
MISTSWGAPKAFSKGFNLQHVADGLYGSHLHVYSWPGGEMKQLIDLGPTGLLPLEIRFLHDPSKDTGFVGSAMSSNMIRFFKNSDETWSHEVVISVKPLKVENWILPEMPGLITDFLISLDDRFIYFVNWLHGDIRQYNIEDPKTPVLTGQIWVGGLLQKGSPVKAVGEDGNTFQFEVPQIKGNSLRGGPQMIQLSLDGKRLYATNSLFSAWDRQFYPEIMEKGSHIIQIDVDTEKGGLTINPDFFVDFGDEPDGPSLAHEMRYPGGDCTSDIWI

SEQ ID NO: 23023 - protein, 236 aa, Arabidopsis thaliana
  peptide (1)..(236): Ceres Seq. ID no. 12339845
MKQLIDLGPTGLLPLEIRFLHDPSKDTGFVGSAMSSNMIRFFKNSDETWSHEVVISVKPLKVENWILPEMPGLITDFLISLDDRFIYFVNWLHGDIRQYNIEDPKTPVLTGQIWVGGLLQKGSPVKAVGEDGNTFQFEVPQIKGNSLRGGPQMIQLSLDGKRLYATNSLFSAWDRQFYPEIMEKGSHIIQIDVDTEKGGLTINPDFFVDFGDEPDGPSLAHEMRYPGGDCTSDIWI

SEQ ID NO: 23024 - DNA, 1968 bp, Arabidopsis thaliana
  misc_feature (1)..(1968): Ceres Seq. ID no. 12357610
  misc_feature (1)..(1968): Ortholog of  Ceres SEQ ID NO 13659394 as cited in SEQ ID NO 67049
atgaaacttctcactactctctttcatttcctcttttcgttgacttactaaagtactcttgtttcaatcttcattctagagagattctgtttcatggatgctattttgccagtacccgttgatgggttcagattcgacaccggttctggatcttgttgcaaaccgaggaacaatcttgaatctgggacgaccaatcgtttcacttgtttcaacgaatctgaatctcagagcaacccttctccgaccgagtctaaggtatgttcagattaccttcctgtctttaagtacatcaatgacatgttgatggaagaagatcttgaaggtcagtcttgtatgttggaagacagtttggctttacaagccgcagagagatctttcttcgaagtgcttcaagatcaaactccaatctcgggtgatctagaggatggttctcttggaaacttcagttctataacgagtttgcatcaacctgaagtttcagaggagtcaaccagaaggtatcgacatagggatgatgatgaagatgatgatcttgagagtggaaggaaatcgaagctccctgcgatttctacggtggatgagttagcagagaagtttgaggaagtgttgttggtatgtcaaaagaatgatcagggagaagcaacagagaagaaaacaagacacgtaaaaggctcatcgaatcgatacaagcagcaaaagtcagatcagccagtagatatgaggaatcttttgatgcaatgcgcgcaagctgtggcgagttttgaccagagaagagcttttgagaaactgaaggagataagagaacactcttctcgccacggtgatgcgactcaaagacttggttatcactttgctgaggcgcttgaagctcgtattacaggaaccatgactacaccaatatctgctacttctagcagaacatcaatggtggacattttgaaggcgtacaagggatttgttcaggcttgccccaccttaataatgtgttatttcactgcaaacagaacaatcaatgagcttgcttccaaagcaaccacacttcacatcattgattttgggattctctatggatttcaatggccttgtctgatacaagctttgtcaaaacgtgacatcggaccaccactgctccgtgtgactggtatcgagcttcctcagtcaggtttccgtccatcagagcgggtagaagagaccgggcgaagactaaagaggttctgtgacaagttcaatgtcccgtttgagtacagtttcatagccaagaattgggagaacataactcttgatgatctggtgatcaatagtggcgagacaacagttgtcaactgcatcctccggctacaatatacacctgatgaaaccgtgtccctcaactcaccgagagacacggctctgaaactattcagagacatcaaccctgacctctttgtgtttgcagagattaacgggacttacaattcacccttcttcctaacaaggttcagagaagctctcttccattgctcgtcactctttgacatgtatgagaccacattatcagaagacgacaattgcaggacactggtggagagggaactaatcataagagatgcaatgagtgtgatagcctgtgaagggtctgagcggtttgcaaggccagagacctacaagcaatggcaggttaggattctaagagcaggatttagaccagcgaaactaagcaaacagatagtaaaggacgggaaagagatagtgaaagaacgttaccacaaagattttgtgatcgacaatgataaccactggatgtttcagggctggaaaggaagagtcctttatgctgtttcttgctggaaacctgctaagaagtaataaaacagttctgtaatcatttgcataattttgctagctttccatttctttgtttttggtttcaaagtgttgtagaaactgtttgctctcatatatattgaatgagtctctctctttctctct

SEQ ID NO: 23025 - protein, 583 aa, Arabidopsis thaliana
  peptide (1)..(583): Ceres Seq. ID no. 12357611
MDAILPVPVDGFRFDTGSGSCCKPRNNLESGTTNRFTCFNESESQSNPSPTESKVCSDYLPVFKYINDMLMEEDLEGQSCMLEDSLALQAAERSFFEVLQDQTPISGDLEDGSLGNFSSITSLHQPEVSEESTRRYRHRDDDEDDDLESGRKSKLPAISTVDELAEKFEEVLLVCQKNDQGEATEKKTRHVKGSSNRYKQQKSDQPVDMRNLLMQCAQAVASFDQRRAFEKLKEIREHSSRHGDATQRLGYHFAEALEARITGTMTTPISATSSRTSMVDILKAYKGFVQACPTLIMCYFTANRTINELASKATTLHIIDFGILYGFQWPCLIQALSKRDIGPPLLRVTGIELPQSGFRPSERVEETGRRLKRFCDKFNVPFEYSFIAKNWENITLDDLVINSGETTVVNCILRLQYTPDETVSLNSPRDTALKLFRDINPDLFVFAEINGTYNSPFFLTRFREALFHCSSLFDMYETTLSEDDNCRTLVERELIIRDAMSVIACEGSERFARPETYKQWQVRILRAGFRPAKLSKQIVKDGKEIVKERYHKDFVIDNDNHWMFQGWKGRVLYAVSCWKPAKK

SEQ ID NO: 23026 - protein, 515 aa, Arabidopsis thaliana
  peptide (1)..(515): Ceres Seq. ID no. 12357612
MLMEEDLEGQSCMLEDSLALQAAERSFFEVLQDQTPISGDLEDGSLGNFSSITSLHQPEVSEESTRRYRHRDDDEDDDLESGRKSKLPAISTVDELAEKFEEVLLVCQKNDQGEATEKKTRHVKGSSNRYKQQKSDQPVDMRNLLMQCAQAVASFDQRRAFEKLKEIREHSSRHGDATQRLGYHFAEALEARITGTMTTPISATSSRTSMVDILKAYKGFVQACPTLIMCYFTANRTINELASKATTLHIIDFGILYGFQWPCLIQALSKRDIGPPLLRVTGIELPQSGFRPSERVEETGRRLKRFCDKFNVPFEYSFIAKNWENITLDDLVINSGETTVVNCILRLQYTPDETVSLNSPRDTALKLFRDINPDLFVFAEINGTYNSPFFLTRFREALFHCSSLFDMYETTLSEDDNCRTLVERELIIRDAMSVIACEGSERFARPETYKQWQVRILRAGFRPAKLSKQIVKDGKEIVKERYHKDFVIDNDNHWMFQGWKGRVLYAVSCWKPAKK

SEQ ID NO: 23027 - protein, 513 aa, Arabidopsis thaliana
  peptide (1)..(513): Ceres Seq. ID no. 12357613
MEEDLEGQSCMLEDSLALQAAERSFFEVLQDQTPISGDLEDGSLGNFSSITSLHQPEVSEESTRRYRHRDDDEDDDLESGRKSKLPAISTVDELAEKFEEVLLVCQKNDQGEATEKKTRHVKGSSNRYKQQKSDQPVDMRNLLMQCAQAVASFDQRRAFEKLKEIREHSSRHGDATQRLGYHFAEALEARITGTMTTPISATSSRTSMVDILKAYKGFVQACPTLIMCYFTANRTINELASKATTLHIIDFGILYGFQWPCLIQALSKRDIGPPLLRVTGIELPQSGFRPSERVEETGRRLKRFCDKFNVPFEYSFIAKNWENITLDDLVINSGETTVVNCILRLQYTPDETVSLNSPRDTALKLFRDINPDLFVFAEINGTYNSPFFLTRFREALFHCSSLFDMYETTLSEDDNCRTLVERELIIRDAMSVIACEGSERFARPETYKQWQVRILRAGFRPAKLSKQIVKDGKEIVKERYHKDFVIDNDNHWMFQGWKGRVLYAVSCWKPAKK

SEQ ID NO: 23028 - DNA, 1134 bp, Arabidopsis thaliana
  misc_feature (1)..(1134): Ceres Seq. ID no. 13493869
  misc_feature (1)..(1134): Ortholog of  Ceres SEQ ID NO 14314442 as cited in SEQ ID NO 52358
  misc_feature (1)..(1134): Ortholog of  Ceres SEQ ID NO 12610442 as cited in SEQ ID NO 56281
  misc_feature (1)..(1134): Ortholog of  Ceres SEQ ID NO 12610713 as cited in SEQ ID NO 56591
  misc_feature (1)..(1134): Ortholog of  Ceres SEQ ID NO 12587345 as cited in SEQ ID NO 62844
  misc_feature (1)..(1134): Ortholog of  Ceres SEQ ID NO 13597357 as cited in SEQ ID NO 68961
  misc_feature (1)..(1134): Ortholog of  Ceres SEQ ID NO 13587656 as cited in SEQ ID NO 0
  misc_feature (1)..(1134): Ortholog of  Ceres SEQ ID NO 14309353 as cited in SEQ ID NO 0
  misc_feature (1)..(1134): Ortholog of  Ceres SEQ ID NO 15177686 as cited in SEQ ID NO 0
atccaaaacgtttttccttcccacaggaaaagaagaaaaacagacagcggaggactaaaacaactagccacaacacaacgcttcaaatatatattactctgccactttcttcaatcttccttcaaagattcttattacagcgacacacaactcttttccatttagatttttgattttttttggttctctaaaggaggagagaaatgttggctatcttccacgaggcgtttgctcatccgccggaggaactcaacagtccggcatctgagaaatgctctaaacaaccaaaacttccagaagaaaccctaaatgatttcttattacgttaccctctcaacactttctccatgtctttcggacaagctgctgttcttgcttacgttcgtccctctgcttccttctccatccaccagaggttgttttgtggatttgatgacatctactgtctcttctttgggagcttgaacaatctgtgtcagctaaacaaacagtatggtctcaccaagacaacaaacgaggccatgtttgtgatcgaagcttataggactcttagagacagaggtccttatccagctgatcaggtcgtcaaagacttagacggtagcttttcctttgtggtttatgatagcaaagccggctctgtcttcactgctctgggatctgatggaggggtgaagctatactggggcatagctgctgatggatctgttgttatatcagatgatttggatgttatcaaagagggttgtgctaaatcttttgctccatttcctacagggtgtatgttccatagtgaaggagggttaatgagctttgagcatccaatgaacaagatcaaggcgatgccgagggtagacagtgaaggagttctatgcggtgccaacttcaaggtggatgtgtacaatcgtgttaacagtatccctcgtcgaggaagtgaagccaattggtctctctgaatacttttaataacactttcaatttggtttctttttcgcacttgtgcttcttctccgctttcatcttagttatggactgttcctaagcttgccatgaataaaactgtgaataataaagcttttaatgttctgtttcttactttaagtcagacaataaacttttaacacttgtgatcat

SEQ ID NO: 23029 - protein, 250 aa, Arabidopsis thaliana
  peptide (1)..(250): Ceres Seq. ID no. 13493870
MLAIFHEAFAHPPEELNSPASEKCSKQPKLPEETLNDFLLRYPLNTFSMSFGQAAVLAYVRPSASFSIHQRLFCGFDDIYCLFFGSLNNLCQLNKQYGLTKTTNEAMFVIEAYRTLRDRGPYPADQVVKDLDGSFSFVVYDSKAGSVFTALGSDGGVKLYWGIAADGSVVISDDLDVIKEGCAKSFAPFPTGCMFHSEGGLMSFEHPMNKIKAMPRVDSEGVLCGANFKVDVYNRVNSIPRRGSEANWSL

SEQ ID NO: 23030 - protein, 202 aa, Arabidopsis thaliana
  peptide (1)..(202): Ceres Seq. ID no. 13493871
MSFGQAAVLAYVRPSASFSIHQRLFCGFDDIYCLFFGSLNNLCQLNKQYGLTKTTNEAMFVIEAYRTLRDRGPYPADQVVKDLDGSFSFVVYDSKAGSVFTALGSDGGVKLYWGIAADGSVVISDDLDVIKEGCAKSFAPFPTGCMFHSEGGLMSFEHPMNKIKAMPRVDSEGVLCGANFKVDVYNRVNSIPRRGSEANWSL

SEQ ID NO: 23031 - protein, 144 aa, Arabidopsis thaliana
  peptide (1)..(144): Ceres Seq. ID no. 13493872
MFVIEAYRTLRDRGPYPADQVVKDLDGSFSFVVYDSKAGSVFTALGSDGGVKLYWGIAADGSVVISDDLDVIKEGCAKSFAPFPTGCMFHSEGGLMSFEHPMNKIKAMPRVDSEGVLCGANFKVDVYNRVNSIPRRGSEANWSL

SEQ ID NO: 23032 - DNA, 1354 bp, Arabidopsis thaliana
  misc_feature (1)..(1354): Ceres Seq. ID no. 12334734
  misc_feature (1)..(1354): Ortholog of  Ceres SEQ ID NO 15226389 as cited in SEQ ID NO 52992
attagtaataaacggtcaaagaatgggactttcattgagagtgagacgtcgtggaggaagtgttagcaagaaagagatcattccggtgacaagttgctcggaggaagtggagataaccataccatcgcagtttcaatgtccgatatcttacgagctaatgaaggatccggtgattattgcctcggggatcacttacgatcgcgaaaacatcgagaagtggttcgagtccgggtaccaaacttgtcccgttacaaacacggttttgacaagtttggaacagattccgaaccatacgattcggaggatgattcaaggttggtgcgggtcgtcactaggcggcgggattgaacgaatcccgacgcctcgtgtacccgtgaccagtcatcaagtctccgagatttgtgagaggttatccgctgctacgcggcgtggagactacgccgcgtgcatggagatggttacgaagatgacgagactaggaaaagagagcgagaggaatcgaaaatgcgttaaggaaaacggcgcgggattggttctttgcgtttgcttcgacgcgttttccgaaaacgcaaatgcgtcattattattggaggagactgtgtctgtgctgacgtggatgcttcccattggtttagaaggtcaatccaaactcaccacgacgtcgtcgtttaatcgtttagtggaactgttgagaaatggtgatcaaaacgctgcgtttttgataaaagagcttcttgagcttaacgtaactcacgttcacgcgttaacaaagatcaatggcgtccaagaagcgttcatgaaatcgattaatcgcgattctacatgcgtcaactcgttaatatcaatccaccatatgatcttgacaaatcaagaaaccgtatcaaggtttcttgaattggatcttgtgaatataacagtggagatgctagtggattcagaaaacagcgtttgcgagaaagcgttaacggtattaaacgtgatttgtgaaactaaagaaggaagagagaaagtgagaagaaacaagctggtgataccgattttggtgaagaagattttgaagatttctgagaagaaagatttggtttctgtgatgtggaaggtttgtaaaagtggtgatgggtctgaagttgaagaagcgttgagattaggtgcgtttaagaagcttgttgtcatgttacaagttggatgtggtgaaggaactaaggagaaagttacagagttgttgaagatgatgaataaagttatgaagatgaatggttttgttgatcgttcttattcttcttcaattgagtttaaacatgttaagaaaccattttaatacattttgtatagaggaaacaccacaatttttttc

SEQ ID NO: 23033 - protein, 438 aa, Arabidopsis thaliana
  peptide (1)..(438): Ceres Seq. ID no. 12334735
LVINGQRMGLSLRVRRRGGSVSKKEIIPVTSCSEEVEITIPSQFQCPISYELMKDPVIIASGITYDRENIEKWFESGYQTCPVTNTVLTSLEQIPNHTIRRMIQGWCGSSLGGGIERIPTPRVPVTSHQVSEICERLSAATRRGDYAACMEMVTKMTRLGKESERNRKCVKENGAGLVLCVCFDAFSENANASLLLEETVSVLTWMLPIGLEGQSKLTTTSSFNRLVELLRNGDQNAAFLIKELLELNVTHVHALTKINGVQEAFMKSINRDSTCVNSLISIHHMILTNQETVSRFLELDLVNITVEMLVDSENSVCEKALTVLNVICETKEGREKVRRNKLVIPILVKKILKISEKKDLVSVMWKVCKSGDGSEVEEALRLGAFKKLVVMLQVGCGEGTKEKVTELLKMMNKVMKMNGFVDRSYSSSIEFKHVKKPF

SEQ ID NO: 23034 - protein, 431 aa, Arabidopsis thaliana
  peptide (1)..(431): Ceres Seq. ID no. 12334736
MGLSLRVRRRGGSVSKKEIIPVTSCSEEVEITIPSQFQCPISYELMKDPVIIASGITYDRENIEKWFESGYQTCPVTNTVLTSLEQIPNHTIRRMIQGWCGSSLGGGIERIPTPRVPVTSHQVSEICERLSAATRRGDYAACMEMVTKMTRLGKESERNRKCVKENGAGLVLCVCFDAFSENANASLLLEETVSVLTWMLPIGLEGQSKLTTTSSFNRLVELLRNGDQNAAFLIKELLELNVTHVHALTKINGVQEAFMKSINRDSTCVNSLISIHHMILTNQETVSRFLELDLVNITVEMLVDSENSVCEKALTVLNVICETKEGREKVRRNKLVIPILVKKILKISEKKDLVSVMWKVCKSGDGSEVEEALRLGAFKKLVVMLQVGCGEGTKEKVTELLKMMNKVMKMNGFVDRSYSSSIEFKHVKKPF

SEQ ID NO: 23035 - protein, 386 aa, Arabidopsis thaliana
  peptide (1)..(386): Ceres Seq. ID no. 12334737
MKDPVIIASGITYDRENIEKWFESGYQTCPVTNTVLTSLEQIPNHTIRRMIQGWCGSSLGGGIERIPTPRVPVTSHQVSEICERLSAATRRGDYAACMEMVTKMTRLGKESERNRKCVKENGAGLVLCVCFDAFSENANASLLLEETVSVLTWMLPIGLEGQSKLTTTSSFNRLVELLRNGDQNAAFLIKELLELNVTHVHALTKINGVQEAFMKSINRDSTCVNSLISIHHMILTNQETVSRFLELDLVNITVEMLVDSENSVCEKALTVLNVICETKEGREKVRRNKLVIPILVKKILKISEKKDLVSVMWKVCKSGDGSEVEEALRLGAFKKLVVMLQVGCGEGTKEKVTELLKMMNKVMKMNGFVDRSYSSSIEFKHVKKPF

SEQ ID NO: 23036 - DNA, 1173 bp, Arabidopsis thaliana
  misc_feature (1)..(1173): Ceres Seq. ID no. 12421556
  misc_feature (1)..(1173): Ortholog of  Ceres SEQ ID NO 14314442 as cited in SEQ ID NO 52358
  misc_feature (1)..(1173): Ortholog of  Ceres SEQ ID NO 12610442 as cited in SEQ ID NO 56281
  misc_feature (1)..(1173): Ortholog of  Ceres SEQ ID NO 12610713 as cited in SEQ ID NO 56591
  misc_feature (1)..(1173): Ortholog of  Ceres SEQ ID NO 12587345 as cited in SEQ ID NO 62844
  misc_feature (1)..(1173): Ortholog of  Ceres SEQ ID NO 13597357 as cited in SEQ ID NO 68961
  misc_feature (1)..(1173): Ortholog of  Ceres SEQ ID NO 13587656 as cited in SEQ ID NO 0
  misc_feature (1)..(1173): Ortholog of  Ceres SEQ ID NO 14309353 as cited in SEQ ID NO 0
  misc_feature (1)..(1173): Ortholog of  Ceres SEQ ID NO 15177686 as cited in SEQ ID NO 0
ttttgtctcgtcttccatgtccgatatatcgttaccagagaaagagagctcagagatttagttagcttaatttttcttttcgttttgaaattaaggaagtgattgttatcaccggaggagagagagaaaatgttgggaattttcagtggagctatagtatcgccgccggaagagttagtggctgccggaagcagaactccgtcgccgaaaacaaccggatcaactttagtaaaccggttcgtcgagaaaaatccatccgctgtttctgtacaagtcggcgactatgttcagcttgcttacagccatcacaacgagagtcctctccggcctagatcatttggagctaaggatgaaatattctgcttgttccaaggctcacttgacaacctaggaagcttgaaacagcagtacgggcttgcaaaaaacgcaaacgaggttctcttggtcatcgaggcttataagactctccgtgacagagctccttacccggctaaccacgttgttgctcacctaagtggcgatttcgcctttgtggtctttgataaatcaacctccactctgtttgtagcctctgaccaagttggcaaggttccattgtattggggaataacagctgatggctatgtggcatttgctgatgatgttgacttactaaaaggtgcttgtggcaagtctcttgcgtctttccctcaaggctgttattactcgacggcattaggtgggcttaggagcttcgagaaccctaagaacaagatcactgcagttcctgctaatgagggagaaatttggggagctaccttcaaggtggaaggagcaacagttcttgcagattgaaaatgaaagagaaacacaaaagaagtttcatgtctcttaaagctctcgaactgtaacagcacaaacaaaaaaaaatatgtaggaaaaacaaaaagctgttctatgagtacttgaagctatcaatggttggtgataatgtgtgtagtgttgtatctctcttatgtcttatgcttctttgtacagcacgtgtgtgtcttctggtgttattagtgtcttcttcctaataagttaatgtctctgaaacaaaaatctaccttctcttgatccttttgcctctgtttctatagtaaatctcacaatggtaatgaggaagaacaggcgatatctctgtttctatcg

SEQ ID NO: 23037 - protein, 234 aa, Arabidopsis thaliana
  peptide (1)..(234): Ceres Seq. ID no. 12421557
MLGIFSGAIVSPPEELVAAGSRTPSPKTTGSTLVNRFVEKNPSAVSVQVGDYVQLAYSHHNESPLRPRSFGAKDEIFCLFQGSLDNLGSLKQQYGLAKNANEVLLVIEAYKTLRDRAPYPANHVVAHLSGDFAFVVFDKSTSTLFVASDQVGKVPLYWGITADGYVAFADDVDLLKGACGKSLASFPQGCYYSTALGGLRSFENPKNKITAVPANEGEIWGATFKVEGATVLAD

SEQ ID NO: 23038 - DNA, 1145 bp, Arabidopsis thaliana
  misc_feature (1)..(1145): Ceres Seq. ID no. 12394841
  misc_feature (1)..(1145): Ortholog of  Ceres SEQ ID NO 13581848 as cited in SEQ ID NO 51340
  misc_feature (1)..(1145): Ortholog of  Ceres SEQ ID NO 13595392 as cited in SEQ ID NO 56164
  misc_feature (1)..(1145): Ortholog of  Ceres SEQ ID NO 12618341 as cited in SEQ ID NO 64256
ctctgctaaattctgtctgatctaaaaaatcaacgaacacaaaactcatcaaagctcctcaaaaccctaaacacagtctctccatcttcttcaatctctctctcgttcggattctcatctcttcttctggtttcagattgagtcttgttactgtgtttcataagactattgaagttaagatgtctggagcattgaatatgactcttgatgagattgttaagaggggtaaaactgcaaggtctgggggaagagggatttctcgtgggcgtggtcgtggacgtggtggtggtggaagaggagctggacctgctagaagaggtcctcttgctgtgaatgctcgtccatcatctttcaccattaacaagcctgtccgtagggtcaggagcttgccatggcaaagcggtttgtttgaagatggcctaagagctgccggggcatcaggagttgaagttggaaccaggctccatgttacaaatctggaccagggtgtgacaaatgaagatataagggaactcttctctgagattggggaggtagagcgttatgcgattcattatgacaaaaatgggcgtccaagtggcacagctgaagtggtgtatccaagaagaagtgatgcatttcaagctctgaagaaatataacaatgtgctattggatggaaggccaatgagacttgagattttgggtggcaacaattcttccgaggctcctttatctggtcgtgtgaatgtgaatgtcactggactcaatggaaggctgaagaggacggttgttatccaacaaggaggaggagggagaggaggaagaggtccagctcctactgtcagtcgccgccttccaattcataaccagcagggaggagggatgagaggaggaagaggcgggtttcgtgctagagggcgtggtaatggtggccgtggtcgtggtggtggaagaggaaatggaaagaagccagtggagaagtcagctgctgatcttgacaaagatcttgagagctatcacgctgatgccatgaacacctcttaaatcgtgttgtgttgttcttactaaactagtttcagatgaaatcatgcttctctttttttcatgctcttcgttggttttgttggatgttgattgtaaagtaaatggaagccttttagaatc

SEQ ID NO: 23039 - protein, 281 aa, Arabidopsis thaliana
  peptide (1)..(281): Ceres Seq. ID no. 12394842
MSGALNMTLDEIVKRGKTARSGGRGISRGRGRGRGGGGRGAGPARRGPLAVNARPSSFTINKPVRRVRSLPWQSGLFEDGLRAAGASGVEVGTRLHVTNLDQGVTNEDIRELFSEIGEVERYAIHYDKNGRPSGTAEVVYPRRSDAFQALKKYNNVLLDGRPMRLEILGGNNSSEAPLSGRVNVNVTGLNGRLKRTVVIQQGGGGRGGRGPAPTVSRRLPIHNQQGGGMRGGRGGFRARGRGNGGRGRGGGRGNGKKPVEKSAADLDKDLESYHADAMNTS

SEQ ID NO: 23040 - protein, 275 aa, Arabidopsis thaliana
  peptide (1)..(275): Ceres Seq. ID no. 12394843
MTLDEIVKRGKTARSGGRGISRGRGRGRGGGGRGAGPARRGPLAVNARPSSFTINKPVRRVRSLPWQSGLFEDGLRAAGASGVEVGTRLHVTNLDQGVTNEDIRELFSEIGEVERYAIHYDKNGRPSGTAEVVYPRRSDAFQALKKYNNVLLDGRPMRLEILGGNNSSEAPLSGRVNVNVTGLNGRLKRTVVIQQGGGGRGGRGPAPTVSRRLPIHNQQGGGMRGGRGGFRARGRGNGGRGRGGGRGNGKKPVEKSAADLDKDLESYHADAMNTS

SEQ ID NO: 23041 - DNA, 1311 bp, Arabidopsis thaliana
  misc_feature (1)..(1311): Ceres Seq. ID no. 13580767
  misc_feature (1)..(1311): Ortholog of  Ceres SEQ ID NO 13596392 as cited in SEQ ID NO 62136
  misc_feature (1)..(1311): Ortholog of  Ceres SEQ ID NO 13596394 as cited in SEQ ID NO 68561
ctctccctctttcccccttacgtaaccctaagcggacggagcaatgctctgctagatctatctttctttcaattcttcaccagagatcgtcgagactcaccattgaaatcgaagaaacagcaccaatttccacttcaccaccgaaagagagagacagagaggataataaaaggccgccatggatttagatcaatggatttccaaggttaaagacggccaacatctctctgaggacgagcttcaacttctctgcgaatacgtgaaagaaattcttattgaggaatcaaatgtacaacctgtcaacagtcctgtcaccgtctgtggtgatatccatggccagtttcatgatcttatgaagcttttccagaccggagcatgttcccgagaccaattacatatttatgggggatttcgttgatagaggttacaacagtcttgaagttttcaccattcttttgcttcttaaagcaagacatccagccaatatcactcttttgcgtggaaatcatgaaagtagacagctaactcaggtgtatggtttctatgacgaatgccaaaggaagtatggtaatgctaatgcttggagatattgcacggatgtttttgactatcttacactttcagctattatagatggcactgttctatgtgttcatggtggcctttcacctgatgtacggacaattgaccagataagattgattgagcggaattgcgaaataccgcatgaaggacccttctgtgatcttatgtggagtgatcctgaagatattgaaacatgggctgtcagtccacgtggagctggttggcttttcgggtccagggttaccactgagtttaaccatattaacaatcttgatctagtatgtcgcgctcaccagcttgtacaagaaggtctcaagtacatgttccaagataaaggtcttgtaactgtgtggtctgcgcctaattactgctaccgttgtgggaatgtggcttctatattgagtttcaatgacaacatggaaagggaagtgaagttcttcacggagacagaagagaacaatcaaatgagagggccaaggacaggtgttccttatttcctgtgattcatgatgatgatcctacatcattattagtctcgtattgctcttatcaatttagccattatcatgattgccattggcttatgttctttcaaggtatatcttctgatgttgtttacacttccattgttttttttttcctttttccattttggaaacattttcttgtgaaagtgaatgtcactttggtaattttagtggttttgatgcactttaacctgaaccc

SEQ ID NO: 23042 - protein, 228 aa, Arabidopsis thaliana
  peptide (1)..(228): Ceres Seq. ID no. 13580768
MGDFVDRGYNSLEVFTILLLLKARHPANITLLRGNHESRQLTQVYGFYDECQRKYGNANAWRYCTDVFDYLTLSAIIDGTVLCVHGGLSPDVRTIDQIRLIERNCEIPHEGPFCDLMWSDPEDIETWAVSPRGAGWLFGSRVTTEFNHINNLDLVCRAHQLVQEGLKYMFQDKGLVTVWSAPNYCYRCGNVASILSFNDNMEREVKFFTETEENNQMRGPRTGVPYFL

SEQ ID NO: 23043 - DNA, 1591 bp, Arabidopsis thaliana
  misc_feature (1)..(1591): Ceres Seq. ID no. 13611683
  misc_feature (1)..(1591): Ortholog of  Ceres SEQ ID NO 13596512 as cited in SEQ ID NO 62074
atcgccgagtctgcttcttcttctctctctctctctctagtggtcacactcacttcacacccgtgaaaaaaccctaggaaccaaatatggtgaacctctcgagatccgtcgcgttgatctctgtattcctccttcctttacttagcttctctttctccgtcgataatccgacggatcggcgtgttcttgttcttctcgatgatttatcactcaaatcctctcattctatcttcttcaacactctcaagtctcgtggattcgatctcgatttcaagttagctgaagattcgaagcttgcgcttcaacgatacggccagtacttgtacgatgggttgatcatcttcgccccatcaacagaacggtttggaggatccttggattcgaaatccattgctgattttgttgattccggtcgtgacttgatcttatcggcggatactgctgcatctgatttgattaggggtattgccacagagtgtggggttgatttcgatgaggattcttcagctatggttattgatcatactagcttctccgtctctgatgttgacggcgaccacaccttgattgctgccgacgatttagtgaaatccgatgtcattttgggaaaaaccaagattgaggctcccgtgctcttcagaggagttgcacattcgttgaaccctactaacaatctggttttgaaagttctttcagcctctccatcagcttattctgctaacccaagctcgaagttgtctagtcccccccagctcactgggtcttcaatttcgctagtctcggtcatgcaggccaggaacaatgctagggttgtgatctcaggctcagtgcagttgtttagcgataggttaatcagatctggtgtccagaaagcagggagtccgaaccaatacgaaaaatctggcaacgaacagtttgtgactgaactaagcaaatgggtcttccacgaaaggggccatctgaaggctggtaatcttgtacaccatagggttggagaaacagatgagccagctatatataggataaaggatgacctggaattttctgtagagatatatgagtggtcaggaaagagctgggagccgtatgttgctaacgatgtgcaggttcagttttacatgatgagcccgtatgtgttgaaaaccctgtcaacagacaagaagggtctgtttcatacatctttcaaggttcctgatgtctacggtgtattccagtttaaggttgaatatgaaaagctaggctacactacattatctctttcgaagcagattccggtgcggccttacagacacaatgagtatgagagatttatcccaactgcgtatccttattatggagcctgctttacgacgatggctggtttcttcgtcttcagcttcgtctacctctaccataagtagaatcccttaaatggtggccaagtcccataaagtaagccaaacctccatatttagatgagaaaaaacaactttcgaactagagaccaatatttttgggcagcaaggttttcatatgtttctagttttagccaaacagttgcaaccttctttttgtttcccagatatttctatgttaacgtaactttacaccc

SEQ ID NO: 23044 - protein, 437 aa, Arabidopsis thaliana
  peptide (1)..(437): Ceres Seq. ID no. 13611684
MVNLSRSVALISVFLLPLLSFSFSVDNPTDRRVLVLLDDLSLKSSHSIFFNTLKSRGFDLDFKLAEDSKLALQRYGQYLYDGLIIFAPSTERFGGSLDSKSIADFVDSGRDLILSADTAASDLIRGIATECGVDFDEDSSAMVIDHTSFSVSDVDGDHTLIAADDLVKSDVILGKTKIEAPVLFRGVAHSLNPTNNLVLKVLSASPSAYSANPSSKLSSPPQLTGSSISLVSVMQARNNARVVISGSVQLFSDRLIRSGVQKAGSPNQYEKSGNEQFVTELSKWVFHERGHLKAGNLVHHRVGETDEPAIYRIKDDLEFSVEIYEWSGKSWEPYVANDVQVQFYMMSPYVLKTLSTDKKGLFHTSFKVPDVYGVFQFKVEYEKLGYTTLSLSKQIPVRPYRHNEYERFIPTAYPYYGACFTTMAGFFVFSFVYLYHK

SEQ ID NO: 23045 - protein, 296 aa, Arabidopsis thaliana
  peptide (1)..(296): Ceres Seq. ID no. 13611685
MVIDHTSFSVSDVDGDHTLIAADDLVKSDVILGKTKIEAPVLFRGVAHSLNPTNNLVLKVLSASPSAYSANPSSKLSSPPQLTGSSISLVSVMQARNNARVVISGSVQLFSDRLIRSGVQKAGSPNQYEKSGNEQFVTELSKWVFHERGHLKAGNLVHHRVGETDEPAIYRIKDDLEFSVEIYEWSGKSWEPYVANDVQVQFYMMSPYVLKTLSTDKKGLFHTSFKVPDVYGVFQFKVEYEKLGYTTLSLSKQIPVRPYRHNEYERFIPTAYPYYGACFTTMAGFFVFSFVYLYHK

SEQ ID NO: 23046 - DNA, 1405 bp, Arabidopsis thaliana
  misc_feature (1)..(1405): Ceres Seq. ID no. 13493877
  misc_feature (1)..(1405): Ortholog of  Ceres SEQ ID NO 14316017 as cited in SEQ ID NO 67028
aacaaatatctcctgctcttacatctgagtctttttctttctaaccttctgattcatgagtaatcatatgtccattatgaagttcttgaatcaaatcctctgtctctctcttatcctctccatatccatgactactctttcctttgctcagacatgttctaaatacaagttctccagcaacaatgtctttgactcttgcaacgatcttccttttcttgattccttcctccattacacttacgagtcttccaccgggagcctccacattgcttatcgccacactaagctcacctctggtaaatgggttgcttgggctgtgaacccaacgtctacgggaatggtgggagctcaagccatcgttgcttatccacaatcagatggtactgtcagggtttacacttctcccatcagaagctaccagacgagtctactagagggtgatctgagtttcaatgtctctggtttgtctgcaacttaccagaacaatgagatcgttgtgttggcaagtctgaagcttgcacaggatcttgggaatggtggaaccattaacacagtgtggcaagatgggtcaatgtctgggaacagtcttctgcctcatccaacttctggcaacaatgttcgatcagtgtcaactctcaatctggtatccggtgtttcagcagctgcaggaggagctggaggaagttccaagcttcgcaaacgcaatattcatggaatattgaatggagtgagctggggaatcatgatgccactaggggcaatcattgctcgatacttgagagtagccaaatcagcagaccctgcttggttctacattcacgttttctgccaggcttctgcttacatcatcggtgttgccggatgggccactggtctcaaactcggtggcgactcaccagggattcagtacagcacccaccgtgccatcgggatcgctctcttctctctagcgacagttcaggtgtttgcgatgtttctgaggccaaaaccagagcacaagcataggctctactggaacatttaccaccacacgatcggctacacgataatcatcctaggggtggtgaacgttttcaaagggctaggcatattgagtcccaagaagcagtggaaaaatgcctacatcggtatcattgttgttctcgccattgtggccaccctactcgaagccttcacctggtatgtagtcattaaaagaaggaaactggaggctaaaacggctcagcatggagcatctaacggcactcggtctcagtatgcttaagattagcaacagacttgcttccttttctctttgtgcatagagacacagttatttatctgcttatctatctgttcccatatgcaatgatgattttttacattcatgatttaggatttataatgccatttttatttgatcagc

SEQ ID NO: 23047 - protein, 402 aa, Arabidopsis thaliana
  peptide (1)..(402): Ceres Seq. ID no. 13493878
MSNHMSIMKFLNQILCLSLILSISMTTLSFAQTCSKYKFSSNNVFDSCNDLPFLDSFLHYTYESSTGSLHIAYRHTKLTSGKWVAWAVNPTSTGMVGAQAIVAYPQSDGTVRVYTSPIRSYQTSLLEGDLSFNVSGLSATYQNNEIVVLASLKLAQDLGNGGTINTVWQDGSMSGNSLLPHPTSGNNVRSVSTLNLVSGVSAAAGGAGGSSKLRKRNIHGILNGVSWGIMMPLGAIIARYLRVAKSADPAWFYIHVFCQASAYIIGVAGWATGLKLGGDSPGIQYSTHRAIGIALFSLATVQVFAMFLRPKPEHKHRLYWNIYHHTIGYTIIILGVVNVFKGLGILSPKKQWKNAYIGIIVVLAIVATLLEAFTWYVVIKRRKLEAKTAQHGASNGTRSQYA

SEQ ID NO: 23048 - protein, 398 aa, Arabidopsis thaliana
  peptide (1)..(398): Ceres Seq. ID no. 13493879
MSIMKFLNQILCLSLILSISMTTLSFAQTCSKYKFSSNNVFDSCNDLPFLDSFLHYTYESSTGSLHIAYRHTKLTSGKWVAWAVNPTSTGMVGAQAIVAYPQSDGTVRVYTSPIRSYQTSLLEGDLSFNVSGLSATYQNNEIVVLASLKLAQDLGNGGTINTVWQDGSMSGNSLLPHPTSGNNVRSVSTLNLVSGVSAAAGGAGGSSKLRKRNIHGILNGVSWGIMMPLGAIIARYLRVAKSADPAWFYIHVFCQASAYIIGVAGWATGLKLGGDSPGIQYSTHRAIGIALFSLATVQVFAMFLRPKPEHKHRLYWNIYHHTIGYTIIILGVVNVFKGLGILSPKKQWKNAYIGIIVVLAIVATLLEAFTWYVVIKRRKLEAKTAQHGASNGTRSQYA

SEQ ID NO: 23049 - protein, 395 aa, Arabidopsis thaliana
  peptide (1)..(395): Ceres Seq. ID no. 13493880
MKFLNQILCLSLILSISMTTLSFAQTCSKYKFSSNNVFDSCNDLPFLDSFLHYTYESSTGSLHIAYRHTKLTSGKWVAWAVNPTSTGMVGAQAIVAYPQSDGTVRVYTSPIRSYQTSLLEGDLSFNVSGLSATYQNNEIVVLASLKLAQDLGNGGTINTVWQDGSMSGNSLLPHPTSGNNVRSVSTLNLVSGVSAAAGGAGGSSKLRKRNIHGILNGVSWGIMMPLGAIIARYLRVAKSADPAWFYIHVFCQASAYIIGVAGWATGLKLGGDSPGIQYSTHRAIGIALFSLATVQVFAMFLRPKPEHKHRLYWNIYHHTIGYTIIILGVVNVFKGLGILSPKKQWKNAYIGIIVVLAIVATLLEAFTWYVVIKRRKLEAKTAQHGASNGTRSQYA

SEQ ID NO: 23050 - DNA, 2343 bp, Arabidopsis thaliana
  misc_feature (1)..(2343): Ceres Seq. ID no. 12325268
  misc_feature (1)..(2343): Ortholog of  Ceres SEQ ID NO 15176771 as cited in SEQ ID NO 55128
atcattttgtatcatcccttgaaaacgttaaatgatcttctcctccgatcattagtctctttaatctttctcagcctcttcttgttcgtgatctctcttcctccggaaaaagatgtcggccggtaacggaaatgctactaacggtgacggagggtttagtttccctaaaggaccggtgatgccgaagataacgaccggagcagcaaagagaggtagcggagtctgccacgacgatagtggtccgacggtgaatgccacaaccatcgatgagcttcattcgttacagaagaaacgttctgctcctaccacaccgatcaaccaaaacgccgccgctgcttttgccgccgtctccgaggaggagcgtcagaagattcagcttcaatctatcagtgcatcgttagcatcgttaacgagagagtcaggaccaaaggtggtgagaggagatccggcggagaagaagaccgatggttcaactactccggcgtacgctcacggccaacatcattctatcttttctccggctactggtgctgtcagtgatagctccttgaagtttactcacgtcctctacaatctttcgcctgcagagctttatgagcaagctattaagtatgagaaaggttcgtttatcacttctaatggagctttggcgacgctttctggtgctaagactggtcgtgctcccagagataagcgtgttgttagagatgctactactgaggatgagctttggtggggaaagggttcgccgaatatcgaaatggatgaacatactttcatggtgaacagagaaagagctgttgattacttgaattccttggaaaaggtctttgtcaatgaccaatacttaaactgggatccagagaacagaatcaaagtcaggattgtctcagctagagcttaccattcattgtttatgcacaacatgtgtatccgaccaactcaggaggagcttgagagctttggtactccggattttactatatacaatgctgggcagtttccatgtaatcgttacactcattacatgacttcgtccactagcgtagaccttaatctggctaggagggaaatggttatacttggtactcagtatgctggggaaatgaagaagggtcttttcagtgtgatgcattaccttatgcctaagcgtcgtattctctcccttcattctggatgcaatatgggaaaagatggagatgttgctctcttctttggactttcaggtaccgggaagacaacgctgtctactgatcacaacaggtatcttattggagatgatgagcattgttggactgagactggtgtttcgaacattgagggtgggtgctatgctaagtgtgttgatctttcgagggagaaggagcctgatatctggaacgctatcaagtttggaacagttttggaaaatgttgtgtttgatgagcacaccagagaagtggattactctgataaatctgttacagagaacacacgtgctgcctacccaattgagttcattccaaatgcgaaaataccttgtgttggtccacacccgacaaatgtgatacttctggcttgtgatgcctttggtgttctcccacctgtgagcaagctgaatctggcacaaaccatgtaccacttcatcagtggttacactgctctggttgctggcacagaggatggtatcaaggagccaacagcaacattctcagcttgctttggtgcagctttcataatgttgcatcccacaaagtatgcagctatgttagctgagaagatgaagtcacaaggtgctactggttggctcgtcaacactggttggtctggtggcagttatggtgttggaaacagaatcaagctggcatacactagaaagatcatcgatgcaatccattcgggcagtctcttgaaggcaaactacaagaaaaccgaaatctttggatttgaaatcccaactgagatcgaagggataccttcagagatcttggaccccgtcaactcctggtctgataagaaggcacacaaagatactctggtgaaactgggaggtctgttcaagaagaacttcgaggtttttgctaaccataagattggtgtggatggtaagcttacggaggagattctcgctgctggtcctatcttttagaaaaaccaaactctgaatgatgttgtcgaaaagaaagaaagatctactattattaagaagaataaaatgagactttgtgtttttctttgctgtgataatctctctgaataatagagagaatttaatgttccaaatgtggtgcgatatggataatgatgatgactatatgtaatttattactatccatcgtcatatatttttgttgggcctttgcc

SEQ ID NO: 23051 - protein, 671 aa, Arabidopsis thaliana
  peptide (1)..(671): Ceres Seq. ID no. 12325269
MSAGNGNATNGDGGFSFPKGPVMPKITTGAAKRGSGVCHDDSGPTVNATTIDELHSLQKKRSAPTTPINQNAAAAFAAVSEEERQKIQLQSISASLASLTRESGPKVVRGDPAEKKTDGSTTPAYAHGQHHSIFSPATGAVSDSSLKFTHVLYNLSPAELYEQAIKYEKGSFITSNGALATLSGAKTGRAPRDKRVVRDATTEDELWWGKGSPNIEMDEHTFMVNRERAVDYLNSLEKVFVNDQYLNWDPENRIKVRIVSARAYHSLFMHNMCIRPTQEELESFGTPDFTIYNAGQFPCNRYTHYMTSSTSVDLNLARREMVILGTQYAGEMKKGLFSVMHYLMPKRRILSLHSGCNMGKDGDVALFFGLSGTGKTTLSTDHNRYLIGDDEHCWTETGVSNIEGGCYAKCVDLSREKEPDIWNAIKFGTVLENVVFDEHTREVDYSDKSVTENTRAAYPIEFIPNAKIPCVGPHPTNVILLACDAFGVLPPVSKLNLAQTMYHFISGYTALVAGTEDGIKEPTATFSACFGAAFIMLHPTKYAAMLAEKMKSQGATGWLVNTGWSGGSYGVGNRIKLAYTRKIIDAIHSGSLLKANYKKTEIFGFEIPTEIEGIPSEILDPVNSWSDKKAHKDTLVKLGGLFKKNFEVFANHKIGVDGKLTEEILAAGPIF

SEQ ID NO: 23052 - protein, 649 aa, Arabidopsis thaliana
  peptide (1)..(649): Ceres Seq. ID no. 12325270
MPKITTGAAKRGSGVCHDDSGPTVNATTIDELHSLQKKRSAPTTPINQNAAAAFAAVSEEERQKIQLQSISASLASLTRESGPKVVRGDPAEKKTDGSTTPAYAHGQHHSIFSPATGAVSDSSLKFTHVLYNLSPAELYEQAIKYEKGSFITSNGALATLSGAKTGRAPRDKRVVRDATTEDELWWGKGSPNIEMDEHTFMVNRERAVDYLNSLEKVFVNDQYLNWDPENRIKVRIVSARAYHSLFMHNMCIRPTQEELESFGTPDFTIYNAGQFPCNRYTHYMTSSTSVDLNLARREMVILGTQYAGEMKKGLFSVMHYLMPKRRILSLHSGCNMGKDGDVALFFGLSGTGKTTLSTDHNRYLIGDDEHCWTETGVSNIEGGCYAKCVDLSREKEPDIWNAIKFGTVLENVVFDEHTREVDYSDKSVTENTRAAYPIEFIPNAKIPCVGPHPTNVILLACDAFGVLPPVSKLNLAQTMYHFISGYTALVAGTEDGIKEPTATFSACFGAAFIMLHPTKYAAMLAEKMKSQGATGWLVNTGWSGGSYGVGNRIKLAYTRKIIDAIHSGSLLKANYKKTEIFGFEIPTEIEGIPSEILDPVNSWSDKKAHKDTLVKLGGLFKKNFEVFANHKIGVDGKLTEEILAAGPIF

SEQ ID NO: 23053 - protein, 455 aa, Arabidopsis thaliana
  peptide (1)..(455): Ceres Seq. ID no. 12325271
MDEHTFMVNRERAVDYLNSLEKVFVNDQYLNWDPENRIKVRIVSARAYHSLFMHNMCIRPTQEELESFGTPDFTIYNAGQFPCNRYTHYMTSSTSVDLNLARREMVILGTQYAGEMKKGLFSVMHYLMPKRRILSLHSGCNMGKDGDVALFFGLSGTGKTTLSTDHNRYLIGDDEHCWTETGVSNIEGGCYAKCVDLSREKEPDIWNAIKFGTVLENVVFDEHTREVDYSDKSVTENTRAAYPIEFIPNAKIPCVGPHPTNVILLACDAFGVLPPVSKLNLAQTMYHFISGYTALVAGTEDGIKEPTATFSACFGAAFIMLHPTKYAAMLAEKMKSQGATGWLVNTGWSGGSYGVGNRIKLAYTRKIIDAIHSGSLLKANYKKTEIFGFEIPTEIEGIPSEILDPVNSWSDKKAHKDTLVKLGGLFKKNFEVFANHKIGVDGKLTEEILAAGPIF

SEQ ID NO: 23054 - DNA, 1299 bp, Arabidopsis thaliana
  misc_feature (1)..(1299): Ceres Seq. ID no. 12579928
  misc_feature (1)..(1299): Ortholog of  Ceres SEQ ID NO 15172464 as cited in SEQ ID NO 59111
caaaattcccacaaaaatctttcctccaataacataacaaaacaactcttcttctacaacaaactatgttttgattttttagtttcttcttccacacaatacaaaagaaatggggttttattcactgaagcagctcttgttactttacatcatcatcatggctgttctcagatctcaagctagcaaaatcttcttcaccagagtacacgaacctaatctacaaaggttgtgcaagacagagattatcagatccatctggtttatactcacaagctctctctgcaatgtatggcttattggttactcaatcaacgaaaacaagattctacaaaaccacaactggaacaacaagccaaacaagcgtcactggtcttttccagtgtagaggagatttaagtaacaacgactgttacaactgtgttagtcgtcttcctgttctctctggtaagctctgtggcaaaaccattgctgctagagttcagctctccggctgttatcttctctatgaaatctctggctttgcccaaatttcaggaatggagttgttattcaagacatgtgggaagaacaacgtcgccgggacaggattcgaacagagaagagacacagctttcggggtgatgcaaaacggcgtcgttcaaggtcacggcttctacgcaacgacatacgaatcggtttacgttttaggacaatgcgaaggcgatataggcgattcagattgtagcggttgcataaaaaacgcgttacagagagctcaagtcgaatgtggaagctcaatatctggtcagatatatcttcataagtgttttgtcggttatagtttctacccaaatggtgttcccaagagatcttctccttatcctagctctggctcttcgggttcttcttcttcttcatcttcttcaggaacaacaggcaaaacggtggcaataatagtaggaggaacagctggtgttggatttcttgtcatttgcttacttttcgtcaaaaacttgatgaagaagaaatatgacgattattgaaaataattaggatgaagacaacaaaatgagtcccaaccccgaaatggaggcaagcgttaatgtgaattccgaggtgcatgcaattaattgtgtcccgatatttatatttttcgaattgttagtttattgaatacagtatttttgagaggtggaaattgtggtgggatggatgaagaagagctgggaccattttaaaatgttagaagatggagaaagtactttcaatttatttttaaaaatgtaaatgaattatctcatttgaagttccttaagtact

SEQ ID NO: 23055 - protein, 245 aa, Arabidopsis thaliana
  peptide (1)..(245): Ceres Seq. ID no. 12579929
MYGLLVTQSTKTRFYKTTTGTTSQTSVTGLFQCRGDLSNNDCYNCVSRLPVLSGKLCGKTIAARVQLSGCYLLYEISGFAQISGMELLFKTCGKNNVAGTGFEQRRDTAFGVMQNGVVQGHGFYATTYESVYVLGQCEGDIGDSDCSGCIKNALQRAQVECGSSISGQIYLHKCFVGYSFYPNGVPKRSSPYPSSGSSGSSSSSSSSGTTGKTVAIIVGGTAGVGFLVICLLFVKNLMKKKYDDY

SEQ ID NO: 23056 - protein, 161 aa, Arabidopsis thaliana
  peptide (1)..(161): Ceres Seq. ID no. 12579930
MELLFKTCGKNNVAGTGFEQRRDTAFGVMQNGVVQGHGFYATTYESVYVLGQCEGDIGDSDCSGCIKNALQRAQVECGSSISGQIYLHKCFVGYSFYPNGVPKRSSPYPSSGSSGSSSSSSSSGTTGKTVAIIVGGTAGVGFLVICLLFVKNLMKKKYDDY

SEQ ID NO: 23057 - protein, 133 aa, Arabidopsis thaliana
  peptide (1)..(133): Ceres Seq. ID no. 12579931
MQNGVVQGHGFYATTYESVYVLGQCEGDIGDSDCSGCIKNALQRAQVECGSSISGQIYLHKCFVGYSFYPNGVPKRSSPYPSSGSSGSSSSSSSSGTTGKTVAIIVGGTAGVGFLVICLLFVKNLMKKKYDDY

SEQ ID NO: 23058 - DNA, 1349 bp, Arabidopsis thaliana
  misc_feature (1)..(1349): Ceres Seq. ID no. 13488256
  misc_feature (1)..(1349): Ortholog of  Ceres SEQ ID NO 13595542 as cited in SEQ ID NO 59862
gtgaattctactatccatccaccaagcactctgtgtgcctctgcaaattaacaatttcctcagaacaattacatttcgattcgattcgattctcttatcttcttgatctctgtttgttcatctgtggtggatctccagatgttggttttgagaattttgtcgcgagtaacccgcaacgcgggcatacgctcatctctatccgccgtcactcttccggcgaggaatcagactcctgttttctcgagccggtttcactccctagctcacgatttctcgcataagcttgttccagctcagatgtctatgatggattcgtttgcactgcaaaggttcaatttttcttcctctacctcgcctgaatcagatgagaagaagacccacactgaggcctcaaagacaagtgaagagaaacctacagctgaggcaaaccaaccaggtcttgactctgaatctaaagattctgtgacagattctgcaaaaagaaagcggaaaggtgctaaaggagctgcatcttcatcttctgaatcagattctgagagtgatgatgatgaattgtcagccgatgatttggtgaagctcgtagctgagaaggaagagctactgtctgagaaggaagaagagattaagcagttgaaagacaaagttcttcgcacttatgctgagatggagaatgtcatggacagaacaagacgtgatgctgaaaacaccaaaaagtatgccgtacagaattttgcaaagagcctattggatgtggcggataatcttggaagagcttcttcggttgtcaaagaaagcttctcaaagcttgacacctcagaagattctgctggagcagctccactattaaagacccttttagaaggagtggagatgactgagaaacagcttgctgaggtatttaagaaatttggtatggagaagtatgatcctataaacgagccatttgatccaaacagacataacgcagtgttccaagtccctgatgcttctaagccagaaggcacagttgctcatgtcttgaagtctggatacacgctgtatgaccgagttataagaccagctgaggttggtgttacccagggaggagagaaccaagaagaaaagaaagagtctgatgcttaagaagaagtcagctggttttcataaattttgttacggttctatgtttccattaacatcttctcgagtcttcgagtcatagttttcttttgtggtttggttattcattagatgaacaagatctcccataagttgctggacatggcatttgcaggggaaatcctgcttctgtgtctgttttctctatctccatgctataattgaacgaggaaaatatcattttacatccc

SEQ ID NO: 23059 - protein, 327 aa, Arabidopsis thaliana
  peptide (1)..(327): Ceres Seq. ID no. 13488257
MLVLRILSRVTRNAGIRSSLSAVTLPARNQTPVFSSRFHSLAHDFSHKLVPAQMSMMDSFALQRFNFSSSTSPESDEKKTHTEASKTSEEKPTAEANQPGLDSESKDSVTDSAKRKRKGAKGAASSSSESDSESDDDELSADDLVKLVAEKEELLSEKEEEIKQLKDKVLRTYAEMENVMDRTRRDAENTKKYAVQNFAKSLLDVADNLGRASSVVKESFSKLDTSEDSAGAAPLLKTLLEGVEMTEKQLAEVFKKFGMEKYDPINEPFDPNRHNAVFQVPDASKPEGTVAHVLKSGYTLYDRVIRPAEVGVTQGGENQEEKKESDA

SEQ ID NO: 23060 - protein, 274 aa, Arabidopsis thaliana
  peptide (1)..(274): Ceres Seq. ID no. 13488258
MSMMDSFALQRFNFSSSTSPESDEKKTHTEASKTSEEKPTAEANQPGLDSESKDSVTDSAKRKRKGAKGAASSSSESDSESDDDELSADDLVKLVAEKEELLSEKEEEIKQLKDKVLRTYAEMENVMDRTRRDAENTKKYAVQNFAKSLLDVADNLGRASSVVKESFSKLDTSEDSAGAAPLLKTLLEGVEMTEKQLAEVFKKFGMEKYDPINEPFDPNRHNAVFQVPDASKPEGTVAHVLKSGYTLYDRVIRPAEVGVTQGGENQEEKKESDA

SEQ ID NO: 23061 - protein, 272 aa, Arabidopsis thaliana
  peptide (1)..(272): Ceres Seq. ID no. 13488259
MMDSFALQRFNFSSSTSPESDEKKTHTEASKTSEEKPTAEANQPGLDSESKDSVTDSAKRKRKGAKGAASSSSESDSESDDDELSADDLVKLVAEKEELLSEKEEEIKQLKDKVLRTYAEMENVMDRTRRDAENTKKYAVQNFAKSLLDVADNLGRASSVVKESFSKLDTSEDSAGAAPLLKTLLEGVEMTEKQLAEVFKKFGMEKYDPINEPFDPNRHNAVFQVPDASKPEGTVAHVLKSGYTLYDRVIRPAEVGVTQGGENQEEKKESDA

SEQ ID NO: 23062 - DNA, 1116 bp, Arabidopsis thaliana
  misc_feature (1)..(1116): Ceres Seq. ID no. 13509194
  misc_feature (1)..(1116): Ortholog of  Ceres SEQ ID NO 13598387 as cited in SEQ ID NO 62757
  misc_feature (1)..(1116): Ortholog of  Ceres SEQ ID NO 13662984 as cited in SEQ ID NO 64419
atagaacatcctaatcgaaaaacattagttttgctgcgtttagtattcaatttcatcgacccaaatcaaaatatataggatactagataaagagtgactgaaggagagaaaaacaaaaatggcgattgtttccgtctctaactcttttctcactttcaattctcccaatcagctccgatttagccgaagaagattctctgccatggcttcttcaactactggagtgagagtcgctgaaggagaaggcaatttgccaaaacttgtccttacttctcctcagaacagcgaggctgagatatatctcttcggaggctgcattacttcttggaaagttgcgagcggtaaagatcttctttttgtcagaccagatgctgtcttcaataagattaagcccattagcggagggattccacattgttttccacagtttggacctgggctaattcaacagcatgggtttggaaggaacatggactggtctgttgtcgattcccagaatgcagatgacaatgctgctgttactcttgagcttaaggatggtccctatagtcgagccatgtgggactttgctttccaggctctatacaaggtcattgttggcgcggactccctttccactgagctaaagattacaaacacagacgataaaccattttctttcagcactgcgttgcatacttacttccgtgcttcttctgcgggggcctccgtgagaggtctaaagggttgtaaaactctcaataaggatccagaccctaagaacccaatagagggtaaagaagacagggatgcagtcacttttcctggatttgtggataccgtctatcttgatgctcccaatgaattgcagtttgataatggcttgggtgataaaataatcatcaaaaacacaaattggtcggatgcggtcttgtggaacccgcatactcagatggaggcttgttacagagactttgtgtgcgtggaaaatgcaaagcttggggatgtcaagctagagccgggacagtcttggactgcaacacaacttctcagcatcagttgaaaacattgtactttaaacttataatgtccagtggatccattttcttaagcaataaaagttttatttcctctccc

SEQ ID NO: 23063 - protein, 307 aa, Arabidopsis thaliana
  peptide (1)..(307): Ceres Seq. ID no. 13509195
MAIVSVSNSFLTFNSPNQLRFSRRRFSAMASSTTGVRVAEGEGNLPKLVLTSPQNSEAEIYLFGGCITSWKVASGKDLLFVRPDAVFNKIKPISGGIPHCFPQFGPGLIQQHGFGRNMDWSVVDSQNADDNAAVTLELKDGPYSRAMWDFAFQALYKVIVGADSLSTELKITNTDDKPFSFSTALHTYFRASSAGASVRGLKGCKTLNKDPDPKNPIEGKEDRDAVTFPGFVDTVYLDAPNELQFDNGLGDKIIIKNTNWSDAVLWNPHTQMEACYRDFVCVENAKLGDVKLEPGQSWTATQLLSIS

SEQ ID NO: 23064 - protein, 279 aa, Arabidopsis thaliana
  peptide (1)..(279): Ceres Seq. ID no. 13509196
MASSTTGVRVAEGEGNLPKLVLTSPQNSEAEIYLFGGCITSWKVASGKDLLFVRPDAVFNKIKPISGGIPHCFPQFGPGLIQQHGFGRNMDWSVVDSQNADDNAAVTLELKDGPYSRAMWDFAFQALYKVIVGADSLSTELKITNTDDKPFSFSTALHTYFRASSAGASVRGLKGCKTLNKDPDPKNPIEGKEDRDAVTFPGFVDTVYLDAPNELQFDNGLGDKIIIKNTNWSDAVLWNPHTQMEACYRDFVCVENAKLGDVKLEPGQSWTATQLLSIS

SEQ ID NO: 23065 - protein, 190 aa, Arabidopsis thaliana
  peptide (1)..(190): Ceres Seq. ID no. 13509197
MDWSVVDSQNADDNAAVTLELKDGPYSRAMWDFAFQALYKVIVGADSLSTELKITNTDDKPFSFSTALHTYFRASSAGASVRGLKGCKTLNKDPDPKNPIEGKEDRDAVTFPGFVDTVYLDAPNELQFDNGLGDKIIIKNTNWSDAVLWNPHTQMEACYRDFVCVENAKLGDVKLEPGQSWTATQLLSIS

SEQ ID NO: 23066 - DNA, 1078 bp, Arabidopsis thaliana
  misc_feature (1)..(1078): Ceres Seq. ID no. 12639248
  misc_feature (1)..(1078): Ortholog of  Ceres SEQ ID NO 14305963 as cited in SEQ ID NO 52290
  misc_feature (1)..(1078): Ortholog of  Ceres SEQ ID NO 14307492 as cited in SEQ ID NO 59504
  misc_feature (1)..(1078): Ortholog of  Ceres SEQ ID NO 13597255 as cited in SEQ ID NO 63874
agaaacaaaacgttgtcttcttgtgtccttgtccgaagttgtagttcggtaacaagtctttcgcttccatttcttcttcccaccttttctctctctctctctctctctctctctctctctctctctctctctctctctctctatctctaccgtccttctagggtttctttgatcacattcaaatttgtcgcctttaatctcaatcctgtaagaatcagaggatatggattccaattggatcaattgtccctctgttttctcctcatcctcttcttcttccagacgctgtcaatcccgatcagacttgtatttaggaggagggtacgaggatcttgaaggagaagacgatttgaaggcagagtttatatgccctttttgcgctgaagattttgacattgttgggctttgttgtcacattgatgaagaacatcctgttgaagccaagaatggggtctgtcctgtatgcactaagaggaacttgtgtttattccttgatgagaggttttacgtacagcgaaggagaaggttgcgaagaggaggatatagctctacctatctcgccttgaaaaaggaactccgggaagcaaacctacagtctcttcttggtggatcttcaagtttcacttcttcaaccaatatcgattctgatccgttgctgtcatcctttatgtttaattctccttcagtgaaccagtctgcaaacaaatctgctacacctgtgactgtaggaaacgcggctacaaaagtctcgattaaggaatctctcaaaagagacattcaagaagctccactttcaggtgaagatcaggagaaggcgaaaaagagtgagtttgtgcgaggcttgttgttgtcaaccatgcttgaagacgatttctaatttctcgttataaatccattgccttgttgtggttggtgcatgagacttgaggatctcaggttggaattgttaggagtggtttcaatgtatgatgcaaaatattgtaagttataagaggatgcagagttgcatccatatataattgtcatttgtaccttggaacctttatgtgcataaccggaaacagagtactttcctttc

SEQ ID NO: 23067 - protein, 217 aa, Arabidopsis thaliana
  peptide (1)..(217): Ceres Seq. ID no. 12639249
MDSNWINCPSVFSSSSSSSRRCQSRSDLYLGGGYEDLEGEDDLKAEFICPFCAEDFDIVGLCCHIDEEHPVEAKNGVCPVCTKRNLCLFLDERFYVQRRRRLRRGGYSSTYLALKKELREANLQSLLGGSSSFTSSTNIDSDPLLSSFMFNSPSVNQSANKSATPVTVGNAATKVSIKESLKRDIQEAPLSGEDQEKAKKSEFVRGLLLSTMLEDDF

SEQ ID NO: 23068 - protein, 111 aa, Arabidopsis thaliana
  peptide (1)..(111): Ceres Seq. ID no. 12639250
RNKTLSSCVLVRSCSSVTSLSLPFLLPTFSLSLSLSLSLSLSLSLSLYLYRPSRVSLITFKFVAFNLNPVRIRGYGFQLDQLSLCFLLILFFFQTLSIPIRLVFRRRVRGS

SEQ ID NO: 23069 - DNA, 723 bp, Arabidopsis thaliana
  misc_feature (1)..(723): Ceres Seq. ID no. 13496779
  misc_feature (1)..(723): Ortholog of  Ceres SEQ ID NO 15174108 as cited in SEQ ID NO 0
acataatcatcgctattctctctctctctctctcgctctcatatttgcagttgacaattcgttctctttgggaaattagagatgcaggcatcaagagcgcgactgtttaaagaatgacaaagaggtacagcgagagaaagtagcagatcctgatattcaattggtctgtgacgataccaacatattcaaatggaccgctcttatcaaaggaccttcggagactccttacgaaggcggtgtttttcagcttgctttttctgttcctgaaccttatcctttgcaacctcctcaagttcgattcttgaccaaaatattccatcctaatgttcatttcaagacaggagaaatatgtctcgacattttgaagaatgcttggagtcctgcttggacgcttcagtctgtgtgtagagctatcatagcattgatggctcatcctgagccggacagtcctcttaactgcgactcagggaatcttctaagatctggtgatgtgagagggttcaattcaatggcacaaatgtatacacgcctcgccgctatgcctaagaaaggatgatgatgatgatgatcctcttgcttttttttgttttttttttgaaatttgtaacgataatgatttgctagagtgaatacattattaacgtgaagaagatgattcttctttattagttcacaatattacaatctgtaagttgtcatatcttcttgtttaaggaatttgtc

SEQ ID NO: 23070 - protein, 43 aa, Arabidopsis thaliana
  peptide (1)..(43): Ceres Seq. ID no. 13496780
MAHPEPDSPLNCDSGNLLRSGDVRGFNSMAQMYTRLAAMPKKG

SEQ ID NO: 23071 - protein, 35 aa, Arabidopsis thaliana
  peptide (1)..(35): Ceres Seq. ID no. 13496781
IIIAILSLSLSLSYLQLTIRSLWEIRDAGIKSATV

SEQ ID NO: 23072 - DNA, 974 bp, Arabidopsis thaliana
  misc_feature (1)..(974): Ceres Seq. ID no. 12738984
  misc_feature (1)..(974): Ortholog of  Ceres SEQ ID NO 13599328 as cited in SEQ ID NO 1002
  misc_feature (1)..(974): Ortholog of  Ceres SEQ ID NO 14312239 as cited in SEQ ID NO 59176
  misc_feature (1)..(974): Ortholog of  Ceres SEQ ID NO 13584819 as cited in SEQ ID NO 64536
  misc_feature (1)..(974): Ortholog of  Ceres SEQ ID NO 13663748 as cited in SEQ ID NO 67516
  misc_feature (1)..(974): Ortholog of  Ceres SEQ ID NO 12635897 as cited in SEQ ID NO 0
ccactacgtctctctctcttgctctccctcttcaagtcggctcctttattgctacagtgaaaaagtttcgagctttagaaacaatggcggctttccccaacctcaactctggctctggattgaagaagctcgatgagcatcttctcactcgcagttacatcactgggtaccaagcttcaaaggatgatatcactgtgtttacagctctttcaaagcctccaacttcagagtatgtcaatgtatctcgttggttcaaccacatcgatgccctcttgaggatctctggtgtctctgctgaaggaagtggtgtcattgttgaaggatcatcacctatcactgaagaggctattgctactccccctgcagctgattctaaggatactgctgctgaagaagaagatgatgatgatgttgaccttttcggggaggagaccgaagaggaaaagaaagctgctgaagagagagcagcttctgtgaaggcatctacaaagaagaaagaatccggaaagtcatcagttttgatggatatcaagccgtgggatgatgagacggacatgaagaagctagaggaagctgtaagatccattcagatggaaggattgttttggggagcatcaaagcttgtacccgttggttacggtatcaagaagttgcacatcatgtgcaccattgttgatgaccttgtatctatcgacaccatgatcgaagagcaactcactgttgaaccgatcaatgaatatgtccagagttgtgacattgttgccttcaacaagatatgaggatggagaatagcttgaaggaagaactgtttatgttgttgttttcttctctatatccagttttgttacctgtttttattgtactctgtgggagggcttttaccaactctgattcattttgatatatgtgaagacaattcagttttgtcttaaagtttccaccaaatctcaaatacgaaaaatcataagtttgat

SEQ ID NO: 23073 - protein, 258 aa, Arabidopsis thaliana
  peptide (1)..(258): Ceres Seq. ID no. 12738985
TTSLSLALPLQVGSFIATVKKFRALETMAAFPNLNSGSGLKKLDEHLLTRSYITGYQASKDDITVFTALSKPPTSEYVNVSRWFNHIDALLRISGVSAEGSGVIVEGSSPITEEAIATPPAADSKDTAAEEEDDDDVDLFGEETEEEKKAAEERAASVKASTKKKESGKSSVLMDIKPWDDETDMKKLEEAVRSIQMEGLFWGASKLVPVGYGIKKLHIMCTIVDDLVSIDTMIEEQLTVEPINEYVQSCDIVAFNKI

SEQ ID NO: 23074 - protein, 231 aa, Arabidopsis thaliana
  peptide (1)..(231): Ceres Seq. ID no. 12738986
MAAFPNLNSGSGLKKLDEHLLTRSYITGYQASKDDITVFTALSKPPTSEYVNVSRWFNHIDALLRISGVSAEGSGVIVEGSSPITEEAIATPPAADSKDTAAEEEDDDDVDLFGEETEEEKKAAEERAASVKASTKKKESGKSSVLMDIKPWDDETDMKKLEEAVRSIQMEGLFWGASKLVPVGYGIKKLHIMCTIVDDLVSIDTMIEEQLTVEPINEYVQSCDIVAFNKI

SEQ ID NO: 23075 - DNA, 1160 bp, Arabidopsis thaliana
  misc_feature (1)..(1160): Ceres Seq. ID no. 12321522
  misc_feature (1)..(1160): Ortholog of  Ceres SEQ ID NO 13648081 as cited in SEQ ID NO 165
  misc_feature (1)..(1160): Ortholog of  Ceres SEQ ID NO 13502952 as cited in SEQ ID NO 62271
  misc_feature (1)..(1160): Ortholog of  Ceres SEQ ID NO 13502973 as cited in SEQ ID NO 68052
  misc_feature (1)..(1160): Ortholog of  Ceres SEQ ID NO 13596000 as cited in SEQ ID NO 68188
tagcttacctgatgctatcgattggagagctaaaggtgctgttaatccagtcaaagatcaaggatcctgtggaagttgttgggcgttttccgcgattggagcggttgaaggtataaatcagattaagacaggagagttgatatctttgtctgagcaagaacttgttgattgtgacacaagttacaatgatggatgtggtggaggtcttatggattatgcttttaagttcattattgaaaacggtggtattgatacagaggaagattatccttatattgcaactgatgttaacgtgtgcaattctgataagaagaacactcgtgttgttaccatcgatggttatgaggatgttcctcaaaacgatgagaagtctttgaagaaggctcttgctaatcaacctattagtgttgccattgaagctggtggcagagctttccagctttacacatctggtgtgtttacaggaacatgtggaacatctttggaccatggtgttgtagctgtgggatacggatcagaaggtggtcaagactactggattgttcgtaactcatggggatcaaagtggggagaaagcggatactttaagctcgaacgtaacatcaaagagtcatcagggaaatgcggtgtggcgatgatggcttcttaccctaccaaatcatcaggctcaaacccaccaaaaccgccagcgccttcaccggttgtttgtgacaagtctaacacttgtccagctaagtccacttgttgttgcctatatgagtacaatggtaaatgctatagctggggatgttgtccgtatgagtcagccacttgttgcgatgatggttctagctgctgcccccagtcataccctgtctgcgatttaaaggccaatacttgtagaatgaagggaaacagtccgttaagcataaaagctttgacacgaggaccagcgattgcgaccacaaagtctacaaacatgctagtgggcagcgcttgaggagagataatacaaacgaagaaccgatttgttttcagcccacgttatcaagattcagtcttttgtctttagacacttccaagttggatcatagtttgattactcttgtcaaatttaatgttatcttggatttgattttacttgatgtaaatgtttaagaagtaatctgatatttgcttcc

SEQ ID NO: 23076 - protein, 325 aa, Arabidopsis thaliana
  peptide (1)..(325): Ceres Seq. ID no. 12321523
SLPDAIDWRAKGAVNPVKDQGSCGSCWAFSAIGAVEGINQIKTGELISLSEQELVDCDTSYNDGCGGGLMDYAFKFIIENGGIDTEEDYPYIATDVNVCNSDKKNTRVVTIDGYEDVPQNDEKSLKKALANQPISVAIEAGGRAFQLYTSGVFTGTCGTSLDHGVVAVGYGSEGGQDYWIVRNSWGSKWGESGYFKLERNIKESSGKCGVAMMASYPTKSSGSNPPKPPAPSPVVCDKSNTCPAKSTCCCLYEYNGKCYSWGCCPYESATCCDDGSSCCPQSYPVCDLKANTCRMKGNSPLSIKALTRGPAIATTKSTNMLVGSA

SEQ ID NO: 23077 - protein, 256 aa, Arabidopsis thaliana
  peptide (1)..(256): Ceres Seq. ID no. 12321524
MDYAFKFIIENGGIDTEEDYPYIATDVNVCNSDKKNTRVVTIDGYEDVPQNDEKSLKKALANQPISVAIEAGGRAFQLYTSGVFTGTCGTSLDHGVVAVGYGSEGGQDYWIVRNSWGSKWGESGYFKLERNIKESSGKCGVAMMASYPTKSSGSNPPKPPAPSPVVCDKSNTCPAKSTCCCLYEYNGKCYSWGCCPYESATCCDDGSSCCPQSYPVCDLKANTCRMKGNSPLSIKALTRGPAIATTKSTNMLVGSA

SEQ ID NO: 23078 - DNA, 1690 bp, Arabidopsis thaliana
  misc_feature (1)..(1690): Ceres Seq. ID no. 12338881
  misc_feature (1)..(1690): Ortholog of  Ceres SEQ ID NO 13594345 as cited in SEQ ID NO 58043
  misc_feature (1)..(1690): Ortholog of  Ceres SEQ ID NO 12614112 as cited in SEQ ID NO 60891
  misc_feature (1)..(1690): Ortholog of  Ceres SEQ ID NO 13597574 as cited in SEQ ID NO 64677
  misc_feature (1)..(1690): Ortholog of  Ceres SEQ ID NO 13662880 as cited in SEQ ID NO 65422
  misc_feature (1)..(1690): Ortholog of  Ceres SEQ ID NO 12779098 as cited in SEQ ID NO 67698
  misc_feature (1)..(1690): Ortholog of  Ceres SEQ ID NO 13591190 as cited in SEQ ID NO 68044
  misc_feature (1)..(1690): Ortholog of  Ceres SEQ ID NO 13596089 as cited in SEQ ID NO 68373
atattttgttttaggtgttcacataaatttgatagtgtaaagaaaacaaaaccactttctagttcttaaagaaactagaaatccatggacccgtctcgtcatactcatgtgatgctcgtatctttccccggccaaggtcacgtaaaccctctacttcgtctcggaaagctcatagcctctaaaggcttactcgtcacctttgtcaccacagagaagccatggggcaagaagatgcgtcaagccaacaagattcaagacggtgtgctcaaaccggtcggtctaggtttcatccggtttgagttcttctctgacggcttcgccgacgacgatgaaaaaagattcgacttcgatgccttccgaccacaccttgaagctgtcggaaaacaagagatcaagaatctcgttaagagatataacaaggagccggtgacgtgtctcataaacaacgcttttgtcccatgggtatgtgatgtcgccgaggagcttcacatcccttcggctgttctatgggtccagtcttgtgcttgtctcacggcttattactattaccaccaccggttagttaagttcccgaccaaaaccgagccggacatcagcgttgaaatcccttgcttgccattgttaaagcatgacgagatcccaagctttcttcacccttcgtctccgtatacagcttttggagatatcattttagaccagttaaagagattcgaaaaccacaagtctttctatcttttcatcgacacttttcgcgaactagaaaaagacatcatggaccacatgtcacaactttgtcctcaagccatcatcagtcctgtcggtccgctcttcaagatggctcaaaccttgagttctgacgttaagggagatatatccgagccagcgagtgactgcatggaatggcttgactcaagagaaccatcctcagtcgtttacatctcctttgggactatagccaacttgaagcaagagcagatggaggagatcgctcatggcgttttgagctctggcttgtcggtcttatgggtggttcggcctcccatggaagggacatttgtagaaccacatgttttgcctcgagagctcgaagaaaagggtaaaatcgtggaatggtgtccccaagagagagtcttggctcatcctgcgattgcttgtttcttaagtcactgcggatggaactcgacaatggaggctttaactgccggagtccccgttgtttgttttccgcaatggggagatcaagtgactgatgcggtgtacttggctgatgttttcaagacaggagtgagactaggccgcggagccgctgaggagatgattgtttcgagggaggttgtagcagagaagctgcttgaggccacagttggggaaaaggcggtggagctgagagaaaacgctcggaggtggaaggcggaggccgaggccgccgtggcggacggtggatcatctgatatgaactttaaagagtttgtggacaagttggttacgaaacatgtgacgagagaagacaacggagaacactagtgataatgatgtctcgaaaatatccgactatttgttgtaccgcaaaaaccttaaccactacaaccttttcttttttcttgtcaataaatcgtatcaatctcatttcatttttcgaaagtgttttttctcacttctaaaatcaataattacgtattgtcttcttatc

SEQ ID NO: 23079 - protein, 479 aa, Arabidopsis thaliana
  peptide (1)..(479): Ceres Seq. ID no. 12338883
MDPSRHTHVMLVSFPGQGHVNPLLRLGKLIASKGLLVTFVTTEKPWGKKMRQANKIQDGVLKPVGLGFIRFEFFSDGFADDDEKRFDFDAFRPHLEAVGKQEIKNLVKRYNKEPVTCLINNAFVPWVCDVAEELHIPSAVLWVQSCACLTAYYYYHHRLVKFPTKTEPDISVEIPCLPLLKHDEIPSFLHPSSPYTAFGDIILDQLKRFENHKSFYLFIDTFRELEKDIMDHMSQLCPQAIISPVGPLFKMAQTLSSDVKGDISEPASDCMEWLDSREPSSVVYISFGTIANLKQEQMEEIAHGVLSSGLSVLWVVRPPMEGTFVEPHVLPRELEEKGKIVEWCPQERVLAHPAIACFLSHCGWNSTMEALTAGVPVVCFPQWGDQVTDAVYLADVFKTGVRLGRGAAEEMIVSREVVAEKLLEATVGEKAVELRENARRWKAEAEAAVADGGSSDMNFKEFVDKLVTKHVTREDNGEH

SEQ ID NO: 23080 - protein, 470 aa, Arabidopsis thaliana
  peptide (1)..(470): Ceres Seq. ID no. 12338885
MLVSFPGQGHVNPLLRLGKLIASKGLLVTFVTTEKPWGKKMRQANKIQDGVLKPVGLGFIRFEFFSDGFADDDEKRFDFDAFRPHLEAVGKQEIKNLVKRYNKEPVTCLINNAFVPWVCDVAEELHIPSAVLWVQSCACLTAYYYYHHRLVKFPTKTEPDISVEIPCLPLLKHDEIPSFLHPSSPYTAFGDIILDQLKRFENHKSFYLFIDTFRELEKDIMDHMSQLCPQAIISPVGPLFKMAQTLSSDVKGDISEPASDCMEWLDSREPSSVVYISFGTIANLKQEQMEEIAHGVLSSGLSVLWVVRPPMEGTFVEPHVLPRELEEKGKIVEWCPQERVLAHPAIACFLSHCGWNSTMEALTAGVPVVCFPQWGDQVTDAVYLADVFKTGVRLGRGAAEEMIVSREVVAEKLLEATVGEKAVELRENARRWKAEAEAAVADGGSSDMNFKEFVDKLVTKHVTREDNGEH

SEQ ID NO: 23081 - protein, 430 aa, Arabidopsis thaliana
  peptide (1)..(430): Ceres Seq. ID no. 12338886
MRQANKIQDGVLKPVGLGFIRFEFFSDGFADDDEKRFDFDAFRPHLEAVGKQEIKNLVKRYNKEPVTCLINNAFVPWVCDVAEELHIPSAVLWVQSCACLTAYYYYHHRLVKFPTKTEPDISVEIPCLPLLKHDEIPSFLHPSSPYTAFGDIILDQLKRFENHKSFYLFIDTFRELEKDIMDHMSQLCPQAIISPVGPLFKMAQTLSSDVKGDISEPASDCMEWLDSREPSSVVYISFGTIANLKQEQMEEIAHGVLSSGLSVLWVVRPPMEGTFVEPHVLPRELEEKGKIVEWCPQERVLAHPAIACFLSHCGWNSTMEALTAGVPVVCFPQWGDQVTDAVYLADVFKTGVRLGRGAAEEMIVSREVVAEKLLEATVGEKAVELRENARRWKAEAEAAVADGGSSDMNFKEFVDKLVTKHVTREDNGEH

SEQ ID NO: 23082 - DNA, 1586 bp, Arabidopsis thaliana
  misc_feature (1)..(1586): Ceres Seq. ID no. 13492465
  misc_feature (1)..(1586): Ortholog of  Ceres SEQ ID NO 13594209 as cited in SEQ ID NO 59089
  misc_feature (1)..(1586): Ortholog of  Ceres SEQ ID NO 13502874 as cited in SEQ ID NO 66298
  misc_feature (1)..(1586): Ortholog of  Ceres SEQ ID NO 12614124 as cited in SEQ ID NO 68392
aaaaaagaagacggaacaaaaaacaaaaacagagccaggaataatgtcagtcttcctctgtttcctctgcctcttaccccttatcttaatcttcttgaaaaatctcaaaccatcgaaatggaagcttcctccaggcccaaagaagcttccgatcatcgggaacttacaccaacgccgggaattacatcccaggaacagtcggaatctttccgaaaagtacggaccaatcgtgtttctccgatacggattcgtccccgtggtcgtgatctcgtcaaaagaagcagcagaggaagttctcaagacccacgatcttgagtgttgtagccgaccagagacggttgggaccagagcaatctcttacaactttaaagacatcggattcgcaccgtacggtgaagattggagaacgatgcggaagctctcggtggtcgagctcttcagctcgaaaaagcttcaatctttcaggtatatcagagaggaagagaacgacttgtgtgtcaagaaactctctgatttagcttcgagacgatctttggtgaatcttgagaaaaccctttttactttagtcggaagtatagtgtgtaggatagggtttgggataaatctccgtgagtgtgagttcgttgatgaagatagcatcgatgatcttgtgcacaagtctgaagatgtcataaggaattctatcttctctgatttctttcccggattaatgggtaggctcatcgagtggatcttcagtgagaggaagagattgaatagactttactcggaagtagacactttctttcagaatattcttgatgatcatctcaagcctggaagagagagctctgatatcatcgatgtgatgattgatatgatgaagaagcaagagaaagagggagactctttcaagttcaccactgatcatctcaaagggatgatctcggacatatttctagcaggagttggaacaagctccactacattgatatgggcgatgaccgagctgatcagaaacccgagagtgatgaagaaagttcaagacgagattcggacaacacttggggacaagaaggagagaatcacagaagaagatttaaaccagcttcactacttcaagctcatggtcaaagagatattcaggttacatccagcagctccacttttgctcccaagagagacattgtctcatgtcaagatccaaggctacgatattcctgctaaaacacagatcatgatcaacgcttacgcgattgcacgtgatccaaaactatggacaaaccctgatgagtttaaccctgataggttccttgacagctccatagattacagaggactgaactttgagctattaccgtttggatctggtaggaggatatgtccagggatgacaatggggatcgccattgttgaattgggactattgaatttgctttacttcttcgactgggggctaccagagaaggaagaagccaaggagatcatcaccgggaatgaagttgctcttgaccttgttcaagtttttctccactgaatgtgttttggttatggaatgtttgtactacactaagcttgattctaaattaataacatcttacaagtac

SEQ ID NO: 23083 - protein, 504 aa, Arabidopsis thaliana
  peptide (1)..(504): Ceres Seq. ID no. 13492466
KKKTEQKTKTEPGIMSVFLCFLCLLPLILIFLKNLKPSKWKLPPGPKKLPIIGNLHQRRELHPRNSRNLSEKYGPIVFLRYGFVPVVVISSKEAAEEVLKTHDLECCSRPETVGTRAISYNFKDIGFAPYGEDWRTMRKLSVVELFSSKKLQSFRYIREEENDLCVKKLSDLASRRSLVNLEKTLFTLVGSIVCRIGFGINLRECEFVDEDSIDDLVHKSEDVIRNSIFSDFFPGLMGRLIEWIFSERKRLNRLYSEVDTFFQNILDDHLKPGRESSDIIDVMIDMMKKQEKEGDSFKFTTDHLKGMISDIFLAGVGTSSTTLIWAMTELIRNPRVMKKVQDEIRTTLGDKKERITEEDLNQLHYFKLMVKEIFRLHPAAPLLLPRETLSHVKIQGYDIPAKTQIMINAYAIARDPKLWTNPDEFNPDRFLDSSIDYRGLNFELLPFGSGRRICPGMTMGIAIVELGLLNLLYFFDWGLPEKEEAKEIITGNEVALDLVQVFLH

SEQ ID NO: 23084 - protein, 490 aa, Arabidopsis thaliana
  peptide (1)..(490): Ceres Seq. ID no. 13492467
MSVFLCFLCLLPLILIFLKNLKPSKWKLPPGPKKLPIIGNLHQRRELHPRNSRNLSEKYGPIVFLRYGFVPVVVISSKEAAEEVLKTHDLECCSRPETVGTRAISYNFKDIGFAPYGEDWRTMRKLSVVELFSSKKLQSFRYIREEENDLCVKKLSDLASRRSLVNLEKTLFTLVGSIVCRIGFGINLRECEFVDEDSIDDLVHKSEDVIRNSIFSDFFPGLMGRLIEWIFSERKRLNRLYSEVDTFFQNILDDHLKPGRESSDIIDVMIDMMKKQEKEGDSFKFTTDHLKGMISDIFLAGVGTSSTTLIWAMTELIRNPRVMKKVQDEIRTTLGDKKERITEEDLNQLHYFKLMVKEIFRLHPAAPLLLPRETLSHVKIQGYDIPAKTQIMINAYAIARDPKLWTNPDEFNPDRFLDSSIDYRGLNFELLPFGSGRRICPGMTMGIAIVELGLLNLLYFFDWGLPEKEEAKEIITGNEVALDLVQVFLH

SEQ ID NO: 23085 - protein, 368 aa, Arabidopsis thaliana
  peptide (1)..(368): Ceres Seq. ID no. 13492468
MRKLSVVELFSSKKLQSFRYIREEENDLCVKKLSDLASRRSLVNLEKTLFTLVGSIVCRIGFGINLRECEFVDEDSIDDLVHKSEDVIRNSIFSDFFPGLMGRLIEWIFSERKRLNRLYSEVDTFFQNILDDHLKPGRESSDIIDVMIDMMKKQEKEGDSFKFTTDHLKGMISDIFLAGVGTSSTTLIWAMTELIRNPRVMKKVQDEIRTTLGDKKERITEEDLNQLHYFKLMVKEIFRLHPAAPLLLPRETLSHVKIQGYDIPAKTQIMINAYAIARDPKLWTNPDEFNPDRFLDSSIDYRGLNFELLPFGSGRRICPGMTMGIAIVELGLLNLLYFFDWGLPEKEEAKEIITGNEVALDLVQVFLH

SEQ ID NO: 23086 - DNA, 1345 bp, Arabidopsis thaliana
  misc_feature (1)..(1345): Ceres Seq. ID no. 12396483
  misc_feature (1)..(1345): Ortholog of  Ceres SEQ ID NO 13594301 as cited in SEQ ID NO 60110
ggagtagaaaaaattaaagctttgagatttctttccttatcgatttttctctccgcgaattgttcgttgttttcttctggcacctgattctcatcttctttcttgtggaatctgggttttgttgcggagttttcgaggttcctcattcgttgcttctgttgaaactctctttttttttttgggtggtttactttgttttttttttgttgttgctttcaacctttaaatgccctaattttgaggttctagttgtggtttttaagattaggagccagaagccctttcgactaaagttcatgttagctgcaacttgctgaagtattcacagttttgttctgttggaagctctatgtgtttccttctgtgattgaaacacagagagaatgattttaccaaagcagtattgttgcacacactcgccgagctggccaatgcaccaaaggccatttaaacgaagacgtgttgttattagtgttccaacatttgaattggaatccgaaattagttgcaacactttcctgtgtatgcagatggtttgatgatttcgccaaacgggtactatggaaagagttttgcaggactcgtgccccaaaaatgatgcttgatttgcagtctagcggtagtcactgcattgacggtaactggcgagcccttgggaagcttctcatctactgctcaggatgtacacaaggtggtcttttcaatagctctgttcaaatcccaggccactttgtttatagaacccggttctcaagaacattaggaagaagcctccttccgcctcagtgtagaactgatgtactctatgtttgtgatccatgcgagcatcttgaccaaggagaagaaggcgacgtgggtttgttccgtgggattttcaagtcattcccaacatcgaaagttcggaaagtgatcattaacaaggcggttccttttcatccatccgaggtttgcccgtattgtaaagctaagctatggagcatgctacaagctaacataatacctcagtgcctgcattcgtttggaagcttatgaagactgcattgagtattttgtttgccttaatggacatttgctgggtatctgcactctcgcgcctttgtctgattcagaggatgcaattccaagcgaagataacaatcacacagagaagaaacaagacaatggctttcctagagagaacgtattgaaaaggagaaattctttgttgggtggaagtgaaaatggacctccgcctcaaaaacgactgaccaatcctaatcagtgaaacatctgtaaatttgtgtactactgctaaatttattgtatctgcagagattcttcaacattcatatacagtcaaattatg

SEQ ID NO: 23087 - protein, 145 aa, Arabidopsis thaliana
  peptide (1)..(145): Ceres Seq. ID no. 12396484
MMLDLQSSGSHCIDGNWRALGKLLIYCSGCTQGGLFNSSVQIPGHFVYRTRFSRTLGRSLLPPQCRTDVLYVCDPCEHLDQGEEGDVGLFRGIFKSFPTSKVRKVIINKAVPFHPSEVCPYCKAKLWSMLQANIIPQCLHSFGSL

SEQ ID NO: 23088 - protein, 144 aa, Arabidopsis thaliana
  peptide (1)..(144): Ceres Seq. ID no. 12396485
MLDLQSSGSHCIDGNWRALGKLLIYCSGCTQGGLFNSSVQIPGHFVYRTRFSRTLGRSLLPPQCRTDVLYVCDPCEHLDQGEEGDVGLFRGIFKSFPTSKVRKVIINKAVPFHPSEVCPYCKAKLWSMLQANIIPQCLHSFGSL

SEQ ID NO: 23089 - DNA, 1301 bp, Arabidopsis thaliana
  misc_feature (1)..(1301): Ceres Seq. ID no. 12384889
  misc_feature (1)..(1301): Ortholog of  Ceres SEQ ID NO 13648488 as cited in SEQ ID NO 20419
  misc_feature (1)..(1301): Ortholog of  Ceres SEQ ID NO 15171378 as cited in SEQ ID NO 51582
atcttataatcatccttcaatctccttcttcctctaaaactcttctaaagaagaaaacagaggaacgagaagaagaagaagagtgaacaatgaagaacggatcagggaacacgaacacaaaactaatccttcttcatccttacatccaaaaacaaacgagcacgactcgtttatggcttctcgctttcgtctctttcttcaccatagtttttctcctcactcttctctacactagagacacaatcccttccaaaaacacctccgtcgccgcagccgtagctgcagtcgtcaccggaggatccacaccttcagcatcatctcccatctccaactccaacttaccaactagtgcaatcaacgctttgcttcactacgcgtcaagatccaacgatagtttccacatgtcttacggagagatgaaatcaatctctgacgtcctccgccgctgcgctccaccgtgtaaccttctcgttttcggactcacacacgagactctcctttggaagtcgttaaaccacaacggtagaacattgttcatcgaggagaatcgttactacgcggcttacttcgaagaaatccacccggagatcgacgttttcgacgttcaatacacgacaaaagctcacgaagctggagagctcgtcaccgcggctaaagaagccgcgggaaacgagtgtcgtcctgtgcaaaatcttctcttctcagattgtaaattaggtctcaatgatttgcctaatcatgtctacgatgttgattgggatgtaatctttgtggacgggccacgtggcgatgctcacgaaggaccggggaggatgtcgtcgattttcacggcggcggttcttgctcggagcaaaaagggcgggaatccgaagacgcatgtgtttgtgcatgactattatagagacgttgagaggctttgtggtgatgagttcttgtgccgtgagaatcttgttgagtctaatgatttgcttgcacactacgtgttggataagatggataaaaacagcacaaagttttgcaatggtcgtaagaaacgttcggtttcgtctttatcttagaagtgacgccagaagacttcatacgtacatttgcttattgtaagaaataaagttttttccttgaagttttgctttttgtgctggtgtaaattttcgatcttggatttattgaagactttaatttaatctatttttttttttctttctcaaaggccaaagcaatcaatttgatgaaacatctagggatatatataacccaatgtaaactgaacttttgaaccaaaataaatattttattcatcc

SEQ ID NO: 23090 - protein, 322 aa, Arabidopsis thaliana
  peptide (1)..(322): Ceres Seq. ID no. 12384890
MKNGSGNTNTKLILLHPYIQKQTSTTRLWLLAFVSFFTIVFLLTLLYTRDTIPSKNTSVAAAVAAVVTGGSTPSASSPISNSNLPTSAINALLHYASRSNDSFHMSYGEMKSISDVLRRCAPPCNLLVFGLTHETLLWKSLNHNGRTLFIEENRYYAAYFEEIHPEIDVFDVQYTTKAHEAGELVTAAKEAAGNECRPVQNLLFSDCKLGLNDLPNHVYDVDWDVIFVDGPRGDAHEGPGRMSSIFTAAVLARSKKGGNPKTHVFVHDYYRDVERLCGDEFLCRENLVESNDLLAHYVLDKMDKNSTKFCNGRKKRSVSSLS

SEQ ID NO: 23091 - protein, 218 aa, Arabidopsis thaliana
  peptide (1)..(218): Ceres Seq. ID no. 12384891
MSYGEMKSISDVLRRCAPPCNLLVFGLTHETLLWKSLNHNGRTLFIEENRYYAAYFEEIHPEIDVFDVQYTTKAHEAGELVTAAKEAAGNECRPVQNLLFSDCKLGLNDLPNHVYDVDWDVIFVDGPRGDAHEGPGRMSSIFTAAVLARSKKGGNPKTHVFVHDYYRDVERLCGDEFLCRENLVESNDLLAHYVLDKMDKNSTKFCNGRKKRSVSSLS

SEQ ID NO: 23092 - protein, 213 aa, Arabidopsis thaliana
  peptide (1)..(213): Ceres Seq. ID no. 12384892
MKSISDVLRRCAPPCNLLVFGLTHETLLWKSLNHNGRTLFIEENRYYAAYFEEIHPEIDVFDVQYTTKAHEAGELVTAAKEAAGNECRPVQNLLFSDCKLGLNDLPNHVYDVDWDVIFVDGPRGDAHEGPGRMSSIFTAAVLARSKKGGNPKTHVFVHDYYRDVERLCGDEFLCRENLVESNDLLAHYVLDKMDKNSTKFCNGRKKRSVSSLS

SEQ ID NO: 23093 - DNA, 1190 bp, Arabidopsis thaliana
  misc_feature (1)..(1190): Ceres Seq. ID no. 12580099
  misc_feature (1)..(1190): Ortholog of  Ceres SEQ ID NO 14311044 as cited in SEQ ID NO 53643
acatagattattctctccaagtataaagttttgtaatttacttttcaggagaaaaaaatgggtcaagctttgggttgtattcaagttgatcagtcgaatgtagcaatcaaagagacttttgggaagtttgacgaagttcttgagccgggttgtcactgtttgccatggtgtttgggaagtcaagtcgctggtcacctttctttacgtgttcaacagctcgatgttcgctgcgagacaaagactaaggataatgtgtttgtcacggttgttgcttccattcaataccgtgccttagcggagagtgctcaagatgctttttacaagctcagcaacacaaggaatcagattcaagcttatgtctttgatgtgatccgagcaagtgtacctaagctggatctagactctacctttgagcaaaagaatgacattgcaaaaaccgttgagactgagctcgaaaaggctatgtcgcattacggatatgagattgttcagacactgattgtggatatcgagcctgatgtgcatgtcaagagggcaatgaatgagatcaatgctgcttctagaatgagagaggcagcgagtgagaaagctgaggcagagaaaattctgcagatcaagcgtgctgagggagaagctgaatcgaaatacctttcaggtatgggtatagcccgtcagagacaagccattgtggatggtctgaggaacagcgtactcgccttctctgagtctgttccaggaacatcttccaaagacgtgatggatatggttcttgtgactcagtactttgacacattgaaggaaattggtgcttcttcgaagtcaaactcggtgttcataccgcacggtccaggcgctgttagggacattgcttcacagatcagggatggtcttcttcagggtaactctgctgctgagtagagaaatgtctcaaagtacaaaaaggctttttcagggttttagagttgtgttgctacttgcttactcagtttatcttttagcggtttgctctatatgatgggttcttaaatttcttatcgtttctctcttctaggcttgtggacttgatccattgtcttgttttctggtggtttgtggatagagtttgggcttgaaaaacatccgagttattttgggttttaatgtcattattaatgtttaatacgacagtggttaaagaatttgctaacggc

SEQ ID NO: 23094 - protein, 286 aa, Arabidopsis thaliana
  peptide (1)..(286): Ceres Seq. ID no. 12580100
MGQALGCIQVDQSNVAIKETFGKFDEVLEPGCHCLPWCLGSQVAGHLSLRVQQLDVRCETKTKDNVFVTVVASIQYRALAESAQDAFYKLSNTRNQIQAYVFDVIRASVPKLDLDSTFEQKNDIAKTVETELEKAMSHYGYEIVQTLIVDIEPDVHVKRAMNEINAASRMREAASEKAEAEKILQIKRAEGEAESKYLSGMGIARQRQAIVDGLRNSVLAFSESVPGTSSKDVMDMVLVTQYFDTLKEIGASSKSNSVFIPHGPGAVRDIASQIRDGLLQGNSAAE

SEQ ID NO: 23095 - protein, 151 aa, Arabidopsis thaliana
  peptide (1)..(151): Ceres Seq. ID no. 12580101
MSHYGYEIVQTLIVDIEPDVHVKRAMNEINAASRMREAASEKAEAEKILQIKRAEGEAESKYLSGMGIARQRQAIVDGLRNSVLAFSESVPGTSSKDVMDMVLVTQYFDTLKEIGASSKSNSVFIPHGPGAVRDIASQIRDGLLQGNSAAE

SEQ ID NO: 23096 - DNA, 1246 bp, Arabidopsis thaliana
  misc_feature (1)..(1246): Ceres Seq. ID no. 12396641
  misc_feature (1)..(1246): Ortholog of  Ceres SEQ ID NO 15225507 as cited in SEQ ID NO 55551
  misc_feature (1)..(1246): Ortholog of  Ceres SEQ ID NO 15225677 as cited in SEQ ID NO 0
atcatcactttggtcggccgctttcttccttccttcctcctcaaataatctaccacatatatacatccctcttagtttctctgtggatccattgagacatatatcataagtaacaatggtgccataccaagaactcactcttcagagaagcttcagctacaactcaagaaagatcaatccagtgacttctccggcgcgtagctcacacgttcgttctccttcttcctccgccttaatcccaagcatacctgagcacgaactcttcctcgttccttgccggagatgctcctatgtccctctctcctcctcatcgtcggcctctcacaatatcgggaaatttcacttgaagttttctttgctcttgcgttctttcatcaacatcattaacatccccgcttgcaaaatgctctctcttccctctccgccgtcttcttcttccagcgtctctaaccaactgatctcactcgttaccggtggatcctcttctctcgggagaagagtcaccgggactctgtacggacacaaaagaggccacgtcacgttttcggtccagtacaaccaaagatccgacccggtcttgctcctcgacctggccatgtcaacggcaactctcgtcaaagagatgtcgtcggggctcgtcaggatcgcgttggagtgcgagaagcgtcatcgatcaggtacgaagcttttccaagagcccaaatggacgatgtactgcaacgggaggaagtgcggctacgctgtgtcacgtggcggcgcgtgtactgatacagattggcgcgtgttgaacacggtatctagggttactgttggagccggagttattccgacgccgaaaactattgatgacgtgtccggtgttggtagtggaacggagcttggtgagttgttgtatatgagaggcaaatttgaacgagtcgttgggagccgtgactcggaggcgttttacatgatgaacccggacaaaaacggaggtccagaactcagtatttttcttcttagaatataataaagaataaaatggtttttaaagagaatttgacttcttaaaagtttgaaaatgtctttaaatgacgtattattatgtatatgtaatatgattgcaatgttgtgtcatgagatatatgtaagcgatattgatatgaaagaaagagagaggggcctagagtatgataaggttttgtttttctagttgtttatttgatgtgtggtatttttgtatctttgttattgatcaataagaagt

SEQ ID NO: 23097 - protein, 297 aa, Arabidopsis thaliana
  peptide (1)..(297): Ceres Seq. ID no. 12396642
MVPYQELTLQRSFSYNSRKINPVTSPARSSHVRSPSSSALIPSIPEHELFLVPCRRCSYVPLSSSSSASHNIGKFHLKFSLLLRSFINIINIPACKMLSLPSPPSSSSSVSNQLISLVTGGSSSLGRRVTGTLYGHKRGHVTFSVQYNQRSDPVLLLDLAMSTATLVKEMSSGLVRIALECEKRHRSGTKLFQEPKWTMYCNGRKCGYAVSRGGACTDTDWRVLNTVSRVTVGAGVIPTPKTIDDVSGVGSGTELGELLYMRGKFERVVGSRDSEAFYMMNPDKNGGPELSIFLLRI

SEQ ID NO: 23098 - protein, 201 aa, Arabidopsis thaliana
  peptide (1)..(201): Ceres Seq. ID no. 12396643
MLSLPSPPSSSSSVSNQLISLVTGGSSSLGRRVTGTLYGHKRGHVTFSVQYNQRSDPVLLLDLAMSTATLVKEMSSGLVRIALECEKRHRSGTKLFQEPKWTMYCNGRKCGYAVSRGGACTDTDWRVLNTVSRVTVGAGVIPTPKTIDDVSGVGSGTELGELLYMRGKFERVVGSRDSEAFYMMNPDKNGGPELSIFLLRI

SEQ ID NO: 23099 - DNA, 1541 bp, Arabidopsis thaliana
  misc_feature (1)..(1541): Ceres Seq. ID no. 12325212
  misc_feature (1)..(1541): Ortholog of  Ceres SEQ ID NO 13542155 as cited in SEQ ID NO 64236
ctctttcgaactctccgtcacttccatttcatttctatttgaatcttctcaaagctacacagatctctggaatcgaaaaagcttgagctgtgttaatggcggaggagaaatgggtggtgatggtgacggcgcagactccaacgaatatcgccgtgattaagtattggggaaagagagatgaggttcggattcttcccattaatgatagcattagcgtcacgcttgatcctgatcacctctgtactctcaccaccgtcgctgttagtccttcctttgatcgagatcgaatgtggctcaatggcaaggaaatctcgctttctggaagtaggtaccagaattgcttgagggaaattcgaagtcgtgctgatgatgtagaagataaagaaaagggtatcaagattgcgaagaaagattgggagaagctgcatctgcacattgcttctcataacaacttccctactgctgctggcttagcatcttctgctgctggttttgcttgcttagtttttgctcttgccaagttgatgaatgtaaatgaagatccaagccaactttctgctatagcaaggcaaggttcaggaagtgcttgccgtagtttatttgggggatttgtcaagtggaatatgggaaacaaagaagatggaagtgacagtgttgcagttcaactggtagatgataagcactgggatgatcttgttatcattattgctgtggttagttcacgacagaaggaaacaagcagcacctcgggaatgcgtgagagtgttgagacaagtttgcttttacagcatagagcaaaggaagttgtcccagtacggattttgcaaatggaagaagctataaagaatcgagatttcacatcttttacaaaattgacgtgttcagacagtaatcagtttcatgctgtttgtatggatacatctccacccatattctacatgaatgacacctcccacaggataatcagcttagttgaaaagtggaaccgttctgccggtacaccagagattgcttatacatttgatgctggcccaaatgcagtcatgattgcaagaaacaggaaagtagcagttgaattgctgcaggggctgctctactgcttccctcctaagcctgacacagacatgaagagttacgtactgggggatacatcgatagtaaaagaggcaggcttggaaggagagcttccacaaggaattaaagacaaaattggaagtcaggatcaaaaaggtgaagtgagttattttatatgcagcagacctggaagaggtcctgtggtgcttcaagaccaaactcaagctcttctccatcctcaaactggcctccccaaataaccatttctatgtcttgttgttacttcaactctgagatttgcaacagcttcatcttttgctttgccagctccaactcttgtcctaagagagcactcttctgaatcttttcccaattatttgtgtttacgtacaattcttctgcatcgggtgcaaaaaacaaaacaatcaatattgcaaacgaataagatcttgatgctaaatctgagt

SEQ ID NO: 23100 - protein, 412 aa, Arabidopsis thaliana
  peptide (1)..(412): Ceres Seq. ID no. 12325213
MAEEKWVVMVTAQTPTNIAVIKYWGKRDEVRILPINDSISVTLDPDHLCTLTTVAVSPSFDRDRMWLNGKEISLSGSRYQNCLREIRSRADDVEDKEKGIKIAKKDWEKLHLHIASHNNFPTAAGLASSAAGFACLVFALAKLMNVNEDPSQLSAIARQGSGSACRSLFGGFVKWNMGNKEDGSDSVAVQLVDDKHWDDLVIIIAVVSSRQKETSSTSGMRESVETSLLLQHRAKEVVPVRILQMEEAIKNRDFTSFTKLTCSDSNQFHAVCMDTSPPIFYMNDTSHRIISLVEKWNRSAGTPEIAYTFDAGPNAVMIARNRKVAVELLQGLLYCFPPKPDTDMKSYVLGDTSIVKEAGLEGELPQGIKDKIGSQDQKGEVSYFICSRPGRGPVVLQDQTQALLHPQTGLPK

SEQ ID NO: 23101 - protein, 404 aa, Arabidopsis thaliana
  peptide (1)..(404): Ceres Seq. ID no. 12325214
MVTAQTPTNIAVIKYWGKRDEVRILPINDSISVTLDPDHLCTLTTVAVSPSFDRDRMWLNGKEISLSGSRYQNCLREIRSRADDVEDKEKGIKIAKKDWEKLHLHIASHNNFPTAAGLASSAAGFACLVFALAKLMNVNEDPSQLSAIARQGSGSACRSLFGGFVKWNMGNKEDGSDSVAVQLVDDKHWDDLVIIIAVVSSRQKETSSTSGMRESVETSLLLQHRAKEVVPVRILQMEEAIKNRDFTSFTKLTCSDSNQFHAVCMDTSPPIFYMNDTSHRIISLVEKWNRSAGTPEIAYTFDAGPNAVMIARNRKVAVELLQGLLYCFPPKPDTDMKSYVLGDTSIVKEAGLEGELPQGIKDKIGSQDQKGEVSYFICSRPGRGPVVLQDQTQALLHPQTGLPK

SEQ ID NO: 23102 - protein, 348 aa, Arabidopsis thaliana
  peptide (1)..(348): Ceres Seq. ID no. 12325215
MWLNGKEISLSGSRYQNCLREIRSRADDVEDKEKGIKIAKKDWEKLHLHIASHNNFPTAAGLASSAAGFACLVFALAKLMNVNEDPSQLSAIARQGSGSACRSLFGGFVKWNMGNKEDGSDSVAVQLVDDKHWDDLVIIIAVVSSRQKETSSTSGMRESVETSLLLQHRAKEVVPVRILQMEEAIKNRDFTSFTKLTCSDSNQFHAVCMDTSPPIFYMNDTSHRIISLVEKWNRSAGTPEIAYTFDAGPNAVMIARNRKVAVELLQGLLYCFPPKPDTDMKSYVLGDTSIVKEAGLEGELPQGIKDKIGSQDQKGEVSYFICSRPGRGPVVLQDQTQALLHPQTGLPK

SEQ ID NO: 23103 - DNA, 1164 bp, Arabidopsis thaliana
  misc_feature (1)..(1164): Ceres Seq. ID no. 12327388
  misc_feature (1)..(1164): Ortholog of  Ceres SEQ ID NO 15224319 as cited in SEQ ID NO 66044
  misc_feature (1)..(1164): Ortholog of  Ceres SEQ ID NO 13598045 as cited in SEQ ID NO 66822
aagttgggaatcgtttactgtgaaataaaaacgagagagagtttttgaagaagaagaaagaacactcacaagatccagaaaaaggtaaaagatggcgagatacgatcgagcaatcactgtattctcccccgatggtcacctcttccaagtagagtatgccctagaagccgtccgaaagggtaacgccgccgtcggagtccgcggcacagatactgtcgtcctcgccgtcgaaaagaaatccacccctaagctccaggattccagatcagcaaggaagatagtgagccttgataatcacattgcattggcctgtgctggactgaaagcagatgctcgtgtcttgataaacaaggcgaggatagagtgtcaaagccacaggcttacgttggaggacccagttactgttgagtacattactcggtacatagcagggcttcaacagaagtatactcaaagtggtggtgtgaggccttttggtctttccactcttattgttgggtttgatccctacactcgtatacccgcgctttatcagaccgatccatctggtacattctctgcttggaaagctaatgcaactgggagaaactctaactcaattagggagtttctggagaaaaactacaaagaaagcgctggccaagaaactgttaagcttgctatccgtgctctgcttgaggttgttgagagtgggggaaagaacattgaggttgctgtaatgacacgagaggaaggtgttctgaagcaactagaagaagaagaaattgatatcattgtggctgagatcgaagcagagaaggctgcagctgaagcagccaagaaaggccctgcgaaggaaacatgaaccagatcttaaagtagcggtctcagattatgagttgtaatgctggttcaaagtcagggatattcaagggttgaatagaaaatctagaccgcatgaaatggtttgttggattactagcctatttgacactgttgctttaaatcttaaatgacattttagcggagtttcgatacttgtcagttggaactatggcatgttcagtattctagatgactttgcatttgcgctcaagagttgtagattttgattttggaaacgttgtttcttactaaacatgtctctcttcttattatctccattgtgtaacttaccgttttttt

SEQ ID NO: 23104 - protein, 250 aa, Arabidopsis thaliana
  peptide (1)..(250): Ceres Seq. ID no. 12327389
MARYDRAITVFSPDGHLFQVEYALEAVRKGNAAVGVRGTDTVVLAVEKKSTPKLQDSRSARKIVSLDNHIALACAGLKADARVLINKARIECQSHRLTLEDPVTVEYITRYIAGLQQKYTQSGGVRPFGLSTLIVGFDPYTRIPALYQTDPSGTFSAWKANATGRNSNSIREFLEKNYKESAGQETVKLAIRALLEVVESGGKNIEVAVMTREEGVLKQLEEEEIDIIVAEIEAEKAAAEAAKKGPAKET

SEQ ID NO: 23105 - DNA, 1245 bp, Arabidopsis thaliana
  misc_feature (1)..(1245): Ceres Seq. ID no. 12714490
  misc_feature (1)..(1245): Ortholog of  Ceres SEQ ID NO 15174890 as cited in SEQ ID NO 53624
ctcataagtcattataatagtttcccccggattgttttttctttctttttgctaatcatcatcggtttcttctaatcaaaaaaaaaaacaaaaaaaaaagagggactacgttcgtacaatcccatccttggtatggatttctggccggagtttatggcgaccagctggggaagagagttcgtcgccggtggtttcggtggcgtcgccggcatcatctccggctaccccttggacaccctcagaattcgccagcaacagagctcgaaatctggatctgccttctccattctccggcggatgctcgccattgagggtccctcctctctctacagaggcatggctgcgcctttggcctccgtcacttttcagaatgctatggtattccagatatacgccatattctctcgctcttttgattcctctgttcctctggtagagcctccttcctacagaggcgttgctcttggtggtgttgccaccggtgctgtacagagcctcttgctcacccctgtcgagctcatcaagattcgtctccagcttcagcagactaagtctggtcccatcaccttggccaagagcatccttaggagacagggccttcaggggctttacagaggcctcaccatcaccgtgctccgagatgctcccgctcatggcctctacttctggacctatgagtacgtcagagaaaggcttcaccccggctgcagaaagaccggacaagaaaacctcaggaccatgctcgtggctggtggccttgctggagtggccagctgggtcgcttgttatcctcttgatgtcgtcaagaccagactccaacaaggtcatggggcttacgagggcattgccgattgttttcgcaagagcgtcaaacaggaaggctatacggttctctggcgtggcctcgggactgcagttgccagggcctttgtggtcaacggtgctatctttgctgcttatgaggtagccttgcggtgtctattcaatcaatcgccatccccagatattgtcacaggagattgagtgagtaaagggcaaagaaggttcattagttgcagtctggacctgtgaatgtagttaatattagcacatagtttgagatggatttggattgcatagcattggtcaaacaaatctgactcgctttagggatcaggcagtttactaatcacagttgatcatagagacgttccagaaatgattacaaaccccaaagaaaacagatgaaatgaaaattctgttact

SEQ ID NO: 23106 - protein, 296 aa, Arabidopsis thaliana
  peptide (1)..(296): Ceres Seq. ID no. 12714491
MDFWPEFMATSWGREFVAGGFGGVAGIISGYPLDTLRIRQQQSSKSGSAFSILRRMLAIEGPSSLYRGMAAPLASVTFQNAMVFQIYAIFSRSFDSSVPLVEPPSYRGVALGGVATGAVQSLLLTPVELIKIRLQLQQTKSGPITLAKSILRRQGLQGLYRGLTITVLRDAPAHGLYFWTYEYVRERLHPGCRKTGQENLRTMLVAGGLAGVASWVACYPLDVVKTRLQQGHGAYEGIADCFRKSVKQEGYTVLWRGLGTAVARAFVVNGAIFAAYEVALRCLFNQSPSPDIVTGD

SEQ ID NO: 23107 - protein, 289 aa, Arabidopsis thaliana
  peptide (1)..(289): Ceres Seq. ID no. 12714492
MATSWGREFVAGGFGGVAGIISGYPLDTLRIRQQQSSKSGSAFSILRRMLAIEGPSSLYRGMAAPLASVTFQNAMVFQIYAIFSRSFDSSVPLVEPPSYRGVALGGVATGAVQSLLLTPVELIKIRLQLQQTKSGPITLAKSILRRQGLQGLYRGLTITVLRDAPAHGLYFWTYEYVRERLHPGCRKTGQENLRTMLVAGGLAGVASWVACYPLDVVKTRLQQGHGAYEGIADCFRKSVKQEGYTVLWRGLGTAVARAFVVNGAIFAAYEVALRCLFNQSPSPDIVTGD

SEQ ID NO: 23108 - protein, 241 aa, Arabidopsis thaliana
  peptide (1)..(241): Ceres Seq. ID no. 12714493
MLAIEGPSSLYRGMAAPLASVTFQNAMVFQIYAIFSRSFDSSVPLVEPPSYRGVALGGVATGAVQSLLLTPVELIKIRLQLQQTKSGPITLAKSILRRQGLQGLYRGLTITVLRDAPAHGLYFWTYEYVRERLHPGCRKTGQENLRTMLVAGGLAGVASWVACYPLDVVKTRLQQGHGAYEGIADCFRKSVKQEGYTVLWRGLGTAVARAFVVNGAIFAAYEVALRCLFNQSPSPDIVTGD

SEQ ID NO: 23109 - DNA, 849 bp, Arabidopsis thaliana
  misc_feature (1)..(849): Ceres Seq. ID no. 12394805
  misc_feature (1)..(849): Ortholog of  Ceres SEQ ID NO 13638716 as cited in SEQ ID NO 51101
  misc_feature (1)..(849): Ortholog of  Ceres SEQ ID NO 14306010 as cited in SEQ ID NO 59330
  misc_feature (1)..(849): Ortholog of  Ceres SEQ ID NO 12627045 as cited in SEQ ID NO 67611
acacacacacacatgttcttcgttgctgcttcgttgggttaaaaactttttttttgtttcttgctttttgtaaagtcaaagataacaaataaataagaaaaatggagaatctaccacctggttatcgtcccaatgttggtgtttgtctaatcaactcggataatctggtatttgtagcttctagattgaatgttccaggagcatggcagatgccacagggaggcattgaagatggggaggatccaaagtcagcagccatgagagagttacaagaagaaactggtgttgtttcagctgaaatcgtctcagaggtcccaaattggttgacatatgattttccaccagcagtaaaagcaaaagttaaccgtctttggggcggtgaatggcatggtcaagctcagaaatggtatttagtgagactgaggaacgatgaggacgagaaagagatcaatctagcgaacaacgaagcggattcagagtttgcggagtggaaatgggcgaagccagaagaagtggtagagcaagcagtggattacaaaaggccaacctatgaagaagtcatcaagacttttggttcgttcttaaacgacacaggaagagctgctaaatgtaaatcagccaagtggtgatataagataccaagaaccaatgtttgtctttttattttttttgttaactgttgtttttctttttttgggcggttctttttagtagaacccttttggaatgcaaaagctttctctaggggttttttactttcatttttgtaaattggttattggtacgtagaaagttttttggttttattttaacgtgggggtcattgtaataaagtcgttgtctggattc

SEQ ID NO: 23110 - protein, 175 aa, Arabidopsis thaliana
  peptide (1)..(175): Ceres Seq. ID no. 12394806
MENLPPGYRPNVGVCLINSDNLVFVASRLNVPGAWQMPQGGIEDGEDPKSAAMRELQEETGVVSAEIVSEVPNWLTYDFPPAVKAKVNRLWGGEWHGQAQKWYLVRLRNDEDEKEINLANNEADSEFAEWKWAKPEEVVEQAVDYKRPTYEEVIKTFGSFLNDTGRAAKCKSAKW

SEQ ID NO: 23111 - protein, 139 aa, Arabidopsis thaliana
  peptide (1)..(139): Ceres Seq. ID no. 12394807
MPQGGIEDGEDPKSAAMRELQEETGVVSAEIVSEVPNWLTYDFPPAVKAKVNRLWGGEWHGQAQKWYLVRLRNDEDEKEINLANNEADSEFAEWKWAKPEEVVEQAVDYKRPTYEEVIKTFGSFLNDTGRAAKCKSAKW

SEQ ID NO: 23112 - protein, 123 aa, Arabidopsis thaliana
  peptide (1)..(123): Ceres Seq. ID no. 12394808
MRELQEETGVVSAEIVSEVPNWLTYDFPPAVKAKVNRLWGGEWHGQAQKWYLVRLRNDEDEKEINLANNEADSEFAEWKWAKPEEVVEQAVDYKRPTYEEVIKTFGSFLNDTGRAAKCKSAKW

SEQ ID NO: 23113 - DNA, 1890 bp, Arabidopsis thaliana
  misc_feature (1)..(1890): Ceres Seq. ID no. 12334835
  misc_feature (1)..(1890): Ortholog of  Ceres SEQ ID NO 14308413 as cited in SEQ ID NO 55196
acaccaaaaagcttccattgatttcgcatcagatcttgctctctcttctatctctgcgattcttctggatcttctcaaatccatgaaggaatcagatctaaccaccgaaccaatcgcacaaaatctaatcaagctaataagcaatgtctgtttctcagtcttcgttttcacagttctcatcttcacagtaatcgcagtaacttaccaaccaccagatccatggcttgaatctgctccagcactcaccaaactcctaaccgaaaccgaaaacgcaactttcaaaatcgacggttcgattctcaaaaccggcgaagatctcgcttcatctccgtcatcatcacctccgtcgaactccacagagcaagtcacggaggcgacgattgagaaatccgaagcgaaaatcggtaatatgactgtgaagaactctatagattgtgatgaggatttgaagattgtgaattgttctgatccgagagttttagttgctgttgagaggtttaatttgaaggtttttaaatctattgtgttcttagagtacgaaactccggttaacggatcgaaactagacgaatgcgatgtttcttggaggtttaggaataagaaggagaagtcatggaggagatacagagatttcaggaggtttaggtttggatttggtgagaattgtacttataaagtgtttcatactagtggttggcattctggtgttaatgctcgtaggcctaggattagtagaccaagctcgagtcgaggagctcgcggtggtgattcggagattaatgatacgattccgactcttggttcgcagacgagtttccggagagggaagtatttgtattattcgcggggtggtgattattgtaagggtatgaatcagtatatgtggagtttcttgtgtggtttaggtgaagcaatgtatttgaataggacttttgtgatggatttgagtttgtgtttgtcttcgagttatagttctaaggggaaagatgaggaaggtaaggattttcggtattattttgatttcgagcatcttaaggagacggcttcgattgttgaagagggtgagttcttgagagattggaagaaatggaatcggttgcataaacggaaagttcctgttaggaaggttaagacgcatagagtgtcgcctttgcagcttagtaaagataagagtacgattatatggaggcagtttgatactcctgagcctgaaaactattggtatagagtttgtgaagggcaagcatcgaagtatgttgagaggccgtggcatgcgttgtggaagtcgaagaggttgatgaatattgtctctgagattagtgggaaaatggactgggattttgatgctgttcatgtggttagaggcgagaaagcgaagaacaagaagctatggccacatttggatgcagacacatggcctgatgcgatattgaccaaacttaaaggattggttcaggtgtggaggaatttgtacgttgcaactaatgaaccgttttataattactttgacaagttgaggtctcagtacaaggttcacttgcttgatgactatagctacttgtggggaaataagagtgaatggtacaatgagactagtctcttgaacaatgggaaaccagttgagtttgatgggtacatgagagtagctgttgatacagaggtgttttatagaggaaagactcgcgtcgagacgttctataaccttaccacggactgcaaagacgggatcaatacatgctaaattgatcattcaggttgtgatatgttttcattgttttatttgtttgtgtatcaaattcagttatgcttgtgttgtttaccttgtgttctactagctattgaagagtgtacgtaacgtttacattttttgattcatatccttaattctgt

SEQ ID NO: 23114 - protein, 579 aa, Arabidopsis thaliana
  peptide (1)..(579): Ceres Seq. ID no. 12334836
HQKASIDFASDLALSSISAILLDLLKSMKESDLTTEPIAQNLIKLISNVCFSVFVFTVLIFTVIAVTYQPPDPWLESAPALTKLLTETENATFKIDGSILKTGEDLASSPSSSPPSNSTEQVTEATIEKSEAKIGNMTVKNSIDCDEDLKIVNCSDPRVLVAVERFNLKVFKSIVFLEYETPVNGSKLDECDVSWRFRNKKEKSWRRYRDFRRFRFGFGENCTYKVFHTSGWHSGVNARRPRISRPSSSRGARGGDSEINDTIPTLGSQTSFRRGKYLYYSRGGDYCKGMNQYMWSFLCGLGEAMYLNRTFVMDLSLCLSSSYSSKGKDEEGKDFRYYFDFEHLKETASIVEEGEFLRDWKKWNRLHKRKVPVRKVKTHRVSPLQLSKDKSTIIWRQFDTPEPENYWYRVCEGQASKYVERPWHALWKSKRLMNIVSEISGKMDWDFDAVHVVRGEKAKNKKLWPHLDADTWPDAILTKLKGLVQVWRNLYVATNEPFYNYFDKLRSQYKVHLLDDYSYLWGNKSEWYNETSLLNNGKPVEFDGYMRVAVDTEVFYRGKTRVETFYNLTTDCKDGINTC

SEQ ID NO: 23115 - protein, 552 aa, Arabidopsis thaliana
  peptide (1)..(552): Ceres Seq. ID no. 12334837
MKESDLTTEPIAQNLIKLISNVCFSVFVFTVLIFTVIAVTYQPPDPWLESAPALTKLLTETENATFKIDGSILKTGEDLASSPSSSPPSNSTEQVTEATIEKSEAKIGNMTVKNSIDCDEDLKIVNCSDPRVLVAVERFNLKVFKSIVFLEYETPVNGSKLDECDVSWRFRNKKEKSWRRYRDFRRFRFGFGENCTYKVFHTSGWHSGVNARRPRISRPSSSRGARGGDSEINDTIPTLGSQTSFRRGKYLYYSRGGDYCKGMNQYMWSFLCGLGEAMYLNRTFVMDLSLCLSSSYSSKGKDEEGKDFRYYFDFEHLKETASIVEEGEFLRDWKKWNRLHKRKVPVRKVKTHRVSPLQLSKDKSTIIWRQFDTPEPENYWYRVCEGQASKYVERPWHALWKSKRLMNIVSEISGKMDWDFDAVHVVRGEKAKNKKLWPHLDADTWPDAILTKLKGLVQVWRNLYVATNEPFYNYFDKLRSQYKVHLLDDYSYLWGNKSEWYNETSLLNNGKPVEFDGYMRVAVDTEVFYRGKTRVETFYNLTTDCKDGINTC

SEQ ID NO: 23116 - protein, 443 aa, Arabidopsis thaliana
  peptide (1)..(443): Ceres Seq. ID no. 12334838
MTVKNSIDCDEDLKIVNCSDPRVLVAVERFNLKVFKSIVFLEYETPVNGSKLDECDVSWRFRNKKEKSWRRYRDFRRFRFGFGENCTYKVFHTSGWHSGVNARRPRISRPSSSRGARGGDSEINDTIPTLGSQTSFRRGKYLYYSRGGDYCKGMNQYMWSFLCGLGEAMYLNRTFVMDLSLCLSSSYSSKGKDEEGKDFRYYFDFEHLKETASIVEEGEFLRDWKKWNRLHKRKVPVRKVKTHRVSPLQLSKDKSTIIWRQFDTPEPENYWYRVCEGQASKYVERPWHALWKSKRLMNIVSEISGKMDWDFDAVHVVRGEKAKNKKLWPHLDADTWPDAILTKLKGLVQVWRNLYVATNEPFYNYFDKLRSQYKVHLLDDYSYLWGNKSEWYNETSLLNNGKPVEFDGYMRVAVDTEVFYRGKTRVETFYNLTTDCKDGINTC

SEQ ID NO: 23117 - DNA, 1555 bp, Arabidopsis thaliana
  misc_feature (1)..(1555): Ceres Seq. ID no. 12562703
  misc_feature (1)..(1555): Ortholog of  Ceres SEQ ID NO 14304944 as cited in SEQ ID NO 53041
  misc_feature (1)..(1555): Ortholog of  Ceres SEQ ID NO 15170354 as cited in SEQ ID NO 54190
  misc_feature (1)..(1555): Ortholog of  Ceres SEQ ID NO 14307253 as cited in SEQ ID NO 54783
  misc_feature (1)..(1555): Ortholog of  Ceres SEQ ID NO 14312300 as cited in SEQ ID NO 58632
  misc_feature (1)..(1555): Ortholog of  Ceres SEQ ID NO 13654989 as cited in SEQ ID NO 63117
  misc_feature (1)..(1555): Ortholog of  Ceres SEQ ID NO 13584744 as cited in SEQ ID NO 69137
aaagttctctcagcttctttctctctctctccatcgcttttgagatcatcgaacacaatcgaaacgaataatcatttggagaataagaagatcgtgagaagcttaaagggttggatcccgtgttctgggaaatcgagtgggaggaataagacaaggaggaacggtgaccacaaactcgacaggaagtcttctgattgttctgtgtctacttcagagaaatctaaggccaagtcgtccttgagtgaatccaaaagtaaaggctctgatcacattgtggcacaaacgtttacattctctgagttagctactgccactagaaacttcagaaaagaatgtcttataggagaaggaggttttggtagagtttacaaaggatacttggccagcactagccagacagcggctatcaagcaacttgatcataatggtttacaaggaaacagggagttccttgtcgaggttctcatgttgagtcttcttcatcacccgaatcttgttaacttaataggatattgtgctgatggagatcaaaggcttctagtctacgagtacatgcccctaggttcacttgaagatcatttgcatgacatttcacctggtaagcagccacttgactggaacaccagaatgaaaatagctgccggtgctgcaaaaggattggagtatctgcatgacaaaactatgcctccagtgatctatcgagatttgaaatgctcaaatattttgctcgatgatgattactttccaaagctatccgacttcgggttggctaaacttggcccagtgggtgacaagtctcatgtgtccactcgtgttatgggaacatacggatactgtgctcccgagtatgcaatgacaggccaactaacactcaaatcagacgtttacagcttcggtgttgttctgctggagattataactggtaggaaagcaatagacagttcaagatctactggagaacagaatctagtcgcatgggcaaggcctttgtttaaagacaggatgaaattctctcaaatggctgatccaatgcttcaaggtcaataccctccgcgagggttataccaagcactcgctgtagcagcgatgtgcgtacaagagcagccaaatcttagacctctcattgctgacgtcgtcactgcactttcttacctcgcctcccaaaagtttgatcctctggctcagccagtccaaggatccctcttcgctcccgggactccacctagatcaaagagggtctgaaaataatcccgagaaccgcaatgctgtgtaagttatgtagcttaaacccattccgtgctgtctttcttggagaggaaaggtggatgattttcagactaagtgtgaatgtatggcttaagagctacttgtagatatgtgtaagaagagatagattcatatagaggccggtttataatgttgttataggtgatgttgtttaatgtaatgtttattgagcgcttgctttcaaatgtgacaatttctcattattgtactgaggatgtctgcttcgattccaaagttattgtataaatattaaagtactatagttttc

SEQ ID NO: 23118 - protein, 413 aa, Arabidopsis thaliana
  peptide (1)..(413): Ceres Seq. ID no. 12562704
KVLSASFSLSPSLLRSSNTIETNNHLENKKIVRSLKGWIPCSGKSSGRNKTRRNGDHKLDRKSSDCSVSTSEKSKAKSSLSESKSKGSDHIVAQTFTFSELATATRNFRKECLIGEGGFGRVYKGYLASTSQTAAIKQLDHNGLQGNREFLVEVLMLSLLHHPNLVNLIGYCADGDQRLLVYEYMPLGSLEDHLHDISPGKQPLDWNTRMKIAAGAAKGLEYLHDKTMPPVIYRDLKCSNILLDDDYFPKLSDFGLAKLGPVGDKSHVSTRVMGTYGYCAPEYAMTGQLTLKSDVYSFGVVLLEIITGRKAIDSSRSTGEQNLVAWARPLFKDRMKFSQMADPMLQGQYPPRGLYQALAVAAMCVQEQPNLRPLIADVVTALSYLASQKFDPLAQPVQGSLFAPGTPPRSKRV

SEQ ID NO: 23119 - protein, 258 aa, Arabidopsis thaliana
  peptide (1)..(258): Ceres Seq. ID no. 12562705
MLSLLHHPNLVNLIGYCADGDQRLLVYEYMPLGSLEDHLHDISPGKQPLDWNTRMKIAAGAAKGLEYLHDKTMPPVIYRDLKCSNILLDDDYFPKLSDFGLAKLGPVGDKSHVSTRVMGTYGYCAPEYAMTGQLTLKSDVYSFGVVLLEIITGRKAIDSSRSTGEQNLVAWARPLFKDRMKFSQMADPMLQGQYPPRGLYQALAVAAMCVQEQPNLRPLIADVVTALSYLASQKFDPLAQPVQGSLFAPGTPPRSKRV

SEQ ID NO: 23120 - protein, 229 aa, Arabidopsis thaliana
  peptide (1)..(229): Ceres Seq. ID no. 12562706
MPLGSLEDHLHDISPGKQPLDWNTRMKIAAGAAKGLEYLHDKTMPPVIYRDLKCSNILLDDDYFPKLSDFGLAKLGPVGDKSHVSTRVMGTYGYCAPEYAMTGQLTLKSDVYSFGVVLLEIITGRKAIDSSRSTGEQNLVAWARPLFKDRMKFSQMADPMLQGQYPPRGLYQALAVAAMCVQEQPNLRPLIADVVTALSYLASQKFDPLAQPVQGSLFAPGTPPRSKRV

SEQ ID NO: 23121 - DNA, 1161 bp, Arabidopsis thaliana
  misc_feature (1)..(1161): Ceres Seq. ID no. 12334658
  misc_feature (1)..(1161): Ortholog of  Ceres SEQ ID NO 15178797 as cited in SEQ ID NO 1152
  misc_feature (1)..(1161): Ortholog of  Ceres SEQ ID NO 15175688 as cited in SEQ ID NO 60465
  misc_feature (1)..(1161): Ortholog of  Ceres SEQ ID NO 13495628 as cited in SEQ ID NO 60727
aaaacacaaacaccaaaaacactatggataagacaatgacactgttcttgctcttgtccactctcctcctcacgacttctttagctaaagatctctgtcataaagatgacaaaactaccctcctcaagatcaagaaatccctaaacaacccttaccacctcgcctcatgggatcccaaaaccgactgttgctcttggtactgcctcgagtgcggcgacgctactgtcaaccaccgtgtcacttccctaatcatacaagacggcgagatctccggtcagatcccccctgaagtcggtgacttaccgtatcttacatcccttatcttccgcaaactcactaacctcactggtcacatccaacccactatcgccaagctcaagaacctcacttttctcagactaagctggaccaatctcaccggtccggttcctgagtttctgagtcagctcaagaatcttgagtacattgacctttccttcaatgacctctctggttccatacctagttccctctcttcattacgtaaactcgagtatcttgaacttagtaggaacaagcttacaggtccgataccagagtcatttgggacgttttcaggaaaggtccctagtcttttcctatcacacaaccagctctctggtactataccaaagtcactaggcaatcccgacttttaccgcatcgatttatctcggaacaagcttcaaggcgatgcttcaatcttgtttggagctaaaaaaacaacatggatcgttgatatatcaagaaacatgttccagttcgatctctccaaggttaagctcgctaagacacttaataacttggacatgaatcacaatggcatcacagggagtattccggctgagtggagcaaagcttattttcagttactgaatgttagctataacagactgtgtggacgcatccccaaaggagagtatattcaaagatttgattcttattcctttttccacaacaagtgtttatgtggtgcacctcttcctagttgcaagtgaagattccagcaaaaccaagcattatctctgatataccaaataattaatcaagtctagtgacaattgtgtttttattttgaatgattaataaaagcatgaaccaatgttttagcttgatttcattgattaacggaaaaagttgagc

SEQ ID NO: 23122 - protein, 337 aa, Arabidopsis thaliana
  peptide (1)..(337): Ceres Seq. ID no. 12334659
NTNTKNTMDKTMTLFLLLSTLLLTTSLAKDLCHKDDKTTLLKIKKSLNNPYHLASWDPKTDCCSWYCLECGDATVNHRVTSLIIQDGEISGQIPPEVGDLPYLTSLIFRKLTNLTGHIQPTIAKLKNLTFLRLSWTNLTGPVPEFLSQLKNLEYIDLSFNDLSGSIPSSLSSLRKLEYLELSRNKLTGPIPESFGTFSGKVPSLFLSHNQLSGTIPKSLGNPDFYRIDLSRNKLQGDASILFGAKKTTWIVDISRNMFQFDLSKVKLAKTLNNLDMNHNGITGSIPAEWSKAYFQLLNVSYNRLCGRIPKGEYIQRFDSYSFFHNKCLCGAPLPSCK

SEQ ID NO: 23123 - protein, 330 aa, Arabidopsis thaliana
  peptide (1)..(330): Ceres Seq. ID no. 12334660
MDKTMTLFLLLSTLLLTTSLAKDLCHKDDKTTLLKIKKSLNNPYHLASWDPKTDCCSWYCLECGDATVNHRVTSLIIQDGEISGQIPPEVGDLPYLTSLIFRKLTNLTGHIQPTIAKLKNLTFLRLSWTNLTGPVPEFLSQLKNLEYIDLSFNDLSGSIPSSLSSLRKLEYLELSRNKLTGPIPESFGTFSGKVPSLFLSHNQLSGTIPKSLGNPDFYRIDLSRNKLQGDASILFGAKKTTWIVDISRNMFQFDLSKVKLAKTLNNLDMNHNGITGSIPAEWSKAYFQLLNVSYNRLCGRIPKGEYIQRFDSYSFFHNKCLCGAPLPSCK

SEQ ID NO: 23124 - protein, 326 aa, Arabidopsis thaliana
  peptide (1)..(326): Ceres Seq. ID no. 12334661
MTLFLLLSTLLLTTSLAKDLCHKDDKTTLLKIKKSLNNPYHLASWDPKTDCCSWYCLECGDATVNHRVTSLIIQDGEISGQIPPEVGDLPYLTSLIFRKLTNLTGHIQPTIAKLKNLTFLRLSWTNLTGPVPEFLSQLKNLEYIDLSFNDLSGSIPSSLSSLRKLEYLELSRNKLTGPIPESFGTFSGKVPSLFLSHNQLSGTIPKSLGNPDFYRIDLSRNKLQGDASILFGAKKTTWIVDISRNMFQFDLSKVKLAKTLNNLDMNHNGITGSIPAEWSKAYFQLLNVSYNRLCGRIPKGEYIQRFDSYSFFHNKCLCGAPLPSCK

SEQ ID NO: 23125 - DNA, 1418 bp, Arabidopsis thaliana
  misc_feature (1)..(1418): Ceres Seq. ID no. 12324465
  misc_feature (1)..(1418): Ortholog of  Ceres SEQ ID NO 12614389 as cited in SEQ ID NO 67917
agaacctaaaaacttggaacttctttttatctgcggtacacagccaaatttgcaaaaataagttccaacgcgtctagactcgattcgtgcgactcgggaagactaggctcgtttaaaggttcacgcttttgatatttcgagctcctagagacctagactctagtcctgaggctgattggtagaggaaattggaaaagcttggattgaaaactatggaagcgaagaaagtgacagaagaggaagaagagacgtggaggagagagatagtaacaagcgttatgagattagtgagtacgagattgcctcagacagatctaatttctctacttctggttagcccatggctttatcgcaccctcatctcctatccttcaatctggctgaccatcaatttgcgcgagatgaccaatgcaggggatcggcttttagctgctctgtccttgccaagatatcgacaagtgaagcatatcaatcttgaatttgcccagggtgttgtggacagtcatcttaaacttgtgaaaaccgagtgcccggatgctcttttgagtctagaatggttgaatctgaacgtgtgccaaaagatatcagacaatggaatcgaagctataactagcatatgtccaaagttaaaagttttctctatctactggaacgtaagggtgaccgatgctggcattagaaatctagtgaagaattgcagacatatcactgatttgaacttaagtggctgcaagagcctaacggacaaaagtatgcaactagtagctgaaagttatccagacttagagtcactgaatatcactaggtgtgttaagattacagatgatggattacttcaagtgctacaaaaatgtttctctctccagaccttaaatctctatgctctttcaggcttcacagacaaagcctacatgaagatatcacttttagctgacctaaggttcttagatatatgtggcgctcagaatatatctgacgaggggattggtcatatagctaaatgcaacaagttagagtctctcaacttgacatggtgtgtgcgtatcacagatgcaggtgtgaataccattgctaatagttgtacctccctcgaatttctcagcttgtttgggatagttggggtgactgacagatgtctggagaccctttcgcagacatgctcgactacactcaccactcttgatgtcaatggctgcaccggcatcaagagacgaagccgtgaagagttgcttcagatgttccctcgtttgacatgcttcaaagtacacagctgaaatttgctcatataaattagaggactctcaacaaatgtctatccttcagttataaatttgctcatataaattaaagtctcaaaattttatttccatgtattttgtatgagtttccaagcctaatagaaaatttattttttgagc

SEQ ID NO: 23126 - protein, 353 aa, Arabidopsis thaliana
  peptide (1)..(353): Ceres Seq. ID no. 12324466
MEAKKVTEEEEETWRREIVTSVMRLVSTRLPQTDLISLLLVSPWLYRTLISYPSIWLTINLREMTNAGDRLLAALSLPRYRQVKHINLEFAQGVVDSHLKLVKTECPDALLSLEWLNLNVCQKISDNGIEAITSICPKLKVFSIYWNVRVTDAGIRNLVKNCRHITDLNLSGCKSLTDKSMQLVAESYPDLESLNITRCVKITDDGLLQVLQKCFSLQTLNLYALSGFTDKAYMKISLLADLRFLDICGAQNISDEGIGHIAKCNKLESLNLTWCVRITDAGVNTIANSCTSLEFLSLFGIVGVTDRCLETLSQTCSTTLTTLDVNGCTGIKRRSREELLQMFPRLTCFKVHS

SEQ ID NO: 23127 - protein, 331 aa, Arabidopsis thaliana
  peptide (1)..(331): Ceres Seq. ID no. 12324467
MRLVSTRLPQTDLISLLLVSPWLYRTLISYPSIWLTINLREMTNAGDRLLAALSLPRYRQVKHINLEFAQGVVDSHLKLVKTECPDALLSLEWLNLNVCQKISDNGIEAITSICPKLKVFSIYWNVRVTDAGIRNLVKNCRHITDLNLSGCKSLTDKSMQLVAESYPDLESLNITRCVKITDDGLLQVLQKCFSLQTLNLYALSGFTDKAYMKISLLADLRFLDICGAQNISDEGIGHIAKCNKLESLNLTWCVRITDAGVNTIANSCTSLEFLSLFGIVGVTDRCLETLSQTCSTTLTTLDVNGCTGIKRRSREELLQMFPRLTCFKVHS

SEQ ID NO: 23128 - protein, 290 aa, Arabidopsis thaliana
  peptide (1)..(290): Ceres Seq. ID no. 12324468
MTNAGDRLLAALSLPRYRQVKHINLEFAQGVVDSHLKLVKTECPDALLSLEWLNLNVCQKISDNGIEAITSICPKLKVFSIYWNVRVTDAGIRNLVKNCRHITDLNLSGCKSLTDKSMQLVAESYPDLESLNITRCVKITDDGLLQVLQKCFSLQTLNLYALSGFTDKAYMKISLLADLRFLDICGAQNISDEGIGHIAKCNKLESLNLTWCVRITDAGVNTIANSCTSLEFLSLFGIVGVTDRCLETLSQTCSTTLTTLDVNGCTGIKRRSREELLQMFPRLTCFKVHS

SEQ ID NO: 23129 - DNA, 1108 bp, Arabidopsis thaliana
  misc_feature (1)..(1108): Ceres Seq. ID no. 13646289
  misc_feature (1)..(1108): Ortholog of  Ceres SEQ ID NO 14306201 as cited in SEQ ID NO 59956
attcttcgtcgtcctcctttgaaattcacaccaatttgtctctcttcctagagaagcaaaagattattcgaaactcgggaaagtatcacccggtcaccggaaaattgattatttccgatgccaataggtgaccgtcagaatccgagtgtggagaagaagaagaacctcttcaggctatgtccgttttggcagaggagcagcaccacttcttcatcttcaacacagaatccaagccaaaactaccgtagccgccatggacatcggaatacagatatttccgccgtctctaagccttccttgactatgtcttccgtcgccagatcacttcttccagctcgccgtcgtctccgactagatccttccagttatctctatttcccttatgaacctggtaaacaagttcgcagcgcaataaagcttaagaacactagcaaatctcatactgcatttaagttccaaacaacggcacctaagagttgttatatgcgtcctcccggaggtgttttggctccaggagagagtgttttcgctactgtgttcaagtttgtggaacatccagagaacaatgaaaagcagccgttgaaccagaagagcaaggttaagtttaagattatgagcctgaaagttaaaccaggagtagagtatgtgcctgagttgtttgatgagcaaaaggatcaagtagcagtggagcaggttcttcgggtcatttttattgatgcggaccgcccaagtgctgcattggagaaactgaaacgtcaattggatgaagctgaagctgcagttgaagcaagaaagaagcctcccccagagacagggcctcgagttgtcggggagggtcttgtcatagacgaatggaaggagagaagagagaagtaccttgctcggcaacaagtcgaatctgtagattctttgtcctaaacgcagagagcaatgtggatttgttatacgcttatagcagaggtaaaagaagctccttcttcttattcttcatcttctgcagatcatgtacataatttattatccctcggttatgtatttatctctagacgattactttgtggttcttgtatgtctctgtttgttgtgttattcatgccgggtttttctc

SEQ ID NO: 23130 - protein, 266 aa, Arabidopsis thaliana
  peptide (1)..(266): Ceres Seq. ID no. 13646290
MPIGDRQNPSVEKKKNLFRLCPFWQRSSTTSSSSTQNPSQNYRSRHGHRNTDISAVSKPSLTMSSVARSLLPARRRLRLDPSSYLYFPYEPGKQVRSAIKLKNTSKSHTAFKFQTTAPKSCYMRPPGGVLAPGESVFATVFKFVEHPENNEKQPLNQKSKVKFKIMSLKVKPGVEYVPELFDEQKDQVAVEQVLRVIFIDADRPSAALEKLKRQLDEAEAAVEARKKPPPETGPRVVGEGLVIDEWKERREKYLARQQVESVDSLS

SEQ ID NO: 23131 - protein, 204 aa, Arabidopsis thaliana
  peptide (1)..(204): Ceres Seq. ID no. 13646291
MSSVARSLLPARRRLRLDPSSYLYFPYEPGKQVRSAIKLKNTSKSHTAFKFQTTAPKSCYMRPPGGVLAPGESVFATVFKFVEHPENNEKQPLNQKSKVKFKIMSLKVKPGVEYVPELFDEQKDQVAVEQVLRVIFIDADRPSAALEKLKRQLDEAEAAVEARKKPPPETGPRVVGEGLVIDEWKERREKYLARQQVESVDSLS

SEQ ID NO: 23132 - protein, 144 aa, Arabidopsis thaliana
  peptide (1)..(144): Ceres Seq. ID no. 13646292
MRPPGGVLAPGESVFATVFKFVEHPENNEKQPLNQKSKVKFKIMSLKVKPGVEYVPELFDEQKDQVAVEQVLRVIFIDADRPSAALEKLKRQLDEAEAAVEARKKPPPETGPRVVGEGLVIDEWKERREKYLARQQVESVDSLS

SEQ ID NO: 23133 - DNA, 883 bp, Arabidopsis thaliana
  misc_feature (1)..(883): Ceres Seq. ID no. 12423215
  misc_feature (1)..(883): Ortholog of  Ceres SEQ ID NO 13589868 as cited in SEQ ID NO 55521
  misc_feature (1)..(883): Ortholog of  Ceres SEQ ID NO 14312250 as cited in SEQ ID NO 59168
  misc_feature (1)..(883): Ortholog of  Ceres SEQ ID NO 12617659 as cited in SEQ ID NO 65286
  misc_feature (1)..(883): Ortholog of  Ceres SEQ ID NO 15179979 as cited in SEQ ID NO 0
aaaaaaaaatcatcgtgaaacgttcgaaggccattttctttggacgaccatcggcgttaaggagagagcttagatctcgtgccgtcgtgcgacgttgttttccggcttgatcaaaatggggttgtcattcggaaagttgttcagcaggctctttgcgaagaaagagatgcgtattctgatggttggtctcgatgctgctggtaagacgactatcctctacaagctcaaacttggagagatcgtcaccactattccaaccattgggttcaacgttgagactgttgaatacaagaacatcagcttcaccgtgtgggatgttgggggtcaagacaagatccgtccattgtggagacattacttccagaacacacagggacttatctttgttgtggacagcaatgatcgtgaccgtgttgttgaagccagggacgagcttcacaggatgctgaatgaggatgaattgagggatgcagttctgcttgtatttgctaacaagcaagatcttcccaacgcgatgaacgctgctgagataactgacaagcttgggcttcattctcttcgtcaacgacactggtacattcagagcacatgtgccacctctggagaaggactctatgagggacttgactggctctccaacaacatcgcaagcaaggcatagatggaatgttagccagattcctcttctgcttgtttggtttacaaatcaaagacagaggtctgtttctctagtactaaaagatttattattatattcttcttcgtcacttatctcaaacgcagatcattttacactttgtacttccccttcaataacttgttacttctctcgtttgcttccgaatttgagtatatcatttttacatctgcttttcatcaaagc

SEQ ID NO: 23134 - protein, 181 aa, Arabidopsis thaliana; identical to SEQ ID NO: 22739
  peptide (1)..(181): Ceres Seq. ID no. 12423216

SEQ ID NO: 23135 - protein, 164 aa, Arabidopsis thaliana; identical to SEQ ID NO: 22740
  peptide (1)..(164): Ceres Seq. ID no. 12423217

SEQ ID NO: 23136 - protein, 160 aa, Arabidopsis thaliana; identical to SEQ ID NO: 22741
  peptide (1)..(160): Ceres Seq. ID no. 12423218

SEQ ID NO: 23137 - DNA, 1383 bp, Arabidopsis thaliana
  misc_feature (1)..(1383): Ceres Seq. ID no. 13493889
  misc_feature (1)..(1383): Ortholog of  Ceres SEQ ID NO 12609528 as cited in SEQ ID NO 51902
  misc_feature (1)..(1383): Ortholog of  Ceres SEQ ID NO 12625248 as cited in SEQ ID NO 68797
gaattgacggaggtccgttactctgaatccttgtattcgcattaaccctaactttttctgcttctcaagcgtctcgaaatctgaatccagagattaaacaaaaattgaacggacttgctttgacacagcagaccgtaaatcgggatgggtgctcctaagcagaaatggactcaagaagaagaatcagctttaaagtctggagttataaagcatggacctggtaaatggcgcacaattctcaaagatcctgaatttagcggagtcttgtacctgcgttccaatgttgatcttaaggataaatggagaaacatgagtgtcatggcaaatggctggggatcgcgcgaaaagtctaggttagctgttaaaaggacgttctcccttcctaaacaggaagagaactcactagccctaaccaattctttgcaaagtgatgaagaaaatgtggatgcgacctctggactccaagtttcttctaatcctcctccaaggagacctaatgtaaggttggatagccttataatggaagcaatagctaccctgaaagagcctggtggctgtaacaaaacaacaattggtgcctacattgaggatcaatatcatgctccaccagacttcaaacggttgttgtctaccaagctaaagtacttgacatcttgcgggaaacttgtgaaggttaaacgtaagtacagaattccaaactccactcccttgtcttcccacaggagaaaaggtctgggggtgtttggaggaaaacagaggacttcttctttgccttcacctaaaacagacatagatgaagtgaattttcagacaaggtcacagattgatacagagatagccagaatgaagagtatgaacgtacatgaggcggcagcagttgcagcacaggcagtagcagaggcagaagctgccatggcagaggctgaggaagctgcaaaggaagcggaggcagcagaagccgaagcagaagtagctcaagctttcgctgaggaagcttcaaagacattgaaaggaagaaacatctgcaaaatgatgatccgtgcctgaggtaatggaaagcgagagaagaaggagactaaatgtgaagagagagtagagagaagcctagtgtttgtgttgatcattctctttacttgggaagttgttttttagtagtaagcaatcaaatatgtttgtcagtatgtcgtcgctctgactcttttgattcctgcacaacttttgggaaaaaatgttttatttggctcttctcactctccaatatacatacaattatcgttagtaatgtgtataatttatagaccgatctatctatgcactatcatgcttatcgccaatgagcattttgattatgtatgtattatcaattaatagtagtactgtttt

SEQ ID NO: 23138 - protein, 300 aa, Arabidopsis thaliana
  peptide (1)..(300): Ceres Seq. ID no. 13493890
MGAPKQKWTQEEESALKSGVIKHGPGKWRTILKDPEFSGVLYLRSNVDLKDKWRNMSVMANGWGSREKSRLAVKRTFSLPKQEENSLALTNSLQSDEENVDATSGLQVSSNPPPRRPNVRLDSLIMEAIATLKEPGGCNKTTIGAYIEDQYHAPPDFKRLLSTKLKYLTSCGKLVKVKRKYRIPNSTPLSSHRRKGLGVFGGKQRTSSLPSPKTDIDEVNFQTRSQIDTEIARMKSMNVHEAAAVAAQAVAEAEAAMAEAEEAAKEAEAAEAEAEVAQAFAEEASKTLKGRNICKMMIRA

SEQ ID NO: 23139 - protein, 245 aa, Arabidopsis thaliana
  peptide (1)..(245): Ceres Seq. ID no. 13493891
MSVMANGWGSREKSRLAVKRTFSLPKQEENSLALTNSLQSDEENVDATSGLQVSSNPPPRRPNVRLDSLIMEAIATLKEPGGCNKTTIGAYIEDQYHAPPDFKRLLSTKLKYLTSCGKLVKVKRKYRIPNSTPLSSHRRKGLGVFGGKQRTSSLPSPKTDIDEVNFQTRSQIDTEIARMKSMNVHEAAAVAAQAVAEAEAAMAEAEEAAKEAEAAEAEAEVAQAFAEEASKTLKGRNICKMMIRA

SEQ ID NO: 23140 - protein, 242 aa, Arabidopsis thaliana
  peptide (1)..(242): Ceres Seq. ID no. 13493892
MANGWGSREKSRLAVKRTFSLPKQEENSLALTNSLQSDEENVDATSGLQVSSNPPPRRPNVRLDSLIMEAIATLKEPGGCNKTTIGAYIEDQYHAPPDFKRLLSTKLKYLTSCGKLVKVKRKYRIPNSTPLSSHRRKGLGVFGGKQRTSSLPSPKTDIDEVNFQTRSQIDTEIARMKSMNVHEAAAVAAQAVAEAEAAMAEAEEAAKEAEAAEAEAEVAQAFAEEASKTLKGRNICKMMIRA

SEQ ID NO: 23141 - DNA, 1200 bp, Arabidopsis thaliana
  misc_feature (1)..(1200): Ceres Seq. ID no. 13490536
  misc_feature (1)..(1200): Ortholog of  Ceres SEQ ID NO 14314534 as cited in SEQ ID NO 52434
  misc_feature (1)..(1200): Ortholog of  Ceres SEQ ID NO 12619999 as cited in SEQ ID NO 66123
  misc_feature (1)..(1200): Ortholog of  Ceres SEQ ID NO 13656436 as cited in SEQ ID NO 69154
aattgctcctctcctctttctcacgaagaagaagacgaagcccatcaaattaaacaagaaaaattccattttcctccattgattgtgagtgagaacaaacatttaaagcttcttactcaaagtttctttctttatagatctcaaaaaattcgatatttttctcgattcatccgccattaaggttttattgcgagatcgaagagagaaggagaaaatgacgcatagagtagatcaggaatatgattatttgtttaagattgtgttgattggtgattctggtgttgggaaatcgaatatcttgtcgagattcaccaggaatgagttttgcttggaatctaaatccactattggtgttgaattcgccaccagaactactcaggttgaaggaaagaccattaaggcccagatctgggacactgcaggtcaggagaggtacagggcgatcacaagcgcgtattacagaggcgcagtgggtgcacttcttgtctacgacattactaagagacagacctttgacaatgttttaaggtggctgcgcgaactgagagaccatgcagattccaacattgtgatcatgatggctgggaacaaatccgatctgaaccacttgagatccgttgctgaggaagatggtcaaagtttggctgagaaggaaggtctctctttcctggagacatctgctcttgaagcaacaaacgtcgagaaagcgtttcagaccatcttaggtgagatctaccatatcataagcaaaaaggcactggctgcacaagaagcagcagcagctaattctgcaatccctgggcaaggaactacgattaacgtcgatgacacatctggaggcgcgaaacgagcatgttgctcttcttaaactaaaggtaaactgtttatttcggttgctccttgttcagagattcaaacttttgttttcactggcttctcttcttttcaagttttggctgatgaaacgtaactatgcaagactatgtagaatactctgtttttattctcttcggtttggggtttgtgttcagtttaaagcttgttagtagtatacttagaatcttctggtgcttgcttgctttcccttcttcttcccttggtgtgtttctattgatttctggtttataaagtattttttctatctccggtttagtccggttcgtcttggctttgtttaatcaaatcattgattcctctctc

SEQ ID NO: 23142 - protein, 217 aa, Arabidopsis thaliana
  peptide (1)..(217): Ceres Seq. ID no. 13490537
MTHRVDQEYDYLFKIVLIGDSGVGKSNILSRFTRNEFCLESKSTIGVEFATRTTQVEGKTIKAQIWDTAGQERYRAITSAYYRGAVGALLVYDITKRQTFDNVLRWLRELRDHADSNIVIMMAGNKSDLNHLRSVAEEDGQSLAEKEGLSFLETSALEATNVEKAFQTILGEIYHIISKKALAAQEAAAANSAIPGQGTTINVDDTSGGAKRACCSS

SEQ ID NO: 23143 - DNA, 1131 bp, Arabidopsis thaliana
  misc_feature (1)..(1131): Ceres Seq. ID no. 12357640
  misc_feature (1)..(1131): Ortholog of  Ceres SEQ ID NO 12633565 as cited in SEQ ID NO 1190
  misc_feature (1)..(1131): Ortholog of  Ceres SEQ ID NO 15171390 as cited in SEQ ID NO 51650
  misc_feature (1)..(1131): Ortholog of  Ceres SEQ ID NO 13594845 as cited in SEQ ID NO 51940
gtgatattaacacttcgaagcttcttcttcctttagtaaattcaagtgtgaggtgtgtttattgataaagtgctcattttctcggatctcagatcttagatccaaaccctcattatttcattgatccaagatctaatagcttgagcttgctgggattttagttatggcgagacggcaagtaggttcaacaagacgtgttggcgatggtggaagcttcccttttgcaggagctttacactcaaagtctcgatcttctccactactatctatttgccttgttcttgtgggggcttgtcttctcattggttatgcttacagtggtccaggtatatttaaaagtatcaaagaagttagcaaagttacaggtgactattcttgcacagcagaagtccaaagagccattcctgtacttaagaaggcttatggagatggcatgcgcaaagtcttgcatgtgggccctgacacatgctcagtggtttccagtctattgaaagaagaagagactgaagcatggggtgttgaaccatatgatattgaggatgcagattctcactgcaagagttttgtgagcaaaggtcttgtacgtgttgctgatatcaagtttcctctgccctaccgggcaaaatccttctctcttgtgattgtgtcagatgctctggattatctctcacccaagtacctgaacaagaccgttcctgaactcgcaagggtggcttcagacggtgtggttctttttgcaggtctccctggtcagcagagagctaaagttgctgaactctctaaattcggccgacccgctaaaatgcgtagcgcatcgtggtggaaccgctttttcgtccagacaaacttagaagaaaacgatgcaccaagcaagaagttcgaacaggctgtttccaaaggattatacaaaccagcctgccaagtcttccacctcaagccattacattaaccagccaccaccaaagcctactggttccacaccaaagcatatttacacgtagagccgcacgcgaaaaaaaaaaatagcgtaatcgatatttctccttgtattttgtaacaggtcagtttttatccttcaatgttgtatccgccaacacaatttttcctattcaattaaatcataattattag

SEQ ID NO: 23144 - protein, 261 aa, Arabidopsis thaliana
  peptide (1)..(261): Ceres Seq. ID no. 12357641
MARRQVGSTRRVGDGGSFPFAGALHSKSRSSPLLSICLVLVGACLLIGYAYSGPGIFKSIKEVSKVTGDYSCTAEVQRAIPVLKKAYGDGMRKVLHVGPDTCSVVSSLLKEEETEAWGVEPYDIEDADSHCKSFVSKGLVRVADIKFPLPYRAKSFSLVIVSDALDYLSPKYLNKTVPELARVASDGVVLFAGLPGQQRAKVAELSKFGRPAKMRSASWWNRFFVQTNLEENDAPSKKFEQAVSKGLYKPACQVFHLKPLH

SEQ ID NO: 23145 - protein, 171 aa, Arabidopsis thaliana
  peptide (1)..(171): Ceres Seq. ID no. 12357642
MRKVLHVGPDTCSVVSSLLKEEETEAWGVEPYDIEDADSHCKSFVSKGLVRVADIKFPLPYRAKSFSLVIVSDALDYLSPKYLNKTVPELARVASDGVVLFAGLPGQQRAKVAELSKFGRPAKMRSASWWNRFFVQTNLEENDAPSKKFEQAVSKGLYKPACQVFHLKPLH

SEQ ID NO: 23146 - DNA, 1167 bp, Arabidopsis thaliana
  misc_feature (1)..(1167): Ceres Seq. ID no. 12348604
  misc_feature (1)..(1167): Ortholog of  Ceres SEQ ID NO 14315013 as cited in SEQ ID NO 57760
  misc_feature (1)..(1167): Ortholog of  Ceres SEQ ID NO 13598248 as cited in SEQ ID NO 64224
ggcctttaagataaagaaaaggaaacccaatcgaaaacctaaaacccgattagattttcttagatacgaaacctctcttacgacgctccttcctcaatctctctcgatcgtcggagattctttcttcaagagtcatcttcttcttcttctccttctccctaaaccctaatttatcgcgtttggatcgaatcagctgtcaattcttgttttggttttcacggccagggccatgtctgccgtatattgcggaaccaagagatcttacttcgacgataattcttctccgccctcttctaagaggttccgatgtttttcgccttccaattctccaatctggtcctctcctccttcctcatcgctcgatcagcttcactctgcgtttcctcatattgaactcacggttctcgtcaaggcactagaagataatggaagtgattttaatgctgctatgaagagcttatactctttcgcatcttctgaggagaagaaagctgaagaattggccgcaggaggtgctgctactcaggaaactgatgccgtttgtggtggaaaccccccgaccagtggtgatgactgggttgaattgttagtcagggaagtgttacaatcgtctggtacagatgatgcaaaagtacgtgcagcaagagtccttgaggccttagagaagatgttaagtgcacgtgctcgtgaagaagctggaaacaaattccaagaggagaaagtggcagtgcagcaacaggtggagaccttggtgaaggacaacacagtcctcaaacgtgctgttgctatccagcatgagcggcagaaggcattggaggatgcgaaccatcagctaggacttttgaagcaactggttcctcagtatcaggaaaagcttagaaatctggaggtgaacaattacgcgttgagaatgcagctgcagcaagtggaacatggcaactcaatgccagcaagattcaatccggacgtcttctaaagctctccaagaagacaaggacacttgcagaggaggagaaggcaataaacgaaagtagagggagagagagagagagagcgatatcaaactacaaaacaaaagtgcttttgcattgtaatactgtgtagtcaggacaaacaaacattctgtttcctttcctttttttttttatatatttctttggtttgctg

SEQ ID NO: 23147 - protein, 248 aa, Arabidopsis thaliana
  peptide (1)..(248): Ceres Seq. ID no. 12348605
MSAVYCGTKRSYFDDNSSPPSSKRFRCFSPSNSPIWSSPPSSSLDQLHSAFPHIELTVLVKALEDNGSDFNAAMKSLYSFASSEEKKAEELAAGGAATQETDAVCGGNPPTSGDDWVELLVREVLQSSGTDDAKVRAARVLEALEKMLSARAREEAGNKFQEEKVAVQQQVETLVKDNTVLKRAVAIQHERQKALEDANHQLGLLKQLVPQYQEKLRNLEVNNYALRMQLQQVEHGNSMPARFNPDVF

SEQ ID NO: 23148 - protein, 175 aa, Arabidopsis thaliana
  peptide (1)..(175): Ceres Seq. ID no. 12348606
MKSLYSFASSEEKKAEELAAGGAATQETDAVCGGNPPTSGDDWVELLVREVLQSSGTDDAKVRAARVLEALEKMLSARAREEAGNKFQEEKVAVQQQVETLVKDNTVLKRAVAIQHERQKALEDANHQLGLLKQLVPQYQEKLRNLEVNNYALRMQLQQVEHGNSMPARFNPDVF

SEQ ID NO: 23149 - DNA, 932 bp, Arabidopsis thaliana
  misc_feature (1)..(932): Ceres Seq. ID no. 13490590
  misc_feature (1)..(932): Ortholog of  Ceres SEQ ID NO 13581804 as cited in SEQ ID NO 51424
  misc_feature (1)..(932): Ortholog of  Ceres SEQ ID NO 14310890 as cited in SEQ ID NO 54290
  misc_feature (1)..(932): Ortholog of  Ceres SEQ ID NO 13663874 as cited in SEQ ID NO 67003
atctttaggccaatgaacaaattaactctctcataattcatcttcccatcctcacttctctttctttctgatcataattaatcttgctaagccagctagggcttatagaaatggagggtggtgcgagtaatgaagtagcagagagcagcaagaagatagggagagggaagatagagataaagaggatagagaacactacgaatcgtcaagtcactttctgcaaacgacgcaatggtttactcaagaaagcttatgagctctctgtcttgtgtgacgctgaggttgctcttgtcatcttctccactcgaggccgtctctacgagtacgccaacaacagtgtgagaggaacaatagaaaggtacaagaaagcttgctccgacgccgttaaccctccgaccatcaccgaagctaatactcagtactatcagcaagaggcgtctaaactccggagacagattcgggacattcagaatttgaacagacacattcttggtgaatctcttggttccttgaactttaaggaactcaagaaccttgaaagtaggcttgagaaaggaatcagtcgtgtccgatccaagaagcacgagatgttagttgcagagattgaatacatgcaaaaaagggtaaaagaaatcgagctgcaaaacgataacatgtatctccgctccaagattactgaaagaacaggtctacagcaacaagaatcgagtgtgatacatcaagggacagtttacgagtcgggtgttacttcttctcaccagtcggggcagtataaccggaattatattgcggttaaccttcttgaaccgaatcagaattcctccaaccaagaccaaccacctctgcaacttgtttgattcagtctaacataagcttctttcctcagcctgagatcgatcttatgcatatatatattcatgttacacttactg

SEQ ID NO: 23150 - protein, 248 aa, Arabidopsis thaliana
  peptide (1)..(248): Ceres Seq. ID no. 13490591
MEGGASNEVAESSKKIGRGKIEIKRIENTTNRQVTFCKRRNGLLKKAYELSVLCDAEVALVIFSTRGRLYEYANNSVRGTIERYKKACSDAVNPPTITEANTQYYQQEASKLRRQIRDIQNLNRHILGESLGSLNFKELKNLESRLEKGISRVRSKKHEMLVAEIEYMQKRVKEIELQNDNMYLRSKITERTGLQQQESSVIHQGTVYESGVTSSHQSGQYNRNYIAVNLLEPNQNSSNQDQPPLQLV

SEQ ID NO: 23151 - DNA, 758 bp, Arabidopsis thaliana
  misc_feature (1)..(758): Ceres Seq. ID no. 12397013
  misc_feature (1)..(758): Ortholog of  Ceres SEQ ID NO 15171235 as cited in SEQ ID NO 52469
  misc_feature (1)..(758): Ortholog of  Ceres SEQ ID NO 15172705 as cited in SEQ ID NO 56069
  misc_feature (1)..(758): Ortholog of  Ceres SEQ ID NO 12627215 as cited in SEQ ID NO 60976
  misc_feature (1)..(758): Ortholog of  Ceres SEQ ID NO 13654980 as cited in SEQ ID NO 63094
  misc_feature (1)..(758): Ortholog of  Ceres SEQ ID NO 15178542 as cited in SEQ ID NO 65410
  misc_feature (1)..(758): Ortholog of  Ceres SEQ ID NO 15174852 as cited in SEQ ID NO 67166
  misc_feature (1)..(758): Ortholog of  Ceres SEQ ID NO 12589584 as cited in SEQ ID NO 0
  misc_feature (1)..(758): Ortholog of  Ceres SEQ ID NO 12635657 as cited in SEQ ID NO 0
  misc_feature (1)..(758): Ortholog of  Ceres SEQ ID NO 12635879 as cited in SEQ ID NO 0
  misc_feature (1)..(758): Ortholog of  Ceres SEQ ID NO 13599649 as cited in SEQ ID NO 0
  misc_feature (1)..(758): Ortholog of  Ceres SEQ ID NO 14309205 as cited in SEQ ID NO 0
  misc_feature (1)..(758): Ortholog of  Ceres SEQ ID NO 14309404 as cited in SEQ ID NO 0
  misc_feature (1)..(758): Ortholog of  Ceres SEQ ID NO 15177492 as cited in SEQ ID NO 0
aaatatcttctcttcgtcctcaacaacttctccagaaaatctaggtcacacactttttaaatcctcgttcccaaaatcgaacaacaacaatggcgtcgcatcctaaagttttcttcgacatgaccatcggcggtgcaccagcggggaagatcgtgatggagctttacaccgacaagacaccaaagacggcggagaatttcagagctctatgcaccggagagaaaggcgtcggacgtagcggcaagccacttcacttcaaaggatcttcgtttcaccgcgtgatcccaaatttcatgtgccaaggaggagatttcaccaaaggtaacggaactggtggcgaatcgatctacggagccaagtttgaggatgagaatttcgagaggaagcacacaggaccagggattttgtcgatggctaacgctggtgctaacactaatggatctcagtttttcatctgtacggtgaagactgattggctcgatggtaagcatgtggtgtttggtcaggtggttgaaggcttggacgttgttaaggctattgagaagattggatcttcttctggaaagccgacgaagcctgttgtgatcgctgattgtggtgagatctcttcttagattccggttgtggtggtgacggtttcaaaatctatgtttctagaagtttcttcttagctaattatggactgtgatctttgctctgtttctgcttttgcgtattttcctaattaagcaccattaataataagaaagttttaaggc

SEQ ID NO: 23152 - protein, 174 aa, Arabidopsis thaliana
  peptide (1)..(174): Ceres Seq. ID no. 12397014
MASHPKVFFDMTIGGAPAGKIVMELYTDKTPKTAENFRALCTGEKGVGRSGKPLHFKGSSFHRVIPNFMCQGGDFTKGNGTGGESIYGAKFEDENFERKHTGPGILSMANAGANTNGSQFFICTVKTDWLDGKHVVFGQVVEGLDVVKAIEKIGSSSGKPTKPVVIADCGEISS

SEQ ID NO: 23153 - protein, 164 aa, Arabidopsis thaliana
  peptide (1)..(164): Ceres Seq. ID no. 12397015
MTIGGAPAGKIVMELYTDKTPKTAENFRALCTGEKGVGRSGKPLHFKGSSFHRVIPNFMCQGGDFTKGNGTGGESIYGAKFEDENFERKHTGPGILSMANAGANTNGSQFFICTVKTDWLDGKHVVFGQVVEGLDVVKAIEKIGSSSGKPTKPVVIADCGEISS

SEQ ID NO: 23154 - protein, 152 aa, Arabidopsis thaliana
  peptide (1)..(152): Ceres Seq. ID no. 12397016
MELYTDKTPKTAENFRALCTGEKGVGRSGKPLHFKGSSFHRVIPNFMCQGGDFTKGNGTGGESIYGAKFEDENFERKHTGPGILSMANAGANTNGSQFFICTVKTDWLDGKHVVFGQVVEGLDVVKAIEKIGSSSGKPTKPVVIADCGEISS

SEQ ID NO: 23155 - DNA, 876 bp, Arabidopsis thaliana
  misc_feature (1)..(876): Ceres Seq. ID no. 13487004
  misc_feature (1)..(876): Ortholog of  Ceres SEQ ID NO 15173688 as cited in SEQ ID NO 61918
  misc_feature (1)..(876): Ortholog of  Ceres SEQ ID NO 12778345 as cited in SEQ ID NO 62792
  misc_feature (1)..(876): Ortholog of  Ceres SEQ ID NO 13662513 as cited in SEQ ID NO 63303
  misc_feature (1)..(876): Ortholog of  Ceres SEQ ID NO 12616929 as cited in SEQ ID NO 63962
  misc_feature (1)..(876): Ortholog of  Ceres SEQ ID NO 15225803 as cited in SEQ ID NO 67623
tctcttcgatttcagcaattgcaatggcttccttcacaacaacttcttcttcctcgcttctcctcaaaactcttctccccgtaagccacctgaatcgtttctctacactctctggtatccgcgttggcgattcatggactcctctgctccggaacatctccaccgctgggtctcggcgtcgagtggcgattgtgaaagctgcgacggtggattcggattactcgtcgaaacggagcaatagcaatgagcagagagagacgattatgcttcctggttgcgattacaatcattggctcattgtaatggagtttcctaaagatccagcgccaagtagggatcagatgattgatacttaccttaacactcttgctactgttcttggcagcatggaagaggcgaagaagaacatgtatgcattcagtaccacgacatatactggattccaatgcaccatcgacgaagaaacatctgagaagttcaagggtttgcctggagttctctgggtcttgcctgactcctacatagatgtcaagaacaaagactatggaggcgacaagtacatcaatggagagattatcccgtgcacatacccaacataccaaccaaagcagcgcaataacactaagtatcaaagtaagagatacgaaagaaaaagagacggtcctccacctcctgaacagaggaaaccaagacaagaaccagcagcctctgattcctcttaaactataataagataatggagtgtttgcaagttttgatcttttggttagcacttagcttgttgaagtcgtgtgtaaaatcgtctagtaccaaatgatgatactgtatcatcacaccttgaacaatagctattgttatgttaggatgaaattcaac

SEQ ID NO: 23156 - protein, 239 aa, Arabidopsis thaliana
  peptide (1)..(239): Ceres Seq. ID no. 13487005
SSISAIAMASFTTTSSSSLLLKTLLPVSHLNRFSTLSGIRVGDSWTPLLRNISTAGSRRRVAIVKAATVDSDYSSKRSNSNEQRETIMLPGCDYNHWLIVMEFPKDPAPSRDQMIDTYLNTLATVLGSMEEAKKNMYAFSTTTYTGFQCTIDEETSEKFKGLPGVLWVLPDSYIDVKNKDYGGDKYINGEIIPCTYPTYQPKQRNNTKYQSKRYERKRDGPPPPEQRKPRQEPAASDSS

SEQ ID NO: 23157 - protein, 232 aa, Arabidopsis thaliana
  peptide (1)..(232): Ceres Seq. ID no. 13487006
MASFTTTSSSSLLLKTLLPVSHLNRFSTLSGIRVGDSWTPLLRNISTAGSRRRVAIVKAATVDSDYSSKRSNSNEQRETIMLPGCDYNHWLIVMEFPKDPAPSRDQMIDTYLNTLATVLGSMEEAKKNMYAFSTTTYTGFQCTIDEETSEKFKGLPGVLWVLPDSYIDVKNKDYGGDKYINGEIIPCTYPTYQPKQRNNTKYQSKRYERKRDGPPPPEQRKPRQEPAASDSS

SEQ ID NO: 23158 - protein, 152 aa, Arabidopsis thaliana
  peptide (1)..(152): Ceres Seq. ID no. 13487007
MLPGCDYNHWLIVMEFPKDPAPSRDQMIDTYLNTLATVLGSMEEAKKNMYAFSTTTYTGFQCTIDEETSEKFKGLPGVLWVLPDSYIDVKNKDYGGDKYINGEIIPCTYPTYQPKQRNNTKYQSKRYERKRDGPPPPEQRKPRQEPAASDSS

SEQ ID NO: 23159 - DNA, 1287 bp, Arabidopsis thaliana
  misc_feature (1)..(1287): Ceres Seq. ID no. 12335118
  misc_feature (1)..(1287): Ortholog of  Ceres SEQ ID NO 15168525 as cited in SEQ ID NO 58192
atacattataaagatactgatgagtggttcttgtttaatggagttttaaatttaaaaatatttggtaaccgagtggatcatcatgttattgagaagcacatctgctccgatactgaactcgtggcttccacaacactgctcgagagaatcgtctccggaaccggagtcacagctctggcgccggtcaacatcattgtctcttttctcatcaaagtccatagatggacacactggggagcagctgcaccaagctctctctgacaacaaggagattattattcttaaatcaaaaagcaacgagcacagctacaaaactccaacatcaagcaggcaacgcaggtcatctttagatgaaacacgctacacaaaaaagactttggatcggtcatcacctttcttagtggagaggctcttctcgagctctggacagggagataaggccagtagtaatgatcgtctggagactcttgtgagtggtggtggtggcgggatgggaggcagcggcggcaatatttgtaacggcggcggtggtgtcggtggaagtggtgtggacggcggtaggagtgaggacgctaccgacacgtattaccgggagatgatcgactcgaatccaggaaactcgcttttgaccggaaactacgccaagttcttgaaagaggtgaaaggagacatgaaaaaagcagaagagtattgtgaaagagcaattttggggaacaccaacgatggaaacgttctatctctctatgctgatctcattttgcacaaccatcaagatcgtcaaagagcccactcttactataagcaagccgtcaagatgtccccggaagattgttatgtgcaagcttcatacgcaaggtttctgtgggatgtggatgaggacgaagaagatgaagcattaggagaagaagaagagaacttgagtgatgaaactggccatgtgcctccaactaccatgttccgtgattttccccaacacacttctattaccgcatcatcctaagacacatatgaacaccttcgtgaatgttcgtatttaggtaaataacatatatagaagcatatttaatacacatactcaaatgcaatatgcgtgtataatatatgttcagaatctttgtatatgttctgtagtcttcataataagggtatgtacttatatttgcagtatttatgtgtctttttgtattataaagtatgaaacttacccatgtcctatcgagatagacaaaatattaggcatttgtttgttaaaaaaaagtatgatgaaattgatgatacagatcgatc

SEQ ID NO: 23160 - protein, 305 aa, Arabidopsis thaliana
  peptide (1)..(305): Ceres Seq. ID no. 12335119
MLLRSTSAPILNSWLPQHCSRESSPEPESQLWRRSTSLSLFSSKSIDGHTGEQLHQALSDNKEIIILKSKSNEHSYKTPTSSRQRRSSLDETRYTKKTLDRSSPFLVERLFSSSGQGDKASSNDRLETLVSGGGGGMGGSGGNICNGGGGVGGSGVDGGRSEDATDTYYREMIDSNPGNSLLTGNYAKFLKEVKGDMKKAEEYCERAILGNTNDGNVLSLYADLILHNHQDRQRAHSYYKQAVKMSPEDCYVQASYARFLWDVDEDEEDEALGEEEENLSDETGHVPPTTMFRDFPQHTSITASS

SEQ ID NO: 23161 - protein, 169 aa, Arabidopsis thaliana
  peptide (1)..(169): Ceres Seq. ID no. 12335120
MGGSGGNICNGGGGVGGSGVDGGRSEDATDTYYREMIDSNPGNSLLTGNYAKFLKEVKGDMKKAEEYCERAILGNTNDGNVLSLYADLILHNHQDRQRAHSYYKQAVKMSPEDCYVQASYARFLWDVDEDEEDEALGEEEENLSDETGHVPPTTMFRDFPQHTSITASS

SEQ ID NO: 23162 - DNA, 481 bp, Arabidopsis thaliana
  misc_feature (1)..(481): Ceres Seq. ID no. 12562032
  misc_feature (1)..(481): Ortholog of  Ceres SEQ ID NO 12337178 as cited in SEQ ID NO 20526
tcggtaaacttcaaatcagaagcgaagaagagatcaaatcaatctgatcgtagatgggttgtttcagttgcttcgacggaacccaaaaggaacagcgtaaggaagaagagagacaagcctccgccgaagctcgtgccaaagccgccgaagctgcccagcgacggaaagagcagtttgataagtctgcagctggaagagctgcacaagctcaattacaacaaatggctaaacaatctgcaaatactaacaaaggagagcctgttcttaagtggcaaatgacgtagtgatgagtcctggtttcaaaaggaatcaatttgtgcgatttggttctttgtaaattgtgtgttcttcaatgtttgcaatactttggttatgtgaattgaagcttattttcttccttattcatctgattatcttttgacttttgtaaaacaaaaaagaaataacagagtacaatgttaagatcatctctctgttttac

SEQ ID NO: 23163 - protein, 92 aa, Arabidopsis thaliana
  peptide (1)..(92): Ceres Seq. ID no. 12562033
SVNFKSEAKKRSNQSDRRWVVSVASTEPKRNSVRKKRDKPPPKLVPKPPKLPSDGKSSLISLQLEELHKLNYNKWLNNLQILTKESLFLSGK

SEQ ID NO: 23164 - protein, 76 aa, Arabidopsis thaliana
  peptide (1)..(76): Ceres Seq. ID no. 12562034
MGCFSCFDGTQKEQRKEEERQASAEARAKAAEAAQRRKEQFDKSAAGRAAQAQLQQMAKQSANTNKGEPVLKWQMT

SEQ ID NO: 23165 - DNA, 1069 bp, Arabidopsis thaliana
  misc_feature (1)..(1069): Ceres Seq. ID no. 12370440
  misc_feature (1)..(1069): Ortholog of  Ceres SEQ ID NO 14303446 as cited in SEQ ID NO 59378
gtttcaggcgagagagatgagcgcgacggagctgccgacgaaggaggcacacatacttaaaggccacgagggggcggttttagcggcgaggtttaacggtgacggaaactacgctctcacctgtggcaaggatcgaactatccgcctctggaacccgcaccgtggaatcttaatcaagacctacaaatctcatggccgcgaagtccgcgacgttcatgttacttcagacaatgccaaattttgctcatgtggtggtgatcggcaagtttactactgggatgtttcaactggacgtgtaatccgtaaattccgtggtcatgatggagaggtcaatgcagtgaagttcaatgattcgtcgtctgtggttgtatcagctgggttcgatcgttcgctacgtgtatgggactgcagatctcacagtgttgagccagtacagatcattgatacatttttggatacagtcatgtctgttgttttaacaaagactgagattattggtggtagtgtcgatggaacagttcgcacatttgacatgcgtatcggtagggagatgtcagataacctaggccaaccggttaactgtatatcgatatcaaatgatggaaactgcgttttagctggttgcttggattctactctgcgtctacttgacaggaccacaggagagctactccaagtctataaaggtcatatttccaagtcatttaaaacggattgttgcctcacgaattcggatgcacatgtgattggaggatcagaggatggattggttttcttttgggatttggtagatgcaaaagtgctatcgaaatttagagctcacgatttagtggtgacaagcgtgagttaccacccgaaggaagactgtatgttgacttcttcggtcgatggtacaattcgtgtctggaaaaaatgaagaaacaacaaatcttgacttcgattgattttgttatttacgtcgcaaactcacttttcttcttctactatagctgtttttttggagttggaaagttgaaatattttgtagagtacttgtatcattgtatgtgaaggaaaactttttttaggc

SEQ ID NO: 23166 - protein, 304 aa, Arabidopsis thaliana
  peptide (1)..(304): Ceres Seq. ID no. 12370441
FQAREMSATELPTKEAHILKGHEGAVLAARFNGDGNYALTCGKDRTIRLWNPHRGILIKTYKSHGREVRDVHVTSDNAKFCSCGGDRQVYYWDVSTGRVIRKFRGHDGEVNAVKFNDSSSVVVSAGFDRSLRVWDCRSHSVEPVQIIDTFLDTVMSVVLTKTEIIGGSVDGTVRTFDMRIGREMSDNLGQPVNCISISNDGNCVLAGCLDSTLRLLDRTTGELLQVYKGHISKSFKTDCCLTNSDAHVIGGSEDGLVFFWDLVDAKVLSKFRAHDLVVTSVSYHPKEDCMLTSSVDGTIRVWKK

SEQ ID NO: 23167 - protein, 299 aa, Arabidopsis thaliana
  peptide (1)..(299): Ceres Seq. ID no. 12370442
MSATELPTKEAHILKGHEGAVLAARFNGDGNYALTCGKDRTIRLWNPHRGILIKTYKSHGREVRDVHVTSDNAKFCSCGGDRQVYYWDVSTGRVIRKFRGHDGEVNAVKFNDSSSVVVSAGFDRSLRVWDCRSHSVEPVQIIDTFLDTVMSVVLTKTEIIGGSVDGTVRTFDMRIGREMSDNLGQPVNCISISNDGNCVLAGCLDSTLRLLDRTTGELLQVYKGHISKSFKTDCCLTNSDAHVIGGSEDGLVFFWDLVDAKVLSKFRAHDLVVTSVSYHPKEDCMLTSSVDGTIRVWKK

SEQ ID NO: 23168 - DNA, 2788 bp, Arabidopsis thaliana
  misc_feature (1)..(2788): Ceres Seq. ID no. 13488489
  misc_feature (1)..(2788): Ortholog of  Ceres SEQ ID NO 13655660 as cited in SEQ ID NO 63727
gtctacaaaaattcgtcgaccattgcatttttcagttttgaaactcgaaagagatggagggaaaattcgctatttcagaatcgactaatttgcttcaaaggatcaaagattttactcaatcggtcgttgtagatctggctgaaggaagatctccaaaaatttccatcaatcaattcaggaactattgcatgaatccagaagctgattgcttatgcagctctgataaaccaaagggtcaggaaattttcactcttaagaaggaaccacaaacctacagaatcgatatgttgctaagagtattgttgatagtccaacaacttctgcaagaaaatagacatgcttcgaaaagagatatctactacatgcatccatcagctttcaaagcacaatccattgtggaccgtgcaattggtgatatatgcattctttttcagtgtagtcggtacaacttgaatgtggtttctgttggaaacgggttggtgatgggttggttaaaatttagggaagctggaaggaaatttgattgtttaaacagcttgaacactgcatatcccgttcctgttcttgtagaggaagtcgaagatattgttagcttagctgagtacatactggttgtggaaaaagaaacagtattccagcgtttagcaaatgacatgttttgcaagacgaaccgctgcattgttatcacaggaagaggatatccagatgtctcaacaagaaggttcttgcgactcctgatggagaagttgcatctacctgtgcattgtctagtcgactgtgatccatatggctttgagatcctagccacataccgttttggctccatgcaaatggcctatgatattgaatcattacgagcaccagatatgaaatggttgggagcttttccttcagactctgaggtatatagtgttcccaaacagtgtcttttgccactgacagaagaagataagaaaagaactgaagcaatgttgcttagatgctacctgaagcgtgaaatgccacaatggaggttggaacttgaaacgatgttgaaaagaggggtcaagtttgagatcgaagcactctcagttcactcactgtcctttttgtcagaggtatatattccttctaagattcgtcgtgaagtaagctctccttgagcttcatacgagataactagtctccaactcaaggtaatgctcattgttttttttatgactctttctaagctttttagtgcaaaccaaatgcattggtagaatggacaaatgaacatagttttaatggaaaaatcataaatatacagattataaaaaataattctcagtttttaatttttaataatacaaagtacattcactaatgactaatgagtaataagtttgaaattttgaataatacaaaagtaatttagggttcatttgctttatattgttaccaaacctaatttgaagtattaaagccgttcccctgactaaaaacctttgaacactccgatccaaaaaaaagaagagaaaaacctttgcatacagctaaaaacgatgtcgtctctctctcgctttctccttcgtggcaacttcagcttcagcacccacacgaatcgccgcttcttctccgccgttaccgctgctgcagccacaccctcgccacccaaaccgtccctcatcaccctcgtaaatgacgaacgcgaccccaaattcatcacggagaagttcaagaaagcctgccaagcagagtggttccggaagaatatagccgtctatgagagaaccgttcgccgtctcgctgcagccaagaaatttgagtgggtcgaggagatcctggaggagcagaataagtatccaaacatgtcaaaggaaggattcgtagcgaggattatcaatctctatggacgagtcggtatgtttgagaatgcacagaaagtgttcgacgaaatgcctgagagaaactgcaagagaacagtgttgtctttcaacgcattactgaatgcctgtgtgaactccaagaagtttgatttggttgaaggtatcttcgaggagttgccaggtaagctctcgattgaaccagatgttgcatcttacaatactttgatcaagggattgtgtggaaagggttccttcactgaagctgttgcgttgattgatgagattgagaacaagggtttgaaacctgatcatatcaccttcaataaggagaacagatatgggctagaatggtagagaagaatgttaagcgagacatccgtagttacaatgctcggttgttaggactagccatggagaataaatcagaagagatggttagtctctttgacaaacttaagggtaatgagctcaaacctgatgttttcacattcactgccatgattaaaggatttgtcagtgaaggaaaattagatgaagccataacgtggtacaaggaaatcgagaagaatggttgtcgcccgttgaaatttgtctttaactcattgcttcctgcaatatgtaaggcgggcgatttagagtctgcttatgagctctgcaaggaaatatttgctaagcgtctgctagtcgatgaggctgtcctgcaggaggtagttgatgcattggtgaaagggtccaagcaagacgaagctgaagagattgtcgagctagcaaagacgaatgactatttgcagtgcaagcttcgtctctttcccaaagagtagttaattggcaaggcttattgactagtttttaatttagtctgtgtttccctctttttaatgtcttgttgcaaactgcgagtgcggtgattgaataattgaactatctctatctgtagtgtg

SEQ ID NO: 23169 - protein, 362 aa, Arabidopsis thaliana
  peptide (1)..(362): Ceres Seq. ID no. 13488490
MEGKFAISESTNLLQRIKDFTQSVVVDLAEGRSPKISINQFRNYCMNPEADCLCSSDKPKGQEIFTLKKEPQTYRIDMLLRVLLIVQQLLQENRHASKRDIYYMHPSAFKAQSIVDRAIGDICILFQCSRYNLNVVSVGNGLVMGWLKFREAGRKFDCLNSLNTAYPVPVLVEEVEDIVSLAEYILVVEKETVFQRLANDMFCKTNRCIVITGRGYPDVSTRRFLRLLMEKLHLPVHCLVDCDPYGFEILATYRFGSMQMAYDIESLRAPDMKWLGAFPSDSEVYSVPKQCLLPLTEEDKKRTEAMLLRCYLKREMPQWRLELETMLKRGVKFEIEALSVHSLSFLSEVYIPSKIRREVSSP

SEQ ID NO: 23170 - protein, 317 aa, Arabidopsis thaliana
  peptide (1)..(317): Ceres Seq. ID no. 13488491
MNPEADCLCSSDKPKGQEIFTLKKEPQTYRIDMLLRVLLIVQQLLQENRHASKRDIYYMHPSAFKAQSIVDRAIGDICILFQCSRYNLNVVSVGNGLVMGWLKFREAGRKFDCLNSLNTAYPVPVLVEEVEDIVSLAEYILVVEKETVFQRLANDMFCKTNRCIVITGRGYPDVSTRRFLRLLMEKLHLPVHCLVDCDPYGFEILATYRFGSMQMAYDIESLRAPDMKWLGAFPSDSEVYSVPKQCLLPLTEEDKKRTEAMLLRCYLKREMPQWRLELETMLKRGVKFEIEALSVHSLSFLSEVYIPSKIRREVSSP

SEQ ID NO: 23171 - protein, 285 aa, Arabidopsis thaliana
  peptide (1)..(285): Ceres Seq. ID no. 13488492
MLLRVLLIVQQLLQENRHASKRDIYYMHPSAFKAQSIVDRAIGDICILFQCSRYNLNVVSVGNGLVMGWLKFREAGRKFDCLNSLNTAYPVPVLVEEVEDIVSLAEYILVVEKETVFQRLANDMFCKTNRCIVITGRGYPDVSTRRFLRLLMEKLHLPVHCLVDCDPYGFEILATYRFGSMQMAYDIESLRAPDMKWLGAFPSDSEVYSVPKQCLLPLTEEDKKRTEAMLLRCYLKREMPQWRLELETMLKRGVKFEIEALSVHSLSFLSEVYIPSKIRREVSSP

SEQ ID NO: 23172 - DNA, 889 bp, Arabidopsis thaliana
  misc_feature (1)..(889): Ceres Seq. ID no. 13490513
  misc_feature (1)..(889): Ortholog of  Ceres SEQ ID NO 12584790 as cited in SEQ ID NO 62648
  misc_feature (1)..(889): Ortholog of  Ceres SEQ ID NO 15178116 as cited in SEQ ID NO 0
ctctctctttgtttattcgttaggtctcaaaggctctctctgtctctttctcaaaaatcatctgcaggaagtgaatcgtcaaaaccgagtttggaggatctgtcttgaggagtttttttttggttgagaaatggcttcgaaaaggatcttgaaagagctcaaggatctccagaaggatcctccaacttcctgcagtgctggcccagttgctgaagacatgtttcattggcaagctacaataatgggtccatccgatagtccttattcaggcggagtctttctcgtaaccatccacttccctccggattatcctttcaaaccaccaaaggttgcattcaggacaaaagtgttccaccctaatgtcaacagcaatggaagcatttgccttgacattttgaaagaacaatggagtcctgcactcaccatatcgaaggttttgctttcgatatgttcattgttaacggacccaaacccagatgatccattggttccagagattgctcacatgtacaaaaccgatagagcaaagtatgagtctactgcgagaagctggactcagaaatatgcaatgggatgaaagtttgtgtcctttgatccctcaaagactcggttttaatagagagagagagagagaaagagagaggacttcttcacatagggatcttccatgaaataagttagattcctatgttttatcatctctttgtttgaaacctctttaatctcaaacaaaaacattccttctcctctttacccatccctatgtttcctatctttgttttctgtgcttttacaaaaaaaaattataagaacaattatttatgtaaagctgaaaactttgagcttttacctaacaaagtatgaagatgatgaaagatgattaaatggg

SEQ ID NO: 23173 - protein, 148 aa, Arabidopsis thaliana
  peptide (1)..(148): Ceres Seq. ID no. 13490514
MASKRILKELKDLQKDPPTSCSAGPVAEDMFHWQATIMGPSDSPYSGGVFLVTIHFPPDYPFKPPKVAFRTKVFHPNVNSNGSICLDILKEQWSPALTISKVLLSICSLLTDPNPDDPLVPEIAHMYKTDRAKYESTARSWTQKYAMG

SEQ ID NO: 23174 - protein, 119 aa, Arabidopsis thaliana
  peptide (1)..(119): Ceres Seq. ID no. 13490515
MFHWQATIMGPSDSPYSGGVFLVTIHFPPDYPFKPPKVAFRTKVFHPNVNSNGSICLDILKEQWSPALTISKVLLSICSLLTDPNPDDPLVPEIAHMYKTDRAKYESTARSWTQKYAMG

SEQ ID NO: 23175 - protein, 111 aa, Arabidopsis thaliana
  peptide (1)..(111): Ceres Seq. ID no. 13490516
MGPSDSPYSGGVFLVTIHFPPDYPFKPPKVAFRTKVFHPNVNSNGSICLDILKEQWSPALTISKVLLSICSLLTDPNPDDPLVPEIAHMYKTDRAKYESTARSWTQKYAMG

SEQ ID NO: 23176 - DNA, 935 bp, Arabidopsis thaliana
  misc_feature (1)..(935): Ceres Seq. ID no. 13486993
  misc_feature (1)..(935): Ortholog of  Ceres SEQ ID NO 13584593 as cited in SEQ ID NO 65340
atttttatttgaaagacatttttgcctatttcattcatattttgcttttaaaacgagaattataattcttcgactccgtgggataagttttctaaaaaatcgaagaaagatcgatggctctagatatctgcgtgaaggttgccgtcggtgctcctgatgttctcggcgactgtccgtttagccaacgtgttcttctgacacttgaggagaagaagcttccctacaagacccatctgattaacgtctccgacaaaccccaatggttcttagacattagtccagaggggaaagttccggtggtgaagcttgatggcaaatgggtggctgattctgacgtaattgttggacttcttgaagagaaatatccagagccttctctcaagactcctcctgaatttgcttctgtaggatccaaaatctttggtgcttttgtgactttcttgaagagcaaagacgctaatgacggatccgagaaggctttggttgatgagttagaagcgttggagaatcacttgaagacacattctggtccttttgtagctggagagaagattactgcagtggatttgagtttagcaccaaagctttaccatcttgaggttgctcttggtcattacaagaactggtctgtccctgagagcttgaccagtgttcgtaactacgccaaggctttgttctctagggagtcgtttgagaacaccaaggctaagaaagagattgtggttgcgggttgggaatcgaaggtgaatgcgtgatgtggatccatgcttctctagttaatgttgctttagaactattcttcactgaataataagaatgcacgagtatgtgtgtgttcttgtttttgttagagttggttatcaataatgatgcgataaagcagcatatctttttttgataatatacacctcttattcaatttggtattacagacc

SEQ ID NO: 23177 - protein, 213 aa, Arabidopsis thaliana
  peptide (1)..(213): Ceres Seq. ID no. 13486994
MALDICVKVAVGAPDVLGDCPFSQRVLLTLEEKKLPYKTHLINVSDKPQWFLDISPEGKVPVVKLDGKWVADSDVIVGLLEEKYPEPSLKTPPEFASVGSKIFGAFVTFLKSKDANDGSEKALVDELEALENHLKTHSGPFVAGEKITAVDLSLAPKLYHLEVALGHYKNWSVPESLTSVRNYAKALFSRESFENTKAKKEIVVAGWESKVNA

SEQ ID NO: 23178 - DNA, 1230 bp, Arabidopsis thaliana
  misc_feature (1)..(1230): Ceres Seq. ID no. 12396193
  misc_feature (1)..(1230): Ortholog of  Ceres SEQ ID NO 13594359 as cited in SEQ ID NO 58086
gattagcttccaaacatcaatcaccaaccttctagtttccttttaaccctactagagctctgctctgccatggctcccgcactatctacttcttgctcctccgtcatggctttctcaacatcaaacgcgcttcgttaccatcatcctcaaatttctctcaggaactctcttcgcgctcccaaatcgccttcttttgtcaggcttcccctcggaaaggtgttacagagcaggattgtgatacgtgctgcttcgtctgcggctggtaatccacagtctgatgctgactttaatccgtatgaggttcttggtgttaaccctatagagggatttgacaagatcaagcaaacttatggaaggaaacttaaagatgctcagaggagcggtgatgaagccactgctgctctacttgagaaggcatatgataagctcatgtatgcccagttgatgaataggaaaaagggtgtgacttttggttcgtttaaggtttccaaggacattaaatatgctgataagcagcccattataccatggggtccaaggttttccaggtcctccaagaatgatatgttgatcaacctagcaatatcagttgtgtttagtgcatggattgcgataaaacgtaatgttgaatacaaaccgctgcagttcatgtcttttgtatttgtttacagaatttttgagaaattaaaatcctttgaagcaccttcatctccaatatataacgaggaaggcgaagaaagtggacggggattgagaatgggaaagaggcttcttcgttctctttccttagtttttggctctatactcttagcatctttggcatacactgggttcttaaatggcatcgagtacatgggctactccatacccatggttctttacaacaaccaggaacttatagtgacggcgtcatcggctttcatgctctatgttatagcgtcgttttacagataatgcgagagtccacaggagaattggtcagttagaagcttttggagaagttatgctgtattataggatgttgctgggagatgaaaagtttattttctacagagagatggggttatctttataacctttcttttgtgtggaaaatcaagtaaattttgcaagagagaaatcccttagaatctaagtcttgtctatttacgtttaatgctgaggatcgcatgtggaaggttttttaatttttgtattggagcaataatatgcgtgaagtgaaaaatcttg

SEQ ID NO: 23179 - protein, 294 aa, Arabidopsis thaliana
  peptide (1)..(294): Ceres Seq. ID no. 12396194
MAPALSTSCSSVMAFSTSNALRYHHPQISLRNSLRAPKSPSFVRLPLGKVLQSRIVIRAASSAAGNPQSDADFNPYEVLGVNPIEGFDKIKQTYGRKLKDAQRSGDEATAALLEKAYDKLMYAQLMNRKKGVTFGSFKVSKDIKYADKQPIIPWGPRFSRSSKNDMLINLAISVVFSAWIAIKRNVEYKPLQFMSFVFVYRIFEKLKSFEAPSSPIYNEEGEESGRGLRMGKRLLRSLSLVFGSILLASLAYTGFLNGIEYMGYSIPMVLYNNQELIVTASSAFMLYVIASFYR

SEQ ID NO: 23180 - protein, 282 aa, Arabidopsis thaliana
  peptide (1)..(282): Ceres Seq. ID no. 12396195
MAFSTSNALRYHHPQISLRNSLRAPKSPSFVRLPLGKVLQSRIVIRAASSAAGNPQSDADFNPYEVLGVNPIEGFDKIKQTYGRKLKDAQRSGDEATAALLEKAYDKLMYAQLMNRKKGVTFGSFKVSKDIKYADKQPIIPWGPRFSRSSKNDMLINLAISVVFSAWIAIKRNVEYKPLQFMSFVFVYRIFEKLKSFEAPSSPIYNEEGEESGRGLRMGKRLLRSLSLVFGSILLASLAYTGFLNGIEYMGYSIPMVLYNNQELIVTASSAFMLYVIASFYR

SEQ ID NO: 23181 - protein, 174 aa, Arabidopsis thaliana
  peptide (1)..(174): Ceres Seq. ID no. 12396196
MYAQLMNRKKGVTFGSFKVSKDIKYADKQPIIPWGPRFSRSSKNDMLINLAISVVFSAWIAIKRNVEYKPLQFMSFVFVYRIFEKLKSFEAPSSPIYNEEGEESGRGLRMGKRLLRSLSLVFGSILLASLAYTGFLNGIEYMGYSIPMVLYNNQELIVTASSAFMLYVIASFYR

SEQ ID NO: 23182 - DNA, 763 bp, Arabidopsis thaliana
  misc_feature (1)..(763): Ceres Seq. ID no. 12334610
  misc_feature (1)..(763): Ortholog of  Ceres SEQ ID NO 13659085 as cited in SEQ ID NO 66806
aatctcgatctcgagaaagaaagaaaaaaagagaaggcatggccgcggaagaagcgacggagttctacctgagatactatgtcggtcacaaagggaaatttggacacgagttcctggagttcgagtttagagaggacggtaagctccgttacgccaataactctaactacaagaacgatactattatccgcaaggaggtatttctcacccccgccgtgctcaaggaatgcaagcgtatcgtctccgagagcgagattctgaaagaagacgataacaattggccggaacctgaccgtgttggaaagcaagagctcgagatcgtcttgggtaatgagcatatctcattcgctacatctaagattggatctcttgttgattgccagagcagtaatgatcctgaaggacttcgcatcttctactatcttgttcaggacttgaaatgtcttgttttttcgctcatctctctgcacttcaaaatcaagcctatctagagaagaaaatcagtttgtgacatgtcaagacgcgatgaatttgttgggaacatgaggactttgtgactgaagtttggttgtttttatgtctctggttctctgttttttttttttgttggatttgggtgaaagtgggtatgtaagatgttctacctcaacttttagtccttttttgtgtcaacatcccatgtgaagaacctttcatgaaccacaacctatcttctaaaaaccatatacttgctgttttcttatcacaaatcattcactctccc

SEQ ID NO: 23183 - protein, 162 aa, Arabidopsis thaliana
  peptide (1)..(162): Ceres Seq. ID no. 12334611
SRSRERKKKREGMAAEEATEFYLRYYVGHKGKFGHEFLEFEFREDGKLRYANNSNYKNDTIIRKEVFLTPAVLKECKRIVSESEILKEDDNNWPEPDRVGKQELEIVLGNEHISFATSKIGSLVDCQSSNDPEGLRIFYYLVQDLKCLVFSLISLHFKIKPI

SEQ ID NO: 23184 - protein, 150 aa, Arabidopsis thaliana
  peptide (1)..(150): Ceres Seq. ID no. 12334612
MAAEEATEFYLRYYVGHKGKFGHEFLEFEFREDGKLRYANNSNYKNDTIIRKEVFLTPAVLKECKRIVSESEILKEDDNNWPEPDRVGKQELEIVLGNEHISFATSKIGSLVDCQSSNDPEGLRIFYYLVQDLKCLVFSLISLHFKIKPI

SEQ ID NO: 23185 - DNA, 1755 bp, Arabidopsis thaliana
  misc_feature (1)..(1755): Ceres Seq. ID no. 12561836
  misc_feature (1)..(1755): Ortholog of  Ceres SEQ ID NO 13656849 as cited in SEQ ID NO 65764
cgaagaaaagcgacgccgttttaaaggagatggataaacaaccggcgaccagttggagtatccatacccggccggagataatcgccaagtacgagatcttcgagcgagtcggatccggagcttacgccgacgtttacagagctcgccgtctctccgacggtctaatcgtcgcgctcaaggagattttcgattaccaatctgcgttccgggagattgacgcgctcaccatcctcaatggatctcctaatgtagttgttatgcacgaatacttctggcgtgaggaagagaacgctgtgcttgtgcttgagtttcttaggtcggatctcgctgcggtgatccgagatggtaagaggaagaagaaggtagaaggaggggatggattctcggttggggagattaagagatggatgattcagattttaaccggtgttgatgcttgtcatcggaatttgattgtacatagagatttgaagcctgggaatatgttgatttctgatgatggagttcttaagcttgctgattttggtcaggctaggatactcatggagcatgatattgtagcttcagatgaaaaccaacaagcttacaaactggaagacaaagatggagaaaccagcgaaccaccagaagttattcctgattatgagaactcacctaggcaagggtctgatggtcaggaacgggaagcgatgagtaaagacgagtacttccgacaggtggaagagctcaaggctaaacaggttgttagagatgatactgataaggactcgaatgtgcatgatggagacatatcttgccttgcaacgtgcactgttagtgaaatggatgatgatctcggtaggaactcgttttcttacgatgctgacgaagcagtggatgatacacagggtttgatgacatcttgtgtgggaacccgatggtttaggccaccagaactgctctatggatctacgatgtatgggttagaggtcgatctatggtcgcttggttgtgtgtttgcagaactcttgtctcttgagcctttgttcccaggaatttcagatattgatcagatcagcagagtgaccaatgtgctgggaaatttaaatgaagaggtctggcctggttgtgttgatcttccagactacaagtcaatctcatttgctaaagtagaatctcctcttggtattgaaggatgccttcccaaccattcaggggatgtgatatcgctgctcaagaagcttatctgttatgatccagctagtagagctactactatggagatgctgaatgacaaatatttaagtgaagagcctcttccagttccagtttcagagctctatgtgcctccgacaatgagtggaccagatgaggattctccgagaaagtggaatgattacagagaaatggattcagattcagattttgatggctttggacccatgaatgtaaagcctaccagtagtggatttacaatagaattcccctgaccttggcatttaaggtacgcagtcaaaagctctggctcgcttaaacacataaatcagtctcttctctctctctctttcttcttcaaagagaatgggtatataccaaaacctgacatgtgtttctttaggtcttgattgatgcaacactctttgttgtttgaagatcttgttacagaataccgcttagaaaattgttaacttttcgttaggacattgtttaggtatcaatggcggcaaaaacttttgaaattcgtttgctcattgatctcacaacttttttttgcgc

SEQ ID NO: 23186 - protein, 488 aa, Arabidopsis thaliana
  peptide (1)..(488): Ceres Seq. ID no. 12561837
KKSDAVLKEMDKQPATSWSIHTRPEIIAKYEIFERVGSGAYADVYRARRLSDGLIVALKEIFDYQSAFREIDALTILNGSPNVVVMHEYFWREEENAVLVLEFLRSDLAAVIRDGKRKKKVEGGDGFSVGEIKRWMIQILTGVDACHRNLIVHRDLKPGNMLISDDGVLKLADFGQARILMEHDIVASDENQQAYKLEDKDGETSEPPEVIPDYENSPRQGSDGQEREAMSKDEYFRQVEELKAKQVVRDDTDKDSNVHDGDISCLATCTVSEMDDDLGRNSFSYDADEAVDDTQGLMTSCVGTRWFRPPELLYGSTMYGLEVDLWSLGCVFAELLSLEPLFPGISDIDQISRVTNVLGNLNEEVWPGCVDLPDYKSISFAKVESPLGIEGCLPNHSGDVISLLKKLICYDPASRATTMEMLNDKYLSEEPLPVPVSELYVPPTMSGPDEDSPRKWNDYREMDSDSDFDGFGPMNVKPTSSGFTIEFP

SEQ ID NO: 23187 - protein, 479 aa, Arabidopsis thaliana
  peptide (1)..(479): Ceres Seq. ID no. 12561838
MDKQPATSWSIHTRPEIIAKYEIFERVGSGAYADVYRARRLSDGLIVALKEIFDYQSAFREIDALTILNGSPNVVVMHEYFWREEENAVLVLEFLRSDLAAVIRDGKRKKKVEGGDGFSVGEIKRWMIQILTGVDACHRNLIVHRDLKPGNMLISDDGVLKLADFGQARILMEHDIVASDENQQAYKLEDKDGETSEPPEVIPDYENSPRQGSDGQEREAMSKDEYFRQVEELKAKQVVRDDTDKDSNVHDGDISCLATCTVSEMDDDLGRNSFSYDADEAVDDTQGLMTSCVGTRWFRPPELLYGSTMYGLEVDLWSLGCVFAELLSLEPLFPGISDIDQISRVTNVLGNLNEEVWPGCVDLPDYKSISFAKVESPLGIEGCLPNHSGDVISLLKKLICYDPASRATTMEMLNDKYLSEEPLPVPVSELYVPPTMSGPDEDSPRKWNDYREMDSDSDFDGFGPMNVKPTSSGFTIEFP

SEQ ID NO: 23188 - protein, 403 aa, Arabidopsis thaliana
  peptide (1)..(403): Ceres Seq. ID no. 12561839
MHEYFWREEENAVLVLEFLRSDLAAVIRDGKRKKKVEGGDGFSVGEIKRWMIQILTGVDACHRNLIVHRDLKPGNMLISDDGVLKLADFGQARILMEHDIVASDENQQAYKLEDKDGETSEPPEVIPDYENSPRQGSDGQEREAMSKDEYFRQVEELKAKQVVRDDTDKDSNVHDGDISCLATCTVSEMDDDLGRNSFSYDADEAVDDTQGLMTSCVGTRWFRPPELLYGSTMYGLEVDLWSLGCVFAELLSLEPLFPGISDIDQISRVTNVLGNLNEEVWPGCVDLPDYKSISFAKVESPLGIEGCLPNHSGDVISLLKKLICYDPASRATTMEMLNDKYLSEEPLPVPVSELYVPPTMSGPDEDSPRKWNDYREMDSDSDFDGFGPMNVKPTSSGFTIEFP

SEQ ID NO: 23189 - DNA, 1171 bp, Arabidopsis thaliana
  misc_feature (1)..(1171): Ceres Seq. ID no. 12370490
  misc_feature (1)..(1171): Ortholog of  Ceres SEQ ID NO 14314939 as cited in SEQ ID NO 58010
atgggtgccgctcgacgtgttaatcttcttcctcctgaagatctctctctgaaagacattctcaaattttctcgggaaaacacctttttctgattcgtttttctccagatcattccttctttcttatatccgatttcttcgggaggaggcgaagagacggtcaacaattttatccaatgtcgcgccgtcttttcgcctgtttcggcctcaagaaatcttcaactaaacctatctctggtggtaacaattccgccgccgtagccgcagaaattcccgccggagatggtcccgttctcgtccagctattctcgtctcagggatgtaaaacatcgcccgcggcggagatgttgatgtcccggctaggtcgaggtgatttcgacgctcagatccgtggcgaagatggtggatctggatctccgacgatggttttggtgtttcatgtggattattgggattacaaggggtggaaagatccgtatggatcgagccaatggacggtgaggcagaaggcgtatatagaggcgttgaatctggatacgatgtttactccgcagcttgtgatccaaggtcgttctcaattgatcggaaacgaagaggagacgctgctcaaatctatctccgaagcgcctaggtttccttctccagccttccgggcgactttccagagaccaacctcagagacactgcaagtatcactcaccggagctttgagaatgaaagtagacggagacggaatggacataatggtggcaatatacgaaaccgggcttgtgaacgactgtgcaagaggagagaacgaaggaagaatgttgtcgaatgattacgttgtaagaaagatggaaaagatgtgcactgtgaaagatgtagcaccgaagaagccagtctcggggactgctcattttacgctctgggatggattcaacagcagcaaatgtggagtcgccgtctttcttcagaactcttctcttcagatttttggtacacagagttttaaattacctgatgagatttgagttaatttccctaatatctgaaaaataaagaaaagaaaaccgatctttgtatcgtccatattttgcttgtgataatcattcgggttccactctgcttttgtacagttataaatgtgtgactacttataacttaatagggtttaaggtttcttctaatt

SEQ ID NO: 23190 - protein, 278 aa, Arabidopsis thaliana
  peptide (1)..(278): Ceres Seq. ID no. 12370491
MSRRLFACFGLKKSSTKPISGGNNSAAVAAEIPAGDGPVLVQLFSSQGCKTSPAAEMLMSRLGRGDFDAQIRGEDGGSGSPTMVLVFHVDYWDYKGWKDPYGSSQWTVRQKAYIEALNLDTMFTPQLVIQGRSQLIGNEEETLLKSISEAPRFPSPAFRATFQRPTSETLQVSLTGALRMKVDGDGMDIMVAIYETGLVNDCARGENEGRMLSNDYVVRKMEKMCTVKDVAPKKPVSGTAHFTLWDGFNSSKCGVAVFLQNSSLQIFGTQSFKLPDEI

SEQ ID NO: 23191 - protein, 222 aa, Arabidopsis thaliana
  peptide (1)..(222): Ceres Seq. ID no. 12370492
MLMSRLGRGDFDAQIRGEDGGSGSPTMVLVFHVDYWDYKGWKDPYGSSQWTVRQKAYIEALNLDTMFTPQLVIQGRSQLIGNEEETLLKSISEAPRFPSPAFRATFQRPTSETLQVSLTGALRMKVDGDGMDIMVAIYETGLVNDCARGENEGRMLSNDYVVRKMEKMCTVKDVAPKKPVSGTAHFTLWDGFNSSKCGVAVFLQNSSLQIFGTQSFKLPDEI

SEQ ID NO: 23192 - protein, 220 aa, Arabidopsis thaliana
  peptide (1)..(220): Ceres Seq. ID no. 12370493
MSRLGRGDFDAQIRGEDGGSGSPTMVLVFHVDYWDYKGWKDPYGSSQWTVRQKAYIEALNLDTMFTPQLVIQGRSQLIGNEEETLLKSISEAPRFPSPAFRATFQRPTSETLQVSLTGALRMKVDGDGMDIMVAIYETGLVNDCARGENEGRMLSNDYVVRKMEKMCTVKDVAPKKPVSGTAHFTLWDGFNSSKCGVAVFLQNSSLQIFGTQSFKLPDEI

SEQ ID NO: 23193 - DNA, 1449 bp, Arabidopsis thaliana
  misc_feature (1)..(1449): Ceres Seq. ID no. 13488525
  misc_feature (1)..(1449): Ortholog of  Ceres SEQ ID NO 13582619 as cited in SEQ ID NO 56520
  misc_feature (1)..(1449): Ortholog of  Ceres SEQ ID NO 13660872 as cited in SEQ ID NO 60830
  misc_feature (1)..(1449): Ortholog of  Ceres SEQ ID NO 12616221 as cited in SEQ ID NO 63291
tgatctacacacaccgatctccctctccctctccctctccctctttatctttctcttcctcctttgctaataaacttttctttgaaccttacacgccttgttgatattactctcttaaatatatattttcgtacattaacacagacatatataaagctaaagatttcttcacgtaatgggtttgaaagatattgggtccaaattgccaccggggtttcgatttcatccaagtgatgaagagttggtttgtcattatctttgcaacaagattagggccaaatctgatcatggtgatgttgatgatgatgatgatgatgttgatgaagctttgaagggttctactgatcttgtggagattgacttgcatatctgtgagccatgggagcttcctgatgtggcaaagttaaacgcaaaggaatggtacttcttcagtttccgtgatcgaaagtatgctactggatatcgcacgaacagagcgacagtaagcggatactggaaagcaacaggaaaagatcgaacggtgatggatccacgtacaaggcaattggtagggatgagaaaaacactagtgttctacagaaacagagcaccaaatgggatcaaaactacttggatcatgcacgagttccgtcttgagtgtcctaacatcccacctaaggaagactgggtcttgtgcagagtgttcaacaaaggcagagactcatcgctacaagacaataattattataacaatgataatcagacgcaaaggcttgaagttaatgacgctccggatcttaattacaacaatcagttgccacctttgctatcatcccctcctcataatcatcaacatgagaagatgaaaatccaagtttgtgatcagtgggagcagctaatgaagcagccttcaaggaccaccggccacccctatcatcaccattgtcatcatcaaaccatagcatgtggttgggagcagatgatgatcggttcgctgtcatcaccttcgagtcatggccctgatcacgagtccttgctaaatttgctttacgtcgacaataacaacagtgtcaacatcagtggtgatcatcatcagaattatgagaagattttgttgtcatcactagacatgacgagtttggatcacgacaagacatgtatgggatcatcatcggatggtggtatggtctctgatcttcacatggaatgtggtggattgagttttgagaccgaaaatatcctcgctttccaatgaacataattcaaggggttcgccaatttgttgattcgtgaattatacaaacattttatctatagatttatcacattatcaaacatgtaagttgtgtggcatttgggtatagggtttgtgtgattctaggtttttaggacgatgtatgttgttatatttagcgtgtttttaggatttattctcattttaaaattatatgaaaacccattactatgaat

SEQ ID NO: 23194 - protein, 352 aa, Arabidopsis thaliana
  peptide (1)..(352): Ceres Seq. ID no. 13488526
MGLKDIGSKLPPGFRFHPSDEELVCHYLCNKIRAKSDHGDVDDDDDDVDEALKGSTDLVEIDLHICEPWELPDVAKLNAKEWYFFSFRDRKYATGYRTNRATVSGYWKATGKDRTVMDPRTRQLVGMRKTLVFYRNRAPNGIKTTWIMHEFRLECPNIPPKEDWVLCRVFNKGRDSSLQDNNYYNNDNQTQRLEVNDAPDLNYNNQLPPLLSSPPHNHQHEKMKIQVCDQWEQLMKQPSRTTGHPYHHHCHHQTIACGWEQMMIGSLSSPSSHGPDHESLLNLLYVDNNNSVNISGDHHQNYEKILLSSLDMTSLDHDKTCMGSSSDGGMVSDLHMECGGLSFETENILAFQ

SEQ ID NO: 23195 - protein, 236 aa, Arabidopsis thaliana
  peptide (1)..(236): Ceres Seq. ID no. 13488527
MDPRTRQLVGMRKTLVFYRNRAPNGIKTTWIMHEFRLECPNIPPKEDWVLCRVFNKGRDSSLQDNNYYNNDNQTQRLEVNDAPDLNYNNQLPPLLSSPPHNHQHEKMKIQVCDQWEQLMKQPSRTTGHPYHHHCHHQTIACGWEQMMIGSLSSPSSHGPDHESLLNLLYVDNNNSVNISGDHHQNYEKILLSSLDMTSLDHDKTCMGSSSDGGMVSDLHMECGGLSFETENILAFQ

SEQ ID NO: 23196 - protein, 226 aa, Arabidopsis thaliana
  peptide (1)..(226): Ceres Seq. ID no. 13488528
MRKTLVFYRNRAPNGIKTTWIMHEFRLECPNIPPKEDWVLCRVFNKGRDSSLQDNNYYNNDNQTQRLEVNDAPDLNYNNQLPPLLSSPPHNHQHEKMKIQVCDQWEQLMKQPSRTTGHPYHHHCHHQTIACGWEQMMIGSLSSPSSHGPDHESLLNLLYVDNNNSVNISGDHHQNYEKILLSSLDMTSLDHDKTCMGSSSDGGMVSDLHMECGGLSFETENILAFQ

SEQ ID NO: 23197 - DNA, 1856 bp, Arabidopsis thaliana
  misc_feature (1)..(1856): Ceres Seq. ID no. 12327273
  misc_feature (1)..(1856): Ortholog of  Ceres SEQ ID NO 13600220 as cited in SEQ ID NO 0
aacaaattcctacaccaatatctttagctagagagaaaaaaagagtgaggaaactagagagagagaccacccaataatggtgaggttcgagaaggttcatttagtgttagggttagctctggttctaactctggtcggagctccgaccaaagcccaaggacctgtttgcggtgcaggcctgcctgacaaatttagcagattaaacttccctgaaggcttcatttggggaaccgcaacagcagcatttcaggttgaaggagctgttaatgaaggttgcagaggtccaagcatgtgggatactttcactaagaagttcccacatagatgtgaaaatcataacgctgatgttgctgtggatttctatcatcgttacaaggaagatatccagttgatgaaagaccttaacactgatgcttttagactttctattgcgtggcccagaatattcccccatggaaggatgtctaagggaataagcaaagtgggagtccaattctaccacgacctcatcgatgagcttctcaaaaacaatataataccattagttacagtctttcattgggatactccccaagacttggaagatgaatatggtggtttcttaagtggtcgcatcgtgcaagattttaccgaatatgcgaatttcactttccacgaatatggacacaaagtgaaacattggatcacattcaatgagccatgggtgtttagtcgtgccggttacgacaacggaaagaaagctccgggacgttgttcaccgtacatccccggttatggacagcattgtcaagatgggcggtctggatacgaagcttatcaagtcagtcacaacttactcttgtcgcatgcttacgccgttgacgcattcagaaaatgcaaacagtgtgctggaggtaaaataggaattgcacacagtccagcttggttcgaaccacaagaccttgagcatgttggaggttccattgaacgtgtgcttgatttcatcctaggatggcatttggctccaacaacttatggagattatccacaatcgatgaaggatcgtgtcggtcatagattgccaaaattcacagaagctgagaagaagttgctgaagggttctacagattactaggaatgaattactatacttcagtgtttgcaaaagaaattagccctgatcctaagaatccgagttggacgactgattctcttgttgattgggatagcaagagtgtggatggatacaaaattggtagcaagccgtttaatggtaaactggatgtgtattcaaaaggtttgagataccttttgaagtatattaaggataactatggcgacccagaagttatcattgccgagaatggatacggagaagaccttggagagaagcacaatgacgtaaactttgggacacaagatcacaacaggaaatattatatccaaaggcatctcttgagtatgcacgacgccatttgcaaggacaaagtgaacgttacgggatactttgtgtggtcgttgatggacaactttgagtggcaagatgggtacaaggcgaggttcggactttactacatcgatttccagaacaacttgacccgtcaccaaaaagtttcgggcaaatggtattccgaattcctcaaaccacagtttccaacctccaagctgagggaagaactctagatgatcaagaatcctatcgggacaaaataattgagtacaagagtcttgaagatgttgttgaggataatatcagtttgtgtgttctatggatcgttttcatctaccggtccttcctatgttagaaggacttgtgagttgttcaagttttaataatatcaataaatgtcttcttttttaatatatgttgagttaat

SEQ ID NO: 23198 - protein, 345 aa, Arabidopsis thaliana
  peptide (1)..(345): Ceres Seq. ID no. 12327274
MVRFEKVHLVLGLALVLTLVGAPTKAQGPVCGAGLPDKFSRLNFPEGFIWGTATAAFQVEGAVNEGCRGPSMWDTFTKKFPHRCENHNADVAVDFYHRYKEDIQLMKDLNTDAFRLSIAWPRIFPHGRMSKGISKVGVQFYHDLIDELLKNNIIPLVTVFHWDTPQDLEDEYGGFLSGRIVQDFTEYANFTFHEYGHKVKHWITFNEPWVFSRAGYDNGKKAPGRCSPYIPGYGQHCQDGRSGYEAYQVSHNLLLSHAYAVDAFRKCKQCAGGKIGIAHSPAWFEPQDLEHVGGSIERVLDFILGWHLAPTTYGDYPQSMKDRVGHRLPKFTEAEKKLLKGSTDY

SEQ ID NO: 23199 - protein, 274 aa, Arabidopsis thaliana
  peptide (1)..(274): Ceres Seq. ID no. 12327275
MWDTFTKKFPHRCENHNADVAVDFYHRYKEDIQLMKDLNTDAFRLSIAWPRIFPHGRMSKGISKVGVQFYHDLIDELLKNNIIPLVTVFHWDTPQDLEDEYGGFLSGRIVQDFTEYANFTFHEYGHKVKHWITFNEPWVFSRAGYDNGKKAPGRCSPYIPGYGQHCQDGRSGYEAYQVSHNLLLSHAYAVDAFRKCKQCAGGKIGIAHSPAWFEPQDLEHVGGSIERVLDFILGWHLAPTTYGDYPQSMKDRVGHRLPKFTEAEKKLLKGSTDY

SEQ ID NO: 23200 - protein, 240 aa, Arabidopsis thaliana
  peptide (1)..(240): Ceres Seq. ID no. 12327276
MKDLNTDAFRLSIAWPRIFPHGRMSKGISKVGVQFYHDLIDELLKNNIIPLVTVFHWDTPQDLEDEYGGFLSGRIVQDFTEYANFTFHEYGHKVKHWITFNEPWVFSRAGYDNGKKAPGRCSPYIPGYGQHCQDGRSGYEAYQVSHNLLLSHAYAVDAFRKCKQCAGGKIGIAHSPAWFEPQDLEHVGGSIERVLDFILGWHLAPTTYGDYPQSMKDRVGHRLPKFTEAEKKLLKGSTDY

SEQ ID NO: 23201 - DNA, 797 bp, Arabidopsis thaliana
  misc_feature (1)..(797): Ceres Seq. ID no. 12372104
  misc_feature (1)..(797): Ortholog of  Ceres SEQ ID NO 12610954 as cited in SEQ ID NO 55930
  misc_feature (1)..(797): Ortholog of  Ceres SEQ ID NO 12625335 as cited in SEQ ID NO 63326
  misc_feature (1)..(797): Ortholog of  Ceres SEQ ID NO 12566590 as cited in SEQ ID NO 0
atccttttatctcattctggaaacttcttaccataacagaaaataaacaaatctcattccggaaaacgctcataaattgtccgaaagccctaaaaatctgagtctcgcattaagtccaaacactttcatttgtctcctttcgtcaactccacagagatctcctcatggctccaattgctgtcggcgatgtcgtaccagacggaactatctccttcttcgatgagaatgatcaacttcagaccgcctccgttcactctctcgccgccgaaaaaaagtcattctctttggtgttcctggtgctttcactcccacttgcagcatgaagcatgttcctgggttcattgagaaagcagaggagctgaagtcaaagggtgttgatgagatcatttgctttagcgtgaacgatccgtttgtgatgaaagcatgggggaaaacataccaagagaacaaacatgtgaagtttgtagctgatgggtctggagaatacacacaccttctcggacttgagcttgaccttaaagacaagggtcttggtgttaggtcaaggagatttgctctgttacttgatgatctcaaagtgactgtagccaatgtcgaatctggtggcgaattcacagtttccagcgccgatgatatcctcaaggctctctaagaaatgtaccacttgtgttgtctatgtaaaccgctgtatgtgtagtagaggattctatagcttgttctcagacattaaccaaggttgtaataaagcggtttcattgtgacttgtttggcataacaaagtatttggttttgttgtt

SEQ ID NO: 23202 - protein, 110 aa, Arabidopsis thaliana
  peptide (1)..(110): Ceres Seq. ID no. 12372105
MKHVPGFIEKAEELKSKGVDEIICFSVNDPFVMKAWGKTYQENKHVKFVADGSGEYTHLLGLELDLKDKGLGVRSRRFALLLDDLKVTVANVESGGEFTVSSADDILKAL

SEQ ID NO: 23203 - protein, 78 aa, Arabidopsis thaliana
  peptide (1)..(78): Ceres Seq. ID no. 12372106
MKAWGKTYQENKHVKFVADGSGEYTHLLGLELDLKDKGLGVRSRRFALLLDDLKVTVANVESGGEFTVSSADDILKAL

SEQ ID NO: 23204 - protein, 56 aa, Arabidopsis thaliana
  peptide (1)..(56): Ceres Seq. ID no. 12372107
MSNLVANSQFPAPMISSRLSKKCTTCVVYVNRCMCSRGFYSLFSDINQGCNKAVSL

SEQ ID NO: 23205 - DNA, 841 bp, Arabidopsis thaliana
  misc_feature (1)..(841): Ceres Seq. ID no. 12397006
  misc_feature (1)..(841): Ortholog of  Ceres SEQ ID NO 13638595 as cited in SEQ ID NO 52050
  misc_feature (1)..(841): Ortholog of  Ceres SEQ ID NO 12623490 as cited in SEQ ID NO 61136
  misc_feature (1)..(841): Ortholog of  Ceres SEQ ID NO 14301870 as cited in SEQ ID NO 61501
  misc_feature (1)..(841): Ortholog of  Ceres SEQ ID NO 12583993 as cited in SEQ ID NO 68098
agggaaaaagaaaagaaaagtagagtactatcttcctcttaaaatgttgcgtactatcttcctcttatctcttctctttgctctatccaatgcctctgttcaagatttctgtgtcgcaaacctgaaacgcgctgaaacccctgcgggttacccttgcattcgtcccattcatgtcaaagctacagactttgtcttctctggcttaggcactcctggaaacactacaaacatcatcaacgccgctgtcacacccgctttcgcagctcagttcccgggtctgaacggtctaggcctctctacagctagacttgacttagctcctaaaggtgtgatcccaatgcacactcaccctggtgcctctgaggttctctttgtccttactggctccattaccgctgggtttgtctcctcggcaaacgctgtctacgtgcagacactcaaaccaggacaggtcatggttttcccacagggcttgcttcatttccagatcaacgcgggaaaatcctctgcttcagccgttgtcactttcaacagcgctaatccgggtctgcagattctcgacttcgcactctttgctaacagtcttcccactgaactcgtcgtgggtactactttccttgacgccactacagtcaagaagctaaagggtgttcttggaggaactggctaaaaaaagacttaggactactccttgactaaaacaccaaaacctgtttcttcatctttttttctctttaattgattcttgtcttctctgttttgtgtgccttgtaattcttcaaaacctgtcaaaattgttacattgtatgtgagttttttcaattaagatcctgagttggtc

SEQ ID NO: 23206 - protein, 222 aa, Arabidopsis thaliana
  peptide (1)..(222): Ceres Seq. ID no. 12397007
GKKKRKVEYYLPLKMLRTIFLLSLLFALSNASVQDFCVANLKRAETPAGYPCIRPIHVKATDFVFSGLGTPGNTTNIINAAVTPAFAAQFPGLNGLGLSTARLDLAPKGVIPMHTHPGASEVLFVLTGSITAGFVSSANAVYVQTLKPGQVMVFPQGLLHFQINAGKSSASAVVTFNSANPGLQILDFALFANSLPTELVVGTTFLDATTVKKLKGVLGGTG

SEQ ID NO: 23207 - protein, 208 aa, Arabidopsis thaliana
  peptide (1)..(208): Ceres Seq. ID no. 12397008
MLRTIFLLSLLFALSNASVQDFCVANLKRAETPAGYPCIRPIHVKATDFVFSGLGTPGNTTNIINAAVTPAFAAQFPGLNGLGLSTARLDLAPKGVIPMHTHPGASEVLFVLTGSITAGFVSSANAVYVQTLKPGQVMVFPQGLLHFQINAGKSSASAVVTFNSANPGLQILDFALFANSLPTELVVGTTFLDATTVKKLKGVLGGTG

SEQ ID NO: 23208 - DNA, 1383 bp, Arabidopsis thaliana
  misc_feature (1)..(1383): Ceres Seq. ID no. 12324642
  misc_feature (1)..(1383): Ortholog of  Ceres SEQ ID NO 14303313 as cited in SEQ ID NO 64389
aaagagttccaaaaaggtggctcctttttgtttctggagatgcgttattgtgacccttctttgaaatttagggttcattttctcagatttcgagttcgttgtgtttgaatctctattgggtttactttcttattcgatttgggggaaatggctgattggtatcagcttgcacagtctataatctttggtttgatcttcgcttaccttctcgctaagctaatctctatcctcctcgcttttaaagacgagaatctctcactcactcgtaaccacacgactcaatcggagtatgagaacttgcgaaaggtcgaaactttaactgggattagcggcgagactgattctcttatagctgagcaaggtagcttgagaggtgatgaagatgaatcagatgatgatgattgggaaggtgtcgaaagtacagaacttgatgaggcatttagtgctgctacggcttttgttgctgctgctgcatcggataggctttcgcagaaagtttctaatgagttgcaacttcagctttatggattgtataaaattgctactgaaggaccttgtactgctcctcaaccatcagctcttaaaatgactgctcgtgccaagtggcaagcatggcagaaattgggtgctatgcctcctgaggaagcgatggagaagtatatcgaccttgttactcagctttacccagcttgggttgaaggtggctcgaaacgaagaaatcggagtggtgaggctgcaggccccatgggaccggtttttagctcattggtgtacgaagaggaatctgacaatgagttgaagattgacgccatacacgcctttgctagagaaggagaagtcgagaatctattgaaatgcatagaaaatggcatacccgtaaatgcaagagatagtgaaggtcgaacaccactgcattgggctatagaccgtggccatcttaacgttgctgaagctctggttgataagaacgcagatgtgaatgctaaagacaatgaaggccaaacctctctacactatgctgttgtgtgcgaaagagaagcactcgccgagtttctggtgaagcagaaagctgatacaaccattaaagacgaagacggaaactcgcctcttgatctctgtgaatcagaatggtcttggatgcgagagaagaaggattccaattagtgttttttaagtctttaaaattgtgtgtcaaagctagatgcttgtgtttttcttacatttcctctgagcctctttgcttcctcttaagcttatgttttaacatacaacaacacaagttacatatgatatagtagctctagtttttattggttactatattgaacccagagagatcatcatcatcaatcatcataactcaataatagttttttttttgtt

SEQ ID NO: 23209 - protein, 338 aa, Arabidopsis thaliana
  peptide (1)..(338): Ceres Seq. ID no. 12324643
MADWYQLAQSIIFGLIFAYLLAKLISILLAFKDENLSLTRNHTTQSEYENLRKVETLTGISGETDSLIAEQGSLRGDEDESDDDDWEGVESTELDEAFSAATAFVAAAASDRLSQKVSNELQLQLYGLYKIATEGPCTAPQPSALKMTARAKWQAWQKLGAMPPEEAMEKYIDLVTQLYPAWVEGGSKRRNRSGEAAGPMGPVFSSLVYEEESDNELKIDAIHAFAREGEVENLLKCIENGIPVNARDSEGRTPLHWAIDRGHLNVAEALVDKNADVNAKDNEGQTSLHYAVVCEREALAEFLVKQKADTTIKDEDGNSPLDLCESEWSWMREKKDSN

SEQ ID NO: 23210 - protein, 192 aa, Arabidopsis thaliana
  peptide (1)..(192): Ceres Seq. ID no. 12324644
MTARAKWQAWQKLGAMPPEEAMEKYIDLVTQLYPAWVEGGSKRRNRSGEAAGPMGPVFSSLVYEEESDNELKIDAIHAFAREGEVENLLKCIENGIPVNARDSEGRTPLHWAIDRGHLNVAEALVDKNADVNAKDNEGQTSLHYAVVCEREALAEFLVKQKADTTIKDEDGNSPLDLCESEWSWMREKKDSN

SEQ ID NO: 23211 - protein, 177 aa, Arabidopsis thaliana
  peptide (1)..(177): Ceres Seq. ID no. 12324645
MPPEEAMEKYIDLVTQLYPAWVEGGSKRRNRSGEAAGPMGPVFSSLVYEEESDNELKIDAIHAFAREGEVENLLKCIENGIPVNARDSEGRTPLHWAIDRGHLNVAEALVDKNADVNAKDNEGQTSLHYAVVCEREALAEFLVKQKADTTIKDEDGNSPLDLCESEWSWMREKKDSN

SEQ ID NO: 23212 - DNA, 1411 bp, Arabidopsis thaliana
  misc_feature (1)..(1411): Ceres Seq. ID no. 12324653
  misc_feature (1)..(1411): Ortholog of  Ceres SEQ ID NO 14301830 as cited in SEQ ID NO 62310
  misc_feature (1)..(1411): Ortholog of  Ceres SEQ ID NO 15179524 as cited in SEQ ID NO 0
aaaaactcaccgacgcgatccgatctcatctctctcatttcgaaaccatggttgagccggcgaatactgttggtcttccggtgaacccgactccgttgctgaaagatgagctcgatatcgtgattccgactatcagaaacctcgatttcctcgagatgtggaggccttttcttcagccttaccatctgatcatcgtccaggacggagatccatcgaagaagatccatgtccctgaaggttacgactacgagctctacaacaggaacgacattaaccgaatcctcggacctaaggcttcttgtatctcgtttaaggattctgcttgtcgatgctttgggtacatggtgtctaagaagaagtatatcttcaccattgatgacgattgcttcgttgccaaggatccatcaggcaaagcagtgaacgctcttgagcaacacatcaagaaccttctctgcccatcgtctccctttttcttcaacaccttgtatgatccttaccgtgaaggtgctgatttcgtccgtggataccctttcagtctccgtgaaggtgtttccactgctgtttcccatggtctttggctcaacatccctgactacgatgccccgacccaactcgtgaagcctaaggagaggaacaccaggtatgtggatgctgtcatgaccatcccaaagggaacacttttcccaatgtgtggtatgaacttggcttttgaccgtgatttgattggcccggctatgtactttggtctcatgggtgatggtcagcctattggtcgttacgacgatatgtgggctggttggtgcatcaaggtgatctgtgaccacttgagcttgggagtgaagaccggtttaccgtatatctaccacagcaaagcgagcaacccttttgttaacctgaagaaggaatacaagggaatcttctggcaggaggagatcattccgttcttccagaacgcaaagctatcgaaagaagcagtaactgttcagcaatgctacattgagctctcaaagatggtcaaggagaagttgagctccttagacccgtactttgacaagcttgcagatgccatggttacatggattgaagcttgggatgagcttaacccaccagcagccagtggcaaagcttgagagcagtatgagccaaaaagaaaaagccaccaaagttttggttatttttagctcaaattatcgttacttttaaatttctgattttacgaacctttcttgctttttttacacatttgagtagttttcatcatcagtactttctcattgtccggttatggtttttgcatttggtttaaatatcaccggtttatttataaacagtggtggattagtagtactattttctgagtttttttctttgtttcattaataaaaaggccttttcataggtgtttgcaact

SEQ ID NO: 23213 - protein, 375 aa, Arabidopsis thaliana
  peptide (1)..(375): Ceres Seq. ID no. 12324654
KLTDAIRSHLSHFETMVEPANTVGLPVNPTPLLKDELDIVIPTIRNLDFLEMWRPFLQPYHLIIVQDGDPSKKIHVPEGYDYELYNRNDINRILGPKASCISFKDSACRCFGYMVSKKKYIFTIDDDCFVAKDPSGKAVNALEQHIKNLLCPSSPFFFNTLYDPYREGADFVRGYPFSLREGVSTAVSHGLWLNIPDYDAPTQLVKPKERNTRYVDAVMTIPKGTLFPMCGMNLAFDRDLIGPAMYFGLMGDGQPIGRYDDMWAGWCIKVICDHLSLGVKTGLPYIYHSKASNPFVNLKKEYKGIFWQEEIIPFFQNAKLSKEAVTVQQCYIELSKMVKEKLSSLDPYFDKLADAMVTWIEAWDELNPPAASGKA

SEQ ID NO: 23214 - protein, 360 aa, Arabidopsis thaliana
  peptide (1)..(360): Ceres Seq. ID no. 12324655
MVEPANTVGLPVNPTPLLKDELDIVIPTIRNLDFLEMWRPFLQPYHLIIVQDGDPSKKIHVPEGYDYELYNRNDINRILGPKASCISFKDSACRCFGYMVSKKKYIFTIDDDCFVAKDPSGKAVNALEQHIKNLLCPSSPFFFNTLYDPYREGADFVRGYPFSLREGVSTAVSHGLWLNIPDYDAPTQLVKPKERNTRYVDAVMTIPKGTLFPMCGMNLAFDRDLIGPAMYFGLMGDGQPIGRYDDMWAGWCIKVICDHLSLGVKTGLPYIYHSKASNPFVNLKKEYKGIFWQEEIIPFFQNAKLSKEAVTVQQCYIELSKMVKEKLSSLDPYFDKLADAMVTWIEAWDELNPPAASGKA

SEQ ID NO: 23215 - protein, 324 aa, Arabidopsis thaliana
  peptide (1)..(324): Ceres Seq. ID no. 12324656
MWRPFLQPYHLIIVQDGDPSKKIHVPEGYDYELYNRNDINRILGPKASCISFKDSACRCFGYMVSKKKYIFTIDDDCFVAKDPSGKAVNALEQHIKNLLCPSSPFFFNTLYDPYREGADFVRGYPFSLREGVSTAVSHGLWLNIPDYDAPTQLVKPKERNTRYVDAVMTIPKGTLFPMCGMNLAFDRDLIGPAMYFGLMGDGQPIGRYDDMWAGWCIKVICDHLSLGVKTGLPYIYHSKASNPFVNLKKEYKGIFWQEEIIPFFQNAKLSKEAVTVQQCYIELSKMVKEKLSSLDPYFDKLADAMVTWIEAWDELNPPAASGKA

SEQ ID NO: 23216 - DNA, 1212 bp, Arabidopsis thaliana
  misc_feature (1)..(1212): Ceres Seq. ID no. 12322483
  misc_feature (1)..(1212): Ortholog of  Ceres SEQ ID NO 13597019 as cited in SEQ ID NO 64303
  misc_feature (1)..(1212): Ortholog of  Ceres SEQ ID NO 13654191 as cited in SEQ ID NO 68235
aaggaataaacttcgtgaagagaaatgactctagaagctttatcatcaaacggtcttttaaactttttgctctctgaaactctttcaccaactccattcaagtctctcgtcgatctcgagccattgccggaaaatgatgtcatcatatcgaagaacacaatttcggagatatctcatcaagaaccgccaccacagcgacaaccaccagctacgaatcaagggaagaagcggcggaggaggaagcctagggtttgcaaaaacgaggaagaagctgagaatcaacgaatgactcacattgccgtcgaaagaaatcgaagaagacaaatgaatcaacatctctctgtcttgcgatctctcatgcctcaaccttttgctcacaagggtgatcaagcttcaatagttggtggagccatagatttcatcaaagaacttgaacacaaattactatctcttgaagctcaaaaacatcataatgctaaattaaaccagtcggttacttcttcaacaagtcaagactcaaatggtgaacaagagaatcctcatcaaccatcttcactatctctatcgcagttctttcttcattcatacgatccgagccaagagaataggaacggctcaacaagctcggtgaaaacccctatggaagatcttgaagtgactctaatcgaaactcatgctaacatcagaatcttgtcgagaagaagaggtttccggtggagcacgttggccaccaccaaaccgccgcagctttcgaagctggtggcttctctacaatcgctgtccctctccattcttcaccttagtgtcacaacattggacaattatgctatttactccatcagcgctaaggtggaagagagttgccagctaagttcagtagatgacattgcaggagcagttcaccacatgctaagtatcattgaagaggagcctttttgttgctcatcaatgtcagaattaccacttgacttctctttgaatcactcaaatgtcactcattctctctgagaaatctcttttttgttattgttgttccttcttttaattttatcacatagcacatctttagtttttttttttcagaatgaagaaacacataagctttcttttaaaaatcctaggttctttttctgactttggaaggctaaatggngaaatttataatggcacataacatattaggtggtttactcttaatttttatgcattttc

SEQ ID NO: 23217 - protein, 327 aa, Arabidopsis thaliana
  peptide (1)..(327): Ceres Seq. ID no. 12322484
MTLEALSSNGLLNFLLSETLSPTPFKSLVDLEPLPENDVIISKNTISEISHQEPPPQRQPPATNQGKKRRRRKPRVCKNEEEAENQRMTHIAVERNRRRQMNQHLSVLRSLMPQPFAHKGDQASIVGGAIDFIKELEHKLLSLEAQKHHNAKLNQSVTSSTSQDSNGEQENPHQPSSLSLSQFFLHSYDPSQENRNGSTSSVKTPMEDLEVTLIETHANIRILSRRRGFRWSTLATTKPPQLSKLVASLQSLSLSILHLSVTTLDNYAIYSISAKVEESCQLSSVDDIAGAVHHMLSIIEEEPFCCSSMSELPLDFSLNHSNVTHSL

SEQ ID NO: 23218 - protein, 240 aa, Arabidopsis thaliana
  peptide (1)..(240): Ceres Seq. ID no. 12322485
MTHIAVERNRRRQMNQHLSVLRSLMPQPFAHKGDQASIVGGAIDFIKELEHKLLSLEAQKHHNAKLNQSVTSSTSQDSNGEQENPHQPSSLSLSQFFLHSYDPSQENRNGSTSSVKTPMEDLEVTLIETHANIRILSRRRGFRWSTLATTKPPQLSKLVASLQSLSLSILHLSVTTLDNYAIYSISAKVEESCQLSSVDDIAGAVHHMLSIIEEEPFCCSSMSELPLDFSLNHSNVTHSL

SEQ ID NO: 23219 - protein, 227 aa, Arabidopsis thaliana
  peptide (1)..(227): Ceres Seq. ID no. 12322486
MNQHLSVLRSLMPQPFAHKGDQASIVGGAIDFIKELEHKLLSLEAQKHHNAKLNQSVTSSTSQDSNGEQENPHQPSSLSLSQFFLHSYDPSQENRNGSTSSVKTPMEDLEVTLIETHANIRILSRRRGFRWSTLATTKPPQLSKLVASLQSLSLSILHLSVTTLDNYAIYSISAKVEESCQLSSVDDIAGAVHHMLSIIEEEPFCCSSMSELPLDFSLNHSNVTHSL

SEQ ID NO: 23220 - DNA, 837 bp, Arabidopsis thaliana
  misc_feature (1)..(837): Ceres Seq. ID no. 12322574
  misc_feature (1)..(837): Ortholog of  Ceres SEQ ID NO 14312416 as cited in SEQ ID NO 55270
  misc_feature (1)..(837): Ortholog of  Ceres SEQ ID NO 15225352 as cited in SEQ ID NO 67888
ctatagattattcaaaaagatgttctgaagacagattttcctcactttgatctcgtggttgcaaatattccttacaacatatcttcccctcttgtggccaagcttgtatacggctccaatacttttcgaagcgccacactcttgcttcaaaaggaattctcccgccggctcctggcaaatccaggagattccgatttcaatagattggcggtgaacgttaagttagtagctgatgttaaatttgtgatggatgtaagtaaaagagagtttgttccacctcctaaagttgattcatctgtaattaggattacaccaaaggagataataccggatgttaatgttcaagaatggttggcattcactcgcacgtgtttcgggaagaagaataagacgcttggttccatgtttaggcagaagaaaaaggtcatggaattgcagagtttgtctgcagggaggcatggctcgaatgttgaggttatgaatcagacaggtggtgattctgacagtgatgttgaagaagataggaaagatgatttgttgtgtttggatacagatgcaagtatgttcaaggaaagggtaattgaaattctgagaacaaatgggttcgaagagaagagaccatccaagctttcacatcgtgagttgttacatttgctttctttgtttaaccaagctggaatttttttccatgatattacatcattacaaatggatctacacgaataatgataagttttctttaatgttttatgtttttggtcgaaccctttgaatttatttttcttacaaattggaagattaaagtaaaagctacttaatgtagtaatttcggtaggg

SEQ ID NO: 23221 - protein, 159 aa, Arabidopsis thaliana
  peptide (1)..(159): Ceres Seq. ID no. 12322575
MDVSKREFVPPPKVDSSVIRITPKEIIPDVNVQEWLAFTRTCFGKKNKTLGSMFRQKKKVMELQSLSAGRHGSNVEVMNQTGGDSDSDVEEDRKDDLLCLDTDASMFKERVIEILRTNGFEEKRPSKLSHRELLHLLSLFNQAGIFFHDITSLQMDLHE

SEQ ID NO: 23222 - protein, 107 aa, Arabidopsis thaliana
  peptide (1)..(107): Ceres Seq. ID no. 12322576
MFRQKKKVMELQSLSAGRHGSNVEVMNQTGGDSDSDVEEDRKDDLLCLDTDASMFKERVIEILRTNGFEEKRPSKLSHRELLHLLSLFNQAGIFFHDITSLQMDLHE

SEQ ID NO: 23223 - protein, 99 aa, Arabidopsis thaliana
  peptide (1)..(99): Ceres Seq. ID no. 12322577
MELQSLSAGRHGSNVEVMNQTGGDSDSDVEEDRKDDLLCLDTDASMFKERVIEILRTNGFEEKRPSKLSHRELLHLLSLFNQAGIFFHDITSLQMDLHE

SEQ ID NO: 23224 - DNA, 828 bp, Arabidopsis thaliana
  misc_feature (1)..(828): Ceres Seq. ID no. 12322571
  misc_feature (1)..(828): Ortholog of  Ceres SEQ ID NO 12633896 as cited in SEQ ID NO 0
actcaacacaaactctttacgaatacttttaagtatggcttcttcttctgcaaccaagtttgttgatctgttcccatgtcttttcttagcttgcctcttcgtgttcacatactcaaacaacctcgtcgtggctgaaaattccaacaaagtgaagatcaatctttactatgaatcactttgtccctattgtcaaaatttcattgttgatgatctaggtaaaatctttgactccgatctcctcaaaatcaccgatctcaagctcgttccattcggtaacgctcatatctccaataatctgactattacttgccagcatggtgaagaggaatgcaaacttaacgctctcgaagcttgcggtataagaactttgcccgatccgaaattgcagtacaagttcatacgctgcgttgaaaaagatacgaatgaatgggaatcatgtgttaaaaaatctggacgtgagaaagccatcaatgattgttacaatggtgatctctctcaaaagctgatacttgggtatgcaaaactgacctcgagtttgaagccaaaacatgaatacgtaccatgggtcacactcaacggcaaaccactctatgacaattaccataatttggtcgcacaagtctgcaaagcgtacaaaggaaaggatctcccaaaactatgcagttcctcggtcttgtatgagaggaaagtgtcaaagtttcaagtctcctatgtagatgaagctatcaattaataagttaattaacaaacttcttattgaaactaagatggatctaatctttatgctataagtggaatgataaataaagacgttttatctgaactttt

SEQ ID NO: 23225 - protein, 243 aa, Arabidopsis thaliana
  peptide (1)..(243): Ceres Seq. ID no. 12322572
LNTNSLRILLSMASSSATKFVDLFPCLFLACLFVFTYSNNLVVAENSNKVKINLYYESLCPYCQNFIVDDLGKIFDSDLLKITDLKLVPFGNAHISNNLTITCQHGEEECKLNALEACGIRTLPDPKLQYKFIRCVEKDTNEWESCVKKSGREKAINDCYNGDLSQKLILGYAKLTSSLKPKHEYVPWVTLNGKPLYDNYHNLVAQVCKAYKGKDLPKLCSSSVLYERKVSKFQVSYVDEAIN

SEQ ID NO: 23226 - protein, 232 aa, Arabidopsis thaliana
  peptide (1)..(232): Ceres Seq. ID no. 12322573
MASSSATKFVDLFPCLFLACLFVFTYSNNLVVAENSNKVKINLYYESLCPYCQNFIVDDLGKIFDSDLLKITDLKLVPFGNAHISNNLTITCQHGEEECKLNALEACGIRTLPDPKLQYKFIRCVEKDTNEWESCVKKSGREKAINDCYNGDLSQKLILGYAKLTSSLKPKHEYVPWVTLNGKPLYDNYHNLVAQVCKAYKGKDLPKLCSSSVLYERKVSKFQVSYVDEAIN

SEQ ID NO: 23227 - DNA, 1843 bp, Arabidopsis thaliana
  misc_feature (1)..(1843): Ceres Seq. ID no. 13489341
  misc_feature (1)..(1843): Ortholog of  Ceres SEQ ID NO 14313897 as cited in SEQ ID NO 59695
  misc_feature (1)..(1843): Ortholog of  Ceres SEQ ID NO 13660049 as cited in SEQ ID NO 67010
cggcacgaggaaaggggaaaaaaaaaaaaaatcagattcctgatattttctgcttcgctttgctttggcctttgggtttgctttgctttttatctccacaataataatattcgttaacctctcctcgttctcgtcgctgtttcttcccgatcttcgctatagttctggattcaaaatctctcttccccaatagatgtttgtctcttaatttttcatttttctgcaaaatcaaaatttttaagagctatggaggaagagaatgttactagttcaccttcaacaccggtacataggcttaggcatcgaagacgttctaatgaggttgttacggatggggataaagtgaatgcaagtcctttgttggttaatgatcggaataagtacaaatctttcatggtccggacctactctacgttatggatgattggtggttttgttttggttgtctacatgggtcatctttatatcacagctatggttgttgttattcaaatatttatggctaaagagttgtttaatctgctgaggaaagctcctgaggataaatgtctcccctatattaaacagctcaattggcacttctttttcactgccatgcttttcgtttatggacggatccttagtcaacggttagccaataccatgactgcagatcagttcttctatcggctagtcagcggcttaatcaaataccatatggcaatctgttacttgttgtatattataggtttcatgtggttcattctcacattaaagaagaagatgtacaagtaccagtttggccagtatgcttggacccacatgatcttgatagtcgtgtttactcaatcgtcgttcactgttgccaacatatttgaagggatcttctggtttcttctcccagcatctttaattataatcaacgacatcttcgcctacattttcggtttcttctttggaagaacgcctttaataaagctgtctccaaagaaaacatgggagggattcatcggagcctctgtgacaactatcatctctgcatttgttctggcaaatattttgggtcgtttcccttggttgacatgcccacgacaggatttgtccactggctggctacagtgtgacgctgatccattgttcaaacctgaaccttttgctttacctgcatggattccagaatggtttccttggaaggaaatgacgatcctccctgttcagtggcatgctttatgcctcggtttgttcgcttcaatcatagcaccttttggaggatttttcgctagcggtttcaaaagagcattcaaaattaaggactttggtgatagtattccaggacatggtggaatcacagatagaatggactgccagatggttatggcagtatttgcctacatatatcttcaatcatttattgtctcccaaagcgtttcggttgacaaaatcctagaccagatattgacgaaccttacctttgaggaacaacaagcgctcttcgtgaagttaggacaaatgctgaaggacaagctctcataggctccattgccaaaagtttcttttattcagattccgattctccaagaacaggttcctctggaatatccttttatctttgtccttactagagacaataaatttaaaattggattaagatttgttgtttcctgccattgtaaatcctctcgaaatttgtcgaaaaaattagaagtttttttaaaagtcttctcattggatacaataggtttgaagaaagttgtatctactactatctacttatttagtagctttggtggtttttagctgtattttgtatattggttaaaatgaaacaacatttggtttgtttgtctcatgattcgatttgttc

SEQ ID NO: 23228 - protein, 421 aa, Arabidopsis thaliana
  peptide (1)..(421): Ceres Seq. ID no. 13489342
MEEENVTSSPSTPVHRLRHRRRSNEVVTDGDKVNASPLLVNDRNKYKSFMVRTYSTLWMIGGFVLVVYMGHLYITAMVVVIQIFMAKELFNLLRKAPEDKCLPYIKQLNWHFFFTAMLFVYGRILSQRLANTMTADQFFYRLVSGLIKYHMAICYLLYIIGFMWFILTLKKKMYKYQFGQYAWTHMILIVVFTQSSFTVANIFEGIFWFLLPASLIIINDIFAYIFGFFFGRTPLIKLSPKKTWEGFIGASVTTIISAFVLANILGRFPWLTCPRQDLSTGWLQCDADPLFKPEPFALPAWIPEWFPWKEMTILPVQWHALCLGLFASIIAPFGGFFASGFKRAFKIKDFGDSIPGHGGITDRMDCQMVMAVFAYIYLQSFIVSQSVSVDKILDQILTNLTFEEQQALFVKLGQMLKDKLS

SEQ ID NO: 23229 - protein, 372 aa, Arabidopsis thaliana
  peptide (1)..(372): Ceres Seq. ID no. 13489343
MVRTYSTLWMIGGFVLVVYMGHLYITAMVVVIQIFMAKELFNLLRKAPEDKCLPYIKQLNWHFFFTAMLFVYGRILSQRLANTMTADQFFYRLVSGLIKYHMAICYLLYIIGFMWFILTLKKKMYKYQFGQYAWTHMILIVVFTQSSFTVANIFEGIFWFLLPASLIIINDIFAYIFGFFFGRTPLIKLSPKKTWEGFIGASVTTIISAFVLANILGRFPWLTCPRQDLSTGWLQCDADPLFKPEPFALPAWIPEWFPWKEMTILPVQWHALCLGLFASIIAPFGGFFASGFKRAFKIKDFGDSIPGHGGITDRMDCQMVMAVFAYIYLQSFIVSQSVSVDKILDQILTNLTFEEQQALFVKLGQMLKDKLS

SEQ ID NO: 23230 - protein, 363 aa, Arabidopsis thaliana
  peptide (1)..(363): Ceres Seq. ID no. 13489344
MIGGFVLVVYMGHLYITAMVVVIQIFMAKELFNLLRKAPEDKCLPYIKQLNWHFFFTAMLFVYGRILSQRLANTMTADQFFYRLVSGLIKYHMAICYLLYIIGFMWFILTLKKKMYKYQFGQYAWTHMILIVVFTQSSFTVANIFEGIFWFLLPASLIIINDIFAYIFGFFFGRTPLIKLSPKKTWEGFIGASVTTIISAFVLANILGRFPWLTCPRQDLSTGWLQCDADPLFKPEPFALPAWIPEWFPWKEMTILPVQWHALCLGLFASIIAPFGGFFASGFKRAFKIKDFGDSIPGHGGITDRMDCQMVMAVFAYIYLQSFIVSQSVSVDKILDQILTNLTFEEQQALFVKLGQMLKDKLS

SEQ ID NO: 23231 - DNA, 940 bp, Arabidopsis thaliana
  misc_feature (1)..(940): Ceres Seq. ID no. 12332895
  misc_feature (1)..(940): Ortholog of  Ceres SEQ ID NO 15176678 as cited in SEQ ID NO 59743
  misc_feature (1)..(940): Ortholog of  Ceres SEQ ID NO 15173314 as cited in SEQ ID NO 60298
acgcagttcacggtaagacatagaaacaaagtagagagatttcacggcgacggtattggaatggctaaacgggagttaagtggaggagatagcagcagcgaagatgaagatcccaagtggagagctgcaatcaattcgatagccaccaccaccgtttacggcgcctccgccacgaaacccgcagctactcagtcacataacaatggagattttcgtctcaaacctaaaaaactaacacatgggcaaatcaaggtgaagaatcttttgaatgaaatggtggagaagactttagactttgttgaagatcctgtcaatattcctgaggataaacccgagaatgactgtggagttcggttatttaagcggtgtgctactggcattgtatttgatcatgtagatgagattagaggacctaaaaagaagcctaatttacgccctgacaaaggagttgaaggaagctctaaagagtttaagaaacgagtaaaatcaattgctgttgatggttcggatattttaactgctgctatggaagcggcgaagaaagcctcggctagattagatgcgaaagaagtggcagcgaaagataaagctaagaaagaggaagagagaatcgcagagttgaagaaagtaagaggagaaaaatggttaccttctattgaaagggcaatgaaaaaggaaatgaagcgtatcaaacatacggcatggaagtctgcaatgtcgtgagctttcttcttttgaacttattatcaattttggagtctcattaattgaagaagaaacacagaatcattcactcttggctacaaaacttttactgaaagaagattatgaaattgttgtgtagactagagagattatttgttcttgatgtagtgagagtgaagttcttcagagatgttgtcatcattgtcgtctttgatccaaacgaaatcttctaatc

SEQ ID NO: 23232 - protein, 240 aa, Arabidopsis thaliana
  peptide (1)..(240): Ceres Seq. ID no. 12332896
TQFTVRHRNKVERFHGDGIGMAKRELSGGDSSSEDEDPKWRAAINSIATTTVYGASATKPAATQSHNNGDFRLKPKKLTHGQIKVKNLLNEMVEKTLDFVEDPVNIPEDKPENDCGVRLFKRCATGIVFDHVDEIRGPKKKPNLRPDKGVEGSSKEFKKRVKSIAVDGSDILTAAMEAAKKASARLDAKEVAAKDKAKKEEERIAELKKVRGEKWLPSIERAMKKEMKRIKHTAWKSAMS

SEQ ID NO: 23233 - protein, 220 aa, Arabidopsis thaliana
  peptide (1)..(220): Ceres Seq. ID no. 12332897
MAKRELSGGDSSSEDEDPKWRAAINSIATTTVYGASATKPAATQSHNNGDFRLKPKKLTHGQIKVKNLLNEMVEKTLDFVEDPVNIPEDKPENDCGVRLFKRCATGIVFDHVDEIRGPKKKPNLRPDKGVEGSSKEFKKRVKSIAVDGSDILTAAMEAAKKASARLDAKEVAAKDKAKKEEERIAELKKVRGEKWLPSIERAMKKEMKRIKHTAWKSAMS

SEQ ID NO: 23234 - protein, 149 aa, Arabidopsis thaliana
  peptide (1)..(149): Ceres Seq. ID no. 12332898
MVEKTLDFVEDPVNIPEDKPENDCGVRLFKRCATGIVFDHVDEIRGPKKKPNLRPDKGVEGSSKEFKKRVKSIAVDGSDILTAAMEAAKKASARLDAKEVAAKDKAKKEEERIAELKKVRGEKWLPSIERAMKKEMKRIKHTAWKSAMS

SEQ ID NO: 23235 - DNA, 1166 bp, Arabidopsis thaliana
  misc_feature (1)..(1166): Ceres Seq. ID no. 12394741
  misc_feature (1)..(1166): Ortholog of  Ceres SEQ ID NO 13655124 as cited in SEQ ID NO 62896
  misc_feature (1)..(1166): Ortholog of  Ceres SEQ ID NO 14301898 as cited in SEQ ID NO 69243
acacccaaacacgcgacgcgagcgaagaagacgatgacgaacaaggagaaagctcgagagagaagggagaaaaaaatgcaggagatctctctccttcgaactattccttactctgaccaccataggtggtggtcttgtgaaaatgtagcagtagtgactggttcaaaccgcgggattggattcgagattgcaagacagcttgcggttcacggattgacggttgttcttacagctagaaacgtgaatgctggtcttgaagcagttaaatctttgaggcaccaagaagaaggtctcaaggtttattttcatcaacttgatgtcacagactcttcctcgattagagagtttggttgctggcttaagcaaacatttggaggtttagatattctcgtgaataatgcaggtgttaactacaatctcggctcagataatacggttgaatttgctgaaacagttatatctactaactaccaaggaaccaaaaacatgacaaaagctatgatacccttgatgagaccatctcctcatggcgctcgtgtagtcaatgttagttctcggctaggtagagtaaatggaagacgtaatagactggcaaatgtagagttgagagatcagctaagcagtccagatttgctgaccgaggaacttatagacagaactgtctctaaattcatcaaccaagtaaaagacggaacttgggaatcaggcgggtggcctcagacattcactgactactccatgtctaagcttgcagtcaatgcttacacgagactaatggcaaaagaacttgagagacgaggagaggaagagaagatttatgttaacagcttttgccctggttgggtgaagactgcgatgactggctacgccggaaatatgccacctgaagatgcagctgatactggagtttggcttagcctggtcctttccgaagagtcagtaaccggaaaattcttcgcagagagacgtgagatcaacttctgagggttgttgaatgtttgtaaacgttggaatagattgtgtcgtcttcgtttagtgccatagttttagtcaaaggtttacaaaatcaattgtaattggtaagtgaatggttgtagtcatgatacgcgtcagatttgccacaaaactaggagtttataatttaaatataattaatttttaattgc

SEQ ID NO: 23236 - protein, 327 aa, Arabidopsis thaliana
  peptide (1)..(327): Ceres Seq. ID no. 12394742
TPKHATRAKKTMTNKEKARERREKKMQEISLLRTIPYSDHHRWWSCENVAVVTGSNRGIGFEIARQLAVHGLTVVLTARNVNAGLEAVKSLRHQEEGLKVYFHQLDVTDSSSIREFGCWLKQTFGGLDILVNNAGVNYNLGSDNTVEFAETVISTNYQGTKNMTKAMIPLMRPSPHGARVVNVSSRLGRVNGRRNRLANVELRDQLSSPDLLTEELIDRTVSKFINQVKDGTWESGGWPQTFTDYSMSKLAVNAYTRLMAKELERRGEEEKIYVNSFCPGWVKTAMTGYAGNMPPEDAADTGVWLSLVLSEESVTGKFFAERREINF

SEQ ID NO: 23237 - protein, 316 aa, Arabidopsis thaliana
  peptide (1)..(316): Ceres Seq. ID no. 12394743
MTNKEKARERREKKMQEISLLRTIPYSDHHRWWSCENVAVVTGSNRGIGFEIARQLAVHGLTVVLTARNVNAGLEAVKSLRHQEEGLKVYFHQLDVTDSSSIREFGCWLKQTFGGLDILVNNAGVNYNLGSDNTVEFAETVISTNYQGTKNMTKAMIPLMRPSPHGARVVNVSSRLGRVNGRRNRLANVELRDQLSSPDLLTEELIDRTVSKFINQVKDGTWESGGWPQTFTDYSMSKLAVNAYTRLMAKELERRGEEEKIYVNSFCPGWVKTAMTGYAGNMPPEDAADTGVWLSLVLSEESVTGKFFAERREINF

SEQ ID NO: 23238 - protein, 302 aa, Arabidopsis thaliana
  peptide (1)..(302): Ceres Seq. ID no. 12394744
MQEISLLRTIPYSDHHRWWSCENVAVVTGSNRGIGFEIARQLAVHGLTVVLTARNVNAGLEAVKSLRHQEEGLKVYFHQLDVTDSSSIREFGCWLKQTFGGLDILVNNAGVNYNLGSDNTVEFAETVISTNYQGTKNMTKAMIPLMRPSPHGARVVNVSSRLGRVNGRRNRLANVELRDQLSSPDLLTEELIDRTVSKFINQVKDGTWESGGWPQTFTDYSMSKLAVNAYTRLMAKELERRGEEEKIYVNSFCPGWVKTAMTGYAGNMPPEDAADTGVWLSLVLSEESVTGKFFAERREINF

SEQ ID NO: 23239 - DNA, 1051 bp, Arabidopsis thaliana
  misc_feature (1)..(1051): Ceres Seq. ID no. 13486926
  misc_feature (1)..(1051): Ortholog of  Ceres SEQ ID NO 15172842 as cited in SEQ ID NO 58023
aactttaattcgccggctctcttgccgtgttttcgattttgacaaacgaaaaaaaaatcttcaatgagataacaataatatcagcagcggaacaaggattgagaaaaggaacctttcccttttaataagccgatatagatccttggaggagaatttgtagcagaccgatctctgtctgttgtctctgtttctacgaatctctgtgtttgtcggaaatcgtaaattatgggtttgtgggatgctcttctcaattggcttcgcagcctcttcttcaagcaagaaatggagctttcattgataggacttcaaaatgcaggaaagacatcacttgttaacgttgttgcaaccggtggatacagtgaagacatgatccctacggttggtttcaacatgaggaaagtgacaaaaggaagtgtcacgatcaagctttgggatctcggtggtcaacctaggttccgcagcatgtgggaacgttactgccgttctgtttccgcgattgtgtatgtagttgatgctgctgatcctgataacctcagtgtctcgaagagtgaactccatgatttgttgagcaagacgtcgcttaatggtatccctctcctagtccttgggaacaaaatcgacaagcctggagctttgtccaaagaagccctaaccgatgaaatgggtctcaagtcactgacagatagagaagtctgttgcttcatgatatcttgcaagaactctaccaacatcgatcaagtcattgattggcttgtaaagcactccaaatcatcgaattaaactttaccccaaaaggagagaagtcaactctctgcagttgtcgatctttcttgtgtttttggtcatttgatgatgatgatggtgattgtggaagaagacacagcttttttcttttatcctgtgaaaaacaagatttgtctatgttctctgtctgattctttatctgtctttcttctgcgtatgtggctgtgttctctgtatattagatttgattggtgttccctcttcttaaagccatgatgagatcacttccttcggggtcagcttttcc

SEQ ID NO: 23240 - protein, 184 aa, Arabidopsis thaliana
  peptide (1)..(184): Ceres Seq. ID no. 13486927
MGLWDALLNWLRSLFFKQEMELSLIGLQNAGKTSLVNVVATGGYSEDMIPTVGFNMRKVTKGSVTIKLWDLGGQPRFRSMWERYCRSVSAIVYVVDAADPDNLSVSKSELHDLLSKTSLNGIPLLVLGNKIDKPGALSKEALTDEMGLKSLTDREVCCFMISCKNSTNIDQVIDWLVKHSKSSN

SEQ ID NO: 23241 - protein, 165 aa, Arabidopsis thaliana
  peptide (1)..(165): Ceres Seq. ID no. 13486928
MELSLIGLQNAGKTSLVNVVATGGYSEDMIPTVGFNMRKVTKGSVTIKLWDLGGQPRFRSMWERYCRSVSAIVYVVDAADPDNLSVSKSELHDLLSKTSLNGIPLLVLGNKIDKPGALSKEALTDEMGLKSLTDREVCCFMISCKNSTNIDQVIDWLVKHSKSSN

SEQ ID NO: 23242 - protein, 137 aa, Arabidopsis thaliana
  peptide (1)..(137): Ceres Seq. ID no. 13486929
MIPTVGFNMRKVTKGSVTIKLWDLGGQPRFRSMWERYCRSVSAIVYVVDAADPDNLSVSKSELHDLLSKTSLNGIPLLVLGNKIDKPGALSKEALTDEMGLKSLTDREVCCFMISCKNSTNIDQVIDWLVKHSKSSN

SEQ ID NO: 23243 - DNA, 1132 bp, Arabidopsis thaliana
  misc_feature (1)..(1132): Ceres Seq. ID no. 12396005
  misc_feature (1)..(1132): Ortholog of  Ceres SEQ ID NO 14311671 as cited in SEQ ID NO 51251
  misc_feature (1)..(1132): Ortholog of  Ceres SEQ ID NO 13594298 as cited in SEQ ID NO 57803
  misc_feature (1)..(1132): Ortholog of  Ceres SEQ ID NO 13503476 as cited in SEQ ID NO 61978
  misc_feature (1)..(1132): Ortholog of  Ceres SEQ ID NO 12578438 as cited in SEQ ID NO 62201
  misc_feature (1)..(1132): Ortholog of  Ceres SEQ ID NO 12617675 as cited in SEQ ID NO 64656
acattcctcaccaaaccctctccaaaacacacccacacgtacgcacacacacaaagacaatgtctcctttcaaaatattcttcttcacgactcttctcgtggcggcgttttcagtgtcggctgctgatttcaacactgacgtcaacgtagcttggggaaatggccgtgggaagatactcaacaacggccagcttcttactctctccttagacaaatcctctggttccggttttcaatccaaaacagagtatttgtttggaaagattgatatgcagattaagcttgttcctggtaactctgcaggaacagtcacaactttttacgtgagtttatatattttctttaggagttttaagtgattttggatttggtttttatattgagacttcatcttgacatttttgtgtatttgcagctaaaatccgaaggatccacttgggatgagattgattttgagttcttgggtaatatgagtggagatccttatactttacacactaatgtttacactcaaggtaaaggtgacaaagagcaacaattccatctctggttcgacccaaccgccaatttccacacttactcaatcctctggaaccctcaaagaatcatattgaccgtcgatgacacacccattagagagtttaaaaactatgagtctctcggtgtcttgtttccaaagaacaagccgatgaggatgtacgcgagtttatggaacgcagacgattgggcaacaagaggcggtcttgttaaaactgattggtctaaagctccattcatggcttcttacagaaacattaagattgactcgaaaccaaactccaattggtacactcaagaaatggattcaacaagccaagctagactcaaatgggttcagaagaattacatgatctacaattattgtactgaccataggaggtttccacagggagctcctaaggaatgcacaacaagctcatagaatctcaaattatattctatttatttatctacacttcctctctttcttttatgtgaaaattgtgaatgctctgtttctagcttgtctattatgtccgagaatttctttttctgtttttgattcttttcgttgtatatctttgtccaataaaggaaatgatgtgtctttacc

SEQ ID NO: 23244 - protein, 163 aa, Arabidopsis thaliana
  peptide (1)..(163): Ceres Seq. ID no. 12396006
MSGDPYTLHTNVYTQGKGDKEQQFHLWFDPTANFHTYSILWNPQRIILTVDDTPIREFKNYESLGVLFPKNKPMRMYASLWNADDWATRGGLVKTDWSKAPFMASYRNIKIDSKPNSNWYTQEMDSTSQARLKWVQKNYMIYNYCTDHRRFPQGAPKECTTSS

SEQ ID NO: 23245 - protein, 118 aa, Arabidopsis thaliana
  peptide (1)..(118): Ceres Seq. ID no. 12396007
IPHQTLSKTHPHVRTHTKTMSPFKIFFFTTLLVAAFSVSAADFNTDVNVAWGNGRGKILNNGQLLTLSLDKSSGSGFQSKTEYLFGKIDMQIKLVPGNSAGTVTTFYVSLYIFFRSFK

SEQ ID NO: 23246 - protein, 99 aa, Arabidopsis thaliana
  peptide (1)..(99): Ceres Seq. ID no. 12396008
MSPFKIFFFTTLLVAAFSVSAADFNTDVNVAWGNGRGKILNNGQLLTLSLDKSSGSGFQSKTEYLFGKIDMQIKLVPGNSAGTVTTFYVSLYIFFRSFK

SEQ ID NO: 23247 - DNA, 1521 bp, Arabidopsis thaliana
  misc_feature (1)..(1521): Ceres Seq. ID no. 13487159
  misc_feature (1)..(1521): Ortholog of  Ceres SEQ ID NO 15168517 as cited in SEQ ID NO 57071
gggagcctaaacaatggggagacgaaaccagagatgcttgctctcttcctctcttcttcttcgtatccaactctctctttcctctccagatcagtaactctaaacttagccagaacaacaacactctcagctctcacaatgtcgatgaacctaaagactcatgccttcgcaggcaatcccttgaagtcgaaaactccgaaatctaccgatccattctcacccacctccgctttcgaatctctgaaaaccctaattccagtaatccctaatcactcaacaccttcccctgattttaaagtccttccctttagcaagggtcgtccactggtgttctcaagcggtggagatgctaatacgacgccgatttggcatctgggttgggtcagcttggctgattgtaaggttttgttagcaagttgtggggttgatctgaatgaggactcactcgtgtatttaggacccaagttggaagaagatttggtgtattgggctgttgatttggcagaggatggtttcgtttctgaattgggaggtaggaagttgtgttttgttgagcttcgaaccctaatggtagctgctgattgggcggatcaacgtgctatggatgagttggctattgccggcaatgccagggcgttacttgaatggcacaacgtgtcacaattttgtggatcatgtggaagtaaaacttttccaaaggaagcaggaaggagaaaacaatgctcagacgaaacatgcagaaagagggtctatccccgtgttgatccggtggttataatgttagttattgatcgagaaaatgatcgcgcacttttaagcaggcaatctagatatgtaccgagaatgtggagttgtttagctggatttattgagccaggggaaagcttagaagaggctgtgaggcgggaaacatgggaagagacaggcattgaagtaggagatgttgtataccacagctctcagccttggcctgtgggaccaagtagcatgccatgccaattgatgctcggtttctttgctttcgccaagacgctcgacataaacgtagacaaagaagagttagaagatgctcaatggcacagtagagaagaggtgaagaaagcattggcggttgcagaatacaggaaggctcaaagaacagcagctgcaaaggtagagcagatctgtaaaggtgtggagagaagccagagtctatcaactgatttcaatcttgaaagcggtgagcttgctcctatgtttatcccggggccatttgccatcgcgcaccacctgatctcagcatgggtaaatcaggctcctgacgatgttcactcaaaacaacaagcgggtgtctctctctcaagtttgtagctagaaagatgaacttagatgcttagaaaccaaacgtttgctatggcttctatgcttattttgaattgctgagtcctaagtgtgtggacttcgctcgaagttatttctttgcaacgacgatttagatcaataaaaattaatcaaagattgacctcaataaatttgagtttt

SEQ ID NO: 23248 - protein, 449 aa, Arabidopsis thaliana
  peptide (1)..(449): Ceres Seq. ID no. 13487160
GSLNNGETKPEMLALFLSSSSYPTLSFLSRSVTLNLARTTTLSALTMSMNLKTHAFAGNPLKSKTPKSTDPFSPTSAFESLKTLIPVIPNHSTPSPDFKVLPFSKGRPLVFSSGGDANTTPIWHLGWVSLADCKVLLASCGVDLNEDSLVYLGPKLEEDLVYWAVDLAEDGFVSELGGRKLCFVELRTLMVAADWADQRAMDELAIAGNARALLEWHNVSQFCGSCGSKTFPKEAGRRKQCSDETCRKRVYPRVDPVVIMLVIDRENDRALLSRQSRYVPRMWSCLAGFIEPGESLEEAVRRETWEETGIEVGDVVYHSSQPWPVGPSSMPCQLMLGFFAFAKTLDINVDKEELEDAQWHSREEVKKALAVAEYRKAQRTAAAKVEQICKGVERSQSLSTDFNLESGELAPMFIPGPFAIAHHLISAWVNQAPDDVHSKQQAGVSLSSL

SEQ ID NO: 23249 - protein, 438 aa, Arabidopsis thaliana
  peptide (1)..(438): Ceres Seq. ID no. 13487161
MLALFLSSSSYPTLSFLSRSVTLNLARTTTLSALTMSMNLKTHAFAGNPLKSKTPKSTDPFSPTSAFESLKTLIPVIPNHSTPSPDFKVLPFSKGRPLVFSSGGDANTTPIWHLGWVSLADCKVLLASCGVDLNEDSLVYLGPKLEEDLVYWAVDLAEDGFVSELGGRKLCFVELRTLMVAADWADQRAMDELAIAGNARALLEWHNVSQFCGSCGSKTFPKEAGRRKQCSDETCRKRVYPRVDPVVIMLVIDRENDRALLSRQSRYVPRMWSCLAGFIEPGESLEEAVRRETWEETGIEVGDVVYHSSQPWPVGPSSMPCQLMLGFFAFAKTLDINVDKEELEDAQWHSREEVKKALAVAEYRKAQRTAAAKVEQICKGVERSQSLSTDFNLESGELAPMFIPGPFAIAHHLISAWVNQAPDDVHSKQQAGVSLSSL

SEQ ID NO: 23250 - protein, 403 aa, Arabidopsis thaliana
  peptide (1)..(403): Ceres Seq. ID no. 13487162
MSMNLKTHAFAGNPLKSKTPKSTDPFSPTSAFESLKTLIPVIPNHSTPSPDFKVLPFSKGRPLVFSSGGDANTTPIWHLGWVSLADCKVLLASCGVDLNEDSLVYLGPKLEEDLVYWAVDLAEDGFVSELGGRKLCFVELRTLMVAADWADQRAMDELAIAGNARALLEWHNVSQFCGSCGSKTFPKEAGRRKQCSDETCRKRVYPRVDPVVIMLVIDRENDRALLSRQSRYVPRMWSCLAGFIEPGESLEEAVRRETWEETGIEVGDVVYHSSQPWPVGPSSMPCQLMLGFFAFAKTLDINVDKEELEDAQWHSREEVKKALAVAEYRKAQRTAAAKVEQICKGVERSQSLSTDFNLESGELAPMFIPGPFAIAHHLISAWVNQAPDDVHSKQQAGVSLSSL

SEQ ID NO: 23251 - DNA, 752 bp, Arabidopsis thaliana
  misc_feature (1)..(752): Ceres Seq. ID no. 12330281
  misc_feature (1)..(752): Ortholog of  Ceres SEQ ID NO 13661756 as cited in SEQ ID NO 61398
gattgttgacttgattgacataaaaatggcgacttcgatgattcagagattgttcaaacaaggcacaaagatcgtcggcgttggactcaattacgcttctcacgccaaagaacttggcaatgccctcccaaaggacccgattgtgttcttaaagccaacttcgtcgtacctggaaaacggtggaacaatagagatcccacatccactggattcacttcaccatgaggtggaacttgctgtagtaattggacagaaagcaagagatgtcccagaacggttagccatgaattacattggaggatatgcgcttgctcttgatatgactgctagggaactccaagtttctgccatggcatctggtctcccatgtacgcttgctaaaggacaggataccttcacccccatcagctccgttctaccaaaggcaatggtgctggatcccaataacctggaactctggctaaaggtagatgatgagacaagacagaaaggttggacaaaggatatgatcttcaaggtcccatatctcatcagctacataagttctgtaatgacccttttcaaaggagatgtcatattgacaggtacaccagaaggtataggacctgtaaagataggtcagaagataaccgccggaatcaccggtctttctgaagttcagttcgacgtcggtaggcggctaaagccattgttgagatagtattttgtgaatcatttgttgtataaacttcattcataagagcatttttact

SEQ ID NO: 23252 - protein, 232 aa, Arabidopsis thaliana
  peptide (1)..(232): Ceres Seq. ID no. 12330282
IVDLIDIKMATSMIQRLFKQGTKIVGVGLNYASHAKELGNALPKDPIVFLKPTSSYLENGGTIEIPHPLDSLHHEVELAVVIGQKARDVPERLAMNYIGGYALALDMTARELQVSAMASGLPCTLAKGQDTFTPISSVLPKAMVLDPNNLELWLKVDDETRQKGWTKDMIFKVPYLISYISSVMTLFKGDVILTGTPEGIGPVKIGQKITAGITGLSEVQFDVGRRLKPLLR

SEQ ID NO: 23253 - protein, 224 aa, Arabidopsis thaliana
  peptide (1)..(224): Ceres Seq. ID no. 12330283
MATSMIQRLFKQGTKIVGVGLNYASHAKELGNALPKDPIVFLKPTSSYLENGGTIEIPHPLDSLHHEVELAVVIGQKARDVPERLAMNYIGGYALALDMTARELQVSAMASGLPCTLAKGQDTFTPISSVLPKAMVLDPNNLELWLKVDDETRQKGWTKDMIFKVPYLISYISSVMTLFKGDVILTGTPEGIGPVKIGQKITAGITGLSEVQFDVGRRLKPLLR

SEQ ID NO: 23254 - protein, 220 aa, Arabidopsis thaliana
  peptide (1)..(220): Ceres Seq. ID no. 12330284
MIQRLFKQGTKIVGVGLNYASHAKELGNALPKDPIVFLKPTSSYLENGGTIEIPHPLDSLHHEVELAVVIGQKARDVPERLAMNYIGGYALALDMTARELQVSAMASGLPCTLAKGQDTFTPISSVLPKAMVLDPNNLELWLKVDDETRQKGWTKDMIFKVPYLISYISSVMTLFKGDVILTGTPEGIGPVKIGQKITAGITGLSEVQFDVGRRLKPLLR

SEQ ID NO: 23255 - DNA, 1755 bp, Arabidopsis thaliana
  misc_feature (1)..(1755): Ceres Seq. ID no. 12394469
  misc_feature (1)..(1755): Ortholog of  Ceres SEQ ID NO 14309934 as cited in SEQ ID NO 20583
  misc_feature (1)..(1755): Ortholog of  Ceres SEQ ID NO 13654989 as cited in SEQ ID NO 63117
  misc_feature (1)..(1755): Ortholog of  Ceres SEQ ID NO 13584744 as cited in SEQ ID NO 69137
aacttggactctgtttatatcaacctgatcttggaaatttatttgtaaagtttaggaaaaaaatgggaggtgacttgaaaagccagctatctagagagagtcatgtgtttggacttaaggtgtgggaagtaattggtatagctgttgcattgctcatcatagctatcctctctgttctttcgtgttgtcttacttcgaaaaagaaatcaagaagatcgaaaaccggtcttccggttatccaaactcctccggttgtctccaaagagatcagagaagtgagagttgagcatgtctcagctagtaactttgctcctggtgaaggcattcttctaacaattcaggacaaaaatagcaaagactcagaaaaagtcatggttcatttggatatgaggaagaagagaagtagtagtggccggtcaggctcatttcaccatttagagatcatagataaacattctgagtctgctgaagaagtttctgcttcctcatcattgtataacattgcaactccatcaccattatctgggttgcctgagtctcatcttggttggggacactggtttacattgagagatcttgaaacagcaacaaacagattctctaaagagaatgtgattggtgaaggcggttacggtgttgtctacagaggagagttaatgaatggaactcctgttgcagttaaaaagattcttaaccagttgggacaagctgagaaagagtttcgagtcgaggttgatgctatcggtcatgtgcggcacaagaacttggttcggcttcttggttactgcattgaaggcacacacaggatattggtttacgagtatgtgaataatggaaacttagaacaatggcttcatggagcaatgagacaacatggatatctaacttgggaagcaaggatgaaggttctgatcggtacatcaaaagctcttgcatatctgcatgaagcgattgagccaaaagtagtgcatagagacatcaagtcaagcaacattctgatcaacgacgaatttaatgcaaaggttttcagattttggccttgccaagttgcttggcgctgggaaaagccatgtgacaactagagtgatgggaacatttgggtacgttgctcctgaatatgcaaactcagggttgttaaatgaaaagagtgatgtctacagcttcggtgttgttctcttagaagcaatcacaggacgagaccctgtggattatggccgtcctgctcatgaggtgaatctagtggattggttaaagatgatggttgggacaagacgatcagaggaagtagtggatccaaacatagaagtgaagccaccaacaaggtcattgaaacgagctcttttgacggctctaagatgcgttgatccagactcggataagcggccgaaaatgagccaagttgtacgtatgcttgagtctgaagaataccccattccaagagaggaccgaaggcgttctagaacgcgagaaggaagtatggagataaactcagacactgacatgagtactccagtttcaagatcacagagcaagagacaataatttatcaatctgcgtaagctttcaacgcgtttcatgattatgagctattctttgaacttgttcttatgcattttctgttttttttttttttttttttggttttgaattgagatgagtagagaccatagaggattgtttgtacatatgaactggatttgggtttanagctcctacatcaaaataatatattggtgtgtacagtactattgcatc

SEQ ID NO: 23256 - protein, 359 aa, Arabidopsis thaliana
  peptide (1)..(359): Ceres Seq. ID no. 12394470
LGLCLYQPDLGNLFVKFRKKMGGDLKSQLSRESHVFGLKVWEVIGIAVALLIIAILSVLSCCLTSKKKSRRSKTGLPVIQTPPVVSKEIREVRVEHVSASNFAPGEGILLTIQDKNSKDSEKVMVHLDMRKKRSSSGRSGSFHHLEIIDKHSESAEEVSASSSLYNIATPSPLSGLPESHLGWGHWFTLRDLETATNRFSKENVIGEGGYGVVYRGELMNGTPVAVKKILNQLGQAEKEFRVEVDAIGHVRHKNLVRLLGYCIEGTHRILVYEYVNNGNLEQWLHGAMRQHGYLTWEARMKVLIGTSKALAYLHEAIEPKVVHRDIKSSNILINDEFNAKVFRFWPCQVAWRWEKPCDN

SEQ ID NO: 23257 - protein, 339 aa, Arabidopsis thaliana
  peptide (1)..(339): Ceres Seq. ID no. 12394471
MGGDLKSQLSRESHVFGLKVWEVIGIAVALLIIAILSVLSCCLTSKKKSRRSKTGLPVIQTPPVVSKEIREVRVEHVSASNFAPGEGILLTIQDKNSKDSEKVMVHLDMRKKRSSSGRSGSFHHLEIIDKHSESAEEVSASSSLYNIATPSPLSGLPESHLGWGHWFTLRDLETATNRFSKENVIGEGGYGVVYRGELMNGTPVAVKKILNQLGQAEKEFRVEVDAIGHVRHKNLVRLLGYCIEGTHRILVYEYVNNGNLEQWLHGAMRQHGYLTWEARMKVLIGTSKALAYLHEAIEPKVVHRDIKSSNILINDEFNAKVFRFWPCQVAWRWEKPCDN

SEQ ID NO: 23258 - protein, 236 aa, Arabidopsis thaliana
  peptide (1)..(236): Ceres Seq. ID no. 12394472
MVHLDMRKKRSSSGRSGSFHHLEIIDKHSESAEEVSASSSLYNIATPSPLSGLPESHLGWGHWFTLRDLETATNRFSKENVIGEGGYGVVYRGELMNGTPVAVKKILNQLGQAEKEFRVEVDAIGHVRHKNLVRLLGYCIEGTHRILVYEYVNNGNLEQWLHGAMRQHGYLTWEARMKVLIGTSKALAYLHEAIEPKVVHRDIKSSNILINDEFNAKVFRFWPCQVAWRWEKPCDN

SEQ ID NO: 23259 - DNA, 1164 bp, Arabidopsis thaliana
  misc_feature (1)..(1164): Ceres Seq. ID no. 12345055
  misc_feature (1)..(1164): Ortholog of  Ceres SEQ ID NO 13597757 as cited in SEQ ID NO 65472
gcacagccaaaccccccccaattttggcctctcgatttagttttttgaaaccctaagctcgatttcgatcctccggcatactcggtttcgccgccgaatctctgcttgtagcgagtgttactattcaatcggcgagaatgtcgatgtcgaagagttcaaaaatgcttcagttcatcaactacaggatgcgagtgacgatccaagacggaagacagctcgttgggaagttcatggcgtttgaccgtcacatgaacctcgttctcggcgattgcgaggagtttcgtaagcttccaccagctaaagggaagaagatcaacgaagagcgtgaagatcgccgtacgctaggtttagtgttgcttagaggtgaagaagttatcaatgactgtcgaaggaccacctcctcctgaagaatctcgtgctaaagctggctctgcagctgctgttgctggtccaggaattggccgtgccgctgggcgtggagttcctactggtccgttagttcaagctcagcctggtttatctggtcctgttcgtggtgttggtggacctgctccgggaatgatgcagcctcagatctctcgtccaccacagctttcagctcctccgattattcgacctccgggacagatgttgccaccgcctccttttggtggtcaaggtcctcctatgggaagaggtcctccaccgccttatggtatgaggccaccgccacagcagttttctggaccaccaccgcctcagtatgggcaaaggccaatgattcctcctcctggtggtatgatgagaggacctcctcctccacctcatggaatgcaaggacctcctccgcctcgccctggaatgcctcctgctcctggtggttttgctccaccgcgtcctggcatgccaccacataatcagcagcagtgattaggttagcagtgaatgaacaggactcttgtctcggctttttactgtttttgtcgctgttttcttgagattatgaaggctttaagatgtttgattgaacttcctcaggtttacggtatcgtgctatcatgttgcctttcattgactttagccgcaatttctcatctatcttagctttcaaagtttgtagatttgttgacgagtgagttgtctttgccttatcttcttgtgttttcttttaagaacgaatccact

SEQ ID NO: 23260 - protein, 176 aa, Arabidopsis thaliana
  peptide (1)..(176): Ceres Seq. ID no. 12345056
MTVEGPPPPEESRAKAGSAAAVAGPGIGRAAGRGVPTGPLVQAQPGLSGPVRGVGGPAPGMMQPQISRPPQLSAPPIIRPPGQMLPPPPFGGQGPPMGRGPPPPYGMRPPPQQFSGPPPPQYGQRPMIPPPGGMMRGPPPPPHGMQGPPPPRPGMPPAPGGFAPPRPGMPPHNQQQ

SEQ ID NO: 23261 - protein, 116 aa, Arabidopsis thaliana
  peptide (1)..(116): Ceres Seq. ID no. 12345057
MMQPQISRPPQLSAPPIIRPPGQMLPPPPFGGQGPPMGRGPPPPYGMRPPPQQFSGPPPPQYGQRPMIPPPGGMMRGPPPPPHGMQGPPPPRPGMPPAPGGFAPPRPGMPPHNQQQ

SEQ ID NO: 23262 - protein, 115 aa, Arabidopsis thaliana
  peptide (1)..(115): Ceres Seq. ID no. 12345058
MQPQISRPPQLSAPPIIRPPGQMLPPPPFGGQGPPMGRGPPPPYGMRPPPQQFSGPPPPQYGQRPMIPPPGGMMRGPPPPPHGMQGPPPPRPGMPPAPGGFAPPRPGMPPHNQQQ

SEQ ID NO: 23263 - DNA, 1607 bp, Arabidopsis thaliana
  misc_feature (1)..(1607): Ceres Seq. ID no. 13487804
  misc_feature (1)..(1607): Ortholog of  Ceres SEQ ID NO 12465151 as cited in SEQ ID NO 67782
agtttcttacaatttgtaaagagatctgttttagggttttgccttgttcttgtggcgggaataacaaagacatcgccgatatggggaaagacgaagaggaaatgcgaggtgagatcgaggagcgactaatcaatgaagagtacaagatctggaagaagaacactcctttcctctacgatctcgttattactcacgctctcgagtggccttcacttactgttgaatggcttcctgaccgtgaagaaccttccggtaaagactactccgttcagaagatgattctcggtacccatacctccgagagcgagcccaattacttgatgctagcccaagttcagcttcctcttgacgataccgagagtgaagctcgtcagtacgatgatgaccgctctgaatttggtggctttggctgtgcaactggaaaggtacaaattatccagcagataaatcatgatggtgaggttaatcgagctcgctatatgcctcaaaaccctttcataattgctaccaagacagttaatgcggaggtctatgttttcgattacagtaagcatccatctaagcctcctcttgatggggcttgtaatcctgatttaaagcttagaggtcacagctctgagggatatggtctctcttggagtaagttcaagcagggtcatttgcttagtggctctgatgatgctcagatctgcttgtgggatattaacgctactcctaaaaacaaatctctggacgctcagcagatttttaaggctcatgaaggggttgtggaagatgttgcatggcatctgagacatgagtacctgtttggatcagttggagatgaccaataccttctcatatgggatctgcgttctccatctgccagtaaaccagtacagtctgtggttgctcattcgatggaggttaactgcttagccttcaatccatttaatgagtgggttgtggcaacaggatcaactgacaagactgttaaattattcgatctacggaagctaagcaccgctcttcacacatttgatagccacaaagaggaggtttttcaagttggttggaacccaaagaacgagactattttagcttcatgttgccttggtagaagacttatggtttgggaccttagcaggatcgatgaggaacagacagtggaggacgcagaagacggcccacctgagctgctgtttattcacggtggtcacactagcaaaatttcagatttctcgtggaacccttgtgaagattgggttatttccagtgttgctgaggacaacatactccaaatatggcaaatggctgaaaacatctatcatgatgaggatgacgctccaggggaagaaccatcaaaagcttcttagcttgttatttagtatccaaagcgcactgatcttatgggacagtatttatttatacatctctgctattgtttagttcaagtatttagtgttcattgtgtaaaatgaggcatgagaggatggtagcaagtgggaatttttctttataacatgaaggagttgattctaatctcactaagtagtgtcaaccaaagctataactcttagtttatacccagattgggcgacattagaaagaaattacaaatttgaatt

SEQ ID NO: 23264 - protein, 450 aa, Arabidopsis thaliana
  peptide (1)..(450): Ceres Seq. ID no. 13487805
FLTICKEICFRVLPCSCGGNNKDIADMGKDEEEMRGEIEERLINEEYKIWKKNTPFLYDLVITHALEWPSLTVEWLPDREEPSGKDYSVQKMILGTHTSESEPNYLMLAQVQLPLDDTESEARQYDDDRSEFGGFGCATGKVQIIQQINHDGEVNRARYMPQNPFIIATKTVNAEVYVFDYSKHPSKPPLDGACNPDLKLRGHSSEGYGLSWSKFKQGHLLSGSDDAQICLWDINATPKNKSLDAQQIFKAHEGVVEDVAWHLRHEYLFGSVGDDQYLLIWDLRSPSASKPVQSVVAHSMEVNCLAFNPFNEWVVATGSTDKTVKLFDLRKLSTALHTFDSHKEEVFQVGWNPKNETILASCCLGRRLMVWDLSRIDEEQTVEDAEDGPPELLFIHGGHTSKISDFSWNPCEDWVISSVAEDNILQIWQMAENIYHDEDDAPGEEPSKAS

SEQ ID NO: 23265 - protein, 424 aa, Arabidopsis thaliana
  peptide (1)..(424): Ceres Seq. ID no. 13487806
MGKDEEEMRGEIEERLINEEYKIWKKNTPFLYDLVITHALEWPSLTVEWLPDREEPSGKDYSVQKMILGTHTSESEPNYLMLAQVQLPLDDTESEARQYDDDRSEFGGFGCATGKVQIIQQINHDGEVNRARYMPQNPFIIATKTVNAEVYVFDYSKHPSKPPLDGACNPDLKLRGHSSEGYGLSWSKFKQGHLLSGSDDAQICLWDINATPKNKSLDAQQIFKAHEGVVEDVAWHLRHEYLFGSVGDDQYLLIWDLRSPSASKPVQSVVAHSMEVNCLAFNPFNEWVVATGSTDKTVKLFDLRKLSTALHTFDSHKEEVFQVGWNPKNETILASCCLGRRLMVWDLSRIDEEQTVEDAEDGPPELLFIHGGHTSKISDFSWNPCEDWVISSVAEDNILQIWQMAENIYHDEDDAPGEEPSKAS

SEQ ID NO: 23266 - protein, 417 aa, Arabidopsis thaliana
  peptide (1)..(417): Ceres Seq. ID no. 13487807
MRGEIEERLINEEYKIWKKNTPFLYDLVITHALEWPSLTVEWLPDREEPSGKDYSVQKMILGTHTSESEPNYLMLAQVQLPLDDTESEARQYDDDRSEFGGFGCATGKVQIIQQINHDGEVNRARYMPQNPFIIATKTVNAEVYVFDYSKHPSKPPLDGACNPDLKLRGHSSEGYGLSWSKFKQGHLLSGSDDAQICLWDINATPKNKSLDAQQIFKAHEGVVEDVAWHLRHEYLFGSVGDDQYLLIWDLRSPSASKPVQSVVAHSMEVNCLAFNPFNEWVVATGSTDKTVKLFDLRKLSTALHTFDSHKEEVFQVGWNPKNETILASCCLGRRLMVWDLSRIDEEQTVEDAEDGPPELLFIHGGHTSKISDFSWNPCEDWVISSVAEDNILQIWQMAENIYHDEDDAPGEEPSKAS

SEQ ID NO: 23267 - DNA, 1240 bp, Arabidopsis thaliana
  misc_feature (1)..(1240): Ceres Seq. ID no. 13487819
  misc_feature (1)..(1240): Ortholog of  Ceres SEQ ID NO 14303542 as cited in SEQ ID NO 63539
  misc_feature (1)..(1240): Ortholog of  Ceres SEQ ID NO 13597333 as cited in SEQ ID NO 63974
  misc_feature (1)..(1240): Ortholog of  Ceres SEQ ID NO 12407937 as cited in SEQ ID NO 0
agatcgttatcgtttcggggtcacagggactttcactctttctctctctctgcaacaaagaagaaatggaggtagcagcagcgactgcgacgagcttcacaacgcttcgagctcgtacgtcagcgattatcccgtcttctacacgtaatctgagatctaaaccgagattttcttcatcttcatctctcagagcttctctttcgaatggctttctttcgccgtataccggaggaagcatctctagtgacttatgcggcgctaagcttcgtgcggaatcgcttaatccgttaaatttttccagttccaagcctaaacgcggagttgtcactatggttatacctttctcaaagggaagtgcacacgaacaacctcctcctgatttggcatcatatttgttcaagaaccgaattgtatatttgggaatgtctctcgtaccttcagttactgagttgatacttgcggagtttctttaccttcagtatgaagacgagaaaaagcctatttacctttacataaactcgactgggacaaccaagaatggtgaaaagttgggctatgatactgaggcttttgcaatctatgatgtcatggggtatgtcaaaccaccaatctttactctttgcgtcgggaatgcttggggtgaagctgctttgcttctgactgctggtgcaaaaggaaatcgatctgcgttgccctcatcaactattatgataaagcagcccattgctcgatttcaaggccaagcaactgatgttgaaattgcaaggaaagaaatcaagcacataaagacagaaatggtcaagctgtattcaaagcatattggtaaatccccggagcagattgaagctgacatgaaacgcccgaaatattttagtcccactgaggctgttgaatatgggatcattgataaggtggtttacaatgaaaggggcagccaagacagaggagttgtgtctgaccttaaaaaggcacaactcatttgaatgtcagaactgtcttccgaaatcccatgattaacaggttggagatcttaccgctgatcaaatggggaatcagtgaaccattcaccggcacagaactgaggtaaagtctggaaaacatgttaaaaaaggttactagtaatgctgcaattgtagggttatttgaacagaaacaaacccatatgtgtaggcttgtgaatgcctagaaacaggattggtgtatcttcaatatatgtttctaagatgaatcaatttcatat

SEQ ID NO: 23268 - protein, 326 aa, Arabidopsis thaliana
  peptide (1)..(326): Ceres Seq. ID no. 13487820
IVIVSGSQGLSLFLSLCNKEEMEVAAATATSFTTLRARTSAIIPSSTRNLRSKPRFSSSSSLRASLSNGFLSPYTGGSISSDLCGAKLRAESLNPLNFSSSKPKRGVVTMVIPFSKGSAHEQPPPDLASYLFKNRIVYLGMSLVPSVTELILAEFLYLQYEDEKKPIYLYINSTGTTKNGEKLGYDTEAFAIYDVMGYVKPPIFTLCVGNAWGEAALLLTAGAKGNRSALPSSTIMIKQPIARFQGQATDVEIARKEIKHIKTEMVKLYSKHIGKSPEQIEADMKRPKYFSPTEAVEYGIIDKVVYNERGSQDRGVVSDLKKAQLI

SEQ ID NO: 23269 - protein, 305 aa, Arabidopsis thaliana
  peptide (1)..(305): Ceres Seq. ID no. 13487821
MEVAAATATSFTTLRARTSAIIPSSTRNLRSKPRFSSSSSLRASLSNGFLSPYTGGSISSDLCGAKLRAESLNPLNFSSSKPKRGVVTMVIPFSKGSAHEQPPPDLASYLFKNRIVYLGMSLVPSVTELILAEFLYLQYEDEKKPIYLYINSTGTTKNGEKLGYDTEAFAIYDVMGYVKPPIFTLCVGNAWGEAALLLTAGAKGNRSALPSSTIMIKQPIARFQGQATDVEIARKEIKHIKTEMVKLYSKHIGKSPEQIEADMKRPKYFSPTEAVEYGIIDKVVYNERGSQDRGVVSDLKKAQLI

SEQ ID NO: 23270 - protein, 217 aa, Arabidopsis thaliana
  peptide (1)..(217): Ceres Seq. ID no. 13487822
MVIPFSKGSAHEQPPPDLASYLFKNRIVYLGMSLVPSVTELILAEFLYLQYEDEKKPIYLYINSTGTTKNGEKLGYDTEAFAIYDVMGYVKPPIFTLCVGNAWGEAALLLTAGAKGNRSALPSSTIMIKQPIARFQGQATDVEIARKEIKHIKTEMVKLYSKHIGKSPEQIEADMKRPKYFSPTEAVEYGIIDKVVYNERGSQDRGVVSDLKKAQLI

SEQ ID NO: 23271 - DNA, 1346 bp, Arabidopsis thaliana
  misc_feature (1)..(1346): Ceres Seq. ID no. 12325009
  misc_feature (1)..(1346): Ortholog of  Ceres SEQ ID NO 15174863 as cited in SEQ ID NO 51281
  misc_feature (1)..(1346): Ortholog of  Ceres SEQ ID NO 12614972 as cited in SEQ ID NO 61986
  misc_feature (1)..(1346): Ortholog of  Ceres SEQ ID NO 14302317 as cited in SEQ ID NO 63244
  misc_feature (1)..(1346): Ortholog of  Ceres SEQ ID NO 12625706 as cited in SEQ ID NO 64144
  misc_feature (1)..(1346): Ortholog of  Ceres SEQ ID NO 13584933 as cited in SEQ ID NO 65009
  misc_feature (1)..(1346): Ortholog of  Ceres SEQ ID NO 12634984 as cited in SEQ ID NO 0
  misc_feature (1)..(1346): Ortholog of  Ceres SEQ ID NO 13599377 as cited in SEQ ID NO 0
aataattttacattggtttgttcaactgatgcgacccttatcgagccatcatcatcacctacctaaatctttcttcctattataaaacccattttctcatctctcaagaatctcaatcccatcttccacaactctaacaaaccttcccgattcatcctctttgactcccttcactcgatctcatccgcaatggaatcaaagacaacccaaaacggatccgaagtcgtcgaactcacagagttcgagaaaacccagaagaagtatcaagatttcatcgctacacttccaaagagcaaaggctggagaccagatgagatcttaacccaatacggtggacactggtggcaagaatgtctcctcgaaggtctttttcacgctaaagaccatttcgaagcacgaccaactgatttcctcgtctgtagctacccaaaaaccggtacaacttggctcaaagcactaacttacgcaatcgtcaatcgttctcgttacgacgacgccgcaaacccactcctcaaacgaaaccctcacgagtttgtcccttacgttgagatcgacttcgcgttttaccccaccgttgatgttcttcaagacagaaagaacccacttttctctactcatatcccaaacgggttattacccgattcgattgtgaactctggttgtaagatggtgtacatatggagagacccgaaagatactttcatctccatgtggactttcttacacaaggagaagtctcaagaaggtcaattagcgagtcttgaggacagctttgatatgttttgtaaaggtttatctgtgtatggtccttatctggatcatgttttgggttattggaaagcttaccaagagaatccagataggattttgttccttaggtacgagaccatgagggccaatcctttgccttttgtgaagagattggctgagttcatgggttatggattcactgatgaggaagaggagaatggtgttgctgagaaagtggtgaagctttgtagctttgagacgttgaagaatcttgaagctaacaaaggtgataaagaaagagaggatcgtcctgctgtttatgcgaatagcgcgtattttaggaaaggaaaggttggagattgggctaattatttgactcctgagatggctgctcgtattgatggcttagtggaggagaaattcaaagatactggcttgcttcaacatgataactgaatgtgttttattctggtccttctgttatttggtgcggcgaaacagaggatgctctgttttgctttgtttggttcagtattctcattattgtctgtatcatcttatttcaacaagagaaagatatttcgatttatgatccc

SEQ ID NO: 23272 - protein, 338 aa, Arabidopsis thaliana
  peptide (1)..(338): Ceres Seq. ID no. 12325010
MESKTTQNGSEVVELTEFEKTQKKYQDFIATLPKSKGWRPDEILTQYGGHWWQECLLEGLFHAKDHFEARPTDFLVCSYPKTGTTWLKALTYAIVNRSRYDDAANPLLKRNPHEFVPYVEIDFAFYPTVDVLQDRKNPLFSTHIPNGLLPDSIVNSGCKMVYIWRDPKDTFISMWTFLHKEKSQEGQLASLEDSFDMFCKGLSVYGPYLDHVLGYWKAYQENPDRILFLRYETMRANPLPFVKRLAEFMGYGFTDEEEENGVAEKVVKLCSFETLKNLEANKGDKEREDRPAVYANSAYFRKGKVGDWANYLTPEMAARIDGLVEEKFKDTGLLQHDN

SEQ ID NO: 23273 - protein, 179 aa, Arabidopsis thaliana
  peptide (1)..(179): Ceres Seq. ID no. 12325011
MVYIWRDPKDTFISMWTFLHKEKSQEGQLASLEDSFDMFCKGLSVYGPYLDHVLGYWKAYQENPDRILFLRYETMRANPLPFVKRLAEFMGYGFTDEEEENGVAEKVVKLCSFETLKNLEANKGDKEREDRPAVYANSAYFRKGKVGDWANYLTPEMAARIDGLVEEKFKDTGLLQHDN

SEQ ID NO: 23274 - DNA, 1295 bp, Arabidopsis thaliana
  misc_feature (1)..(1295): Ceres Seq. ID no. 12322832
  misc_feature (1)..(1295): Ortholog of  Ceres SEQ ID NO 13658922 as cited in SEQ ID NO 66316
ctattttattggcttctcaaaacgaaataacgaaatcgcctcctcttcttctcctcctcgacctggaaatcaatctttcgccgccgagttcttctctctgcggcggagaatcaattagcaatctccagaattaggtgagggaaaagaggatggctttgatcggaaaatccgagagattctctgctgattttgtgatgggtggtgctgcagccattgttgccaaatctgcagctgctccaatcgaaagggtgaagcttttactgcagaatcaaggggagatgataaagactggacatctcataagaccttacactggtttgggtaattgctttaccagaatctatagagaagaaggtgttttgtccttttggagaggaaaccaagccaatgtcatacgatatttccctacacaggcttccaactttgcatttaaaggttacttcaagaaccttcttggatgttcgaaagagaaagatggttacttgaagtggtttgctggaaatgtagcttcgggaagtgctgctggagcaacaacttccttgtttctgtaccatttggattatgcgcggacccgtttaggcactgatgcaaaggaatgttctgttaatggcaagagacagtttaaagggatgatcgatgtgtatcgtaaaactttgtcaagtgacggtattaaaggtctttaccgtggatttggtgtgtcaatagtgggaatcactctttaccgaggaatgtattttgggatgtacgacaccatcaaacccattgtgttagtcggttccttagagggaaacttcttggctagttttctattgggttggagtattactacctctgcaggcgtcattgcttacccttttgacacacttaggaggagaatgatgcttacatcaggacaacctgttaaataccggaacaccattcatgccttaagagagatattgaagtcggaagggttctatgcgctatatagaggagttactgcgaacatgcttcttggagtagcaggagcaggagtgcttgcgggatatgatcagcttcaccagattgcttataagcattgggttcagtagttttgaaccaaacccgaaacgatgacaatgaaagctgagctcaaaaagagaaggttagtaaacaccaagaagtctcacttgctttccaatgtattgtgttagttaacagaatctcggaatcattaaccgattgaaccagcagaagatagggaaaattgttcatagttcttgtgcagtaacattgttatatcaataatccaagaaaggcctatttgatttttgtgc

SEQ ID NO: 23275 - protein, 306 aa, Arabidopsis thaliana
  peptide (1)..(306): Ceres Seq. ID no. 12322833
MALIGKSERFSADFVMGGAAAIVAKSAAAPIERVKLLLQNQGEMIKTGHLIRPYTGLGNCFTRIYREEGVLSFWRGNQANVIRYFPTQASNFAFKGYFKNLLGCSKEKDGYLKWFAGNVASGSAAGATTSLFLYHLDYARTRLGTDAKECSVNGKRQFKGMIDVYRKTLSSDGIKGLYRGFGVSIVGITLYRGMYFGMYDTIKPIVLVGSLEGNFLASFLLGWSITTSAGVIAYPFDTLRRRMMLTSGQPVKYRNTIHALREILKSEGFYALYRGVTANMLLGVAGAGVLAGYDQLHQIAYKHWVQ

SEQ ID NO: 23276 - protein, 291 aa, Arabidopsis thaliana
  peptide (1)..(291): Ceres Seq. ID no. 12322834
MGGAAAIVAKSAAAPIERVKLLLQNQGEMIKTGHLIRPYTGLGNCFTRIYREEGVLSFWRGNQANVIRYFPTQASNFAFKGYFKNLLGCSKEKDGYLKWFAGNVASGSAAGATTSLFLYHLDYARTRLGTDAKECSVNGKRQFKGMIDVYRKTLSSDGIKGLYRGFGVSIVGITLYRGMYFGMYDTIKPIVLVGSLEGNFLASFLLGWSITTSAGVIAYPFDTLRRRMMLTSGQPVKYRNTIHALREILKSEGFYALYRGVTANMLLGVAGAGVLAGYDQLHQIAYKHWVQ

SEQ ID NO: 23277 - protein, 263 aa, Arabidopsis thaliana
  peptide (1)..(263): Ceres Seq. ID no. 12322835
MIKTGHLIRPYTGLGNCFTRIYREEGVLSFWRGNQANVIRYFPTQASNFAFKGYFKNLLGCSKEKDGYLKWFAGNVASGSAAGATTSLFLYHLDYARTRLGTDAKECSVNGKRQFKGMIDVYRKTLSSDGIKGLYRGFGVSIVGITLYRGMYFGMYDTIKPIVLVGSLEGNFLASFLLGWSITTSAGVIAYPFDTLRRRMMLTSGQPVKYRNTIHALREILKSEGFYALYRGVTANMLLGVAGAGVLAGYDQLHQIAYKHWVQ

SEQ ID NO: 23278 - DNA, 1686 bp, Arabidopsis thaliana
  misc_feature (1)..(1686): Ceres Seq. ID no. 13487095
  misc_feature (1)..(1686): Ortholog of  Ceres SEQ ID NO 13584573 as cited in SEQ ID NO 60711
  misc_feature (1)..(1686): Ortholog of  Ceres SEQ ID NO 15180548 as cited in SEQ ID NO 0
aaaaaaacgaaaaaaaacaaaaaaaaaactttgaatccgtttgttgcttcttcgcaacgttctctctcaaactcgcagagtaacagattcgataatgggaggaggatttagagttttgcatttggtgaggccattcttggcttttcttccagaagtgcaaagtgctgacaggaagattccatttagagagaaagtgatctacactgtcatctccctcttcattttccttgtttgtagtcagcttcctctctatgggatccattctaccaccggtgctgatccgttctattggatgcgtgtcattctcgcatcgaatcgtggaacggtgatggagcttggtattactcctattgtcacatctggattagtgatgcaactcttagcagggtcaaagattattgaggttgacaacaatgttcgtgaggatcgtgctctcttgaatggtgctcagaagcttcttgggattctgattgctattggtgaggctgttgcatatgttctttcgggaatgtatggtcctgttggtcaacttggtgttggaaatgctattctgatcatcctccagcttttctttgctggaatcatcgttatctgtcttgacgagcttcttcagaagggatatggtcttggctctggaatctctcttttcatagcaaccaatatctgtgaaagcattatctggaaagcatttagccccacgacaatcaacactggtcgtggagctgagtttgaaggcgctgtgattgcgttgttccatatgctgataactaagtccaataaggttgctgcgctcagacaagctttttaccggcagaaccttccaaatgttaccaacttgcttgcaacagtgttgatcttcttgattgttatatacttccaaggcttccgtgttgtgttgcccgtgaggtcaaagagtgctcgtggccaacagggttcatacccgatcaagctgttctacacctccaacatgccaatcattctccagtctgctctcgtctcaaacctctacttcatctctcagcttctctacaggaaattcagtggaaatttctttgtgaacctattgggacagtggaaagaatcagagtacagtggacaatctataccagttagtggtcttgcatatttgatcacagctccggcaagttttgccgatatggcagctcatccattccatgctctgttctatatcgtcttcatgctcactgcttgtgccctattctcaaaaacatggattgaagtctccgggtcttctgctagagatgtagctaagcagctaaaggaacaacaaatggtgatgccgggacacagagagtccaacttacaaaaggagctgaaccggtacatcccaacagcggctgcatttggaggagtgtgcatcggtgcgctcactgttttggctgatttcatgggagccattgggtcggggactggaatcttacttgcagtcacaatcatatatcagtattttgaaacctttgagaaggaaaaagccagcgagcttggtttctttggattctgattgtttctagtcatataaaggggtaaattttgctaagactagtgagaaatttgaaagcctaattaagaagtagctttcctcttatgtgttcattcaaaggttcaatagacgattaaaagagcattttggtagacactttttgattaaccaacagatttttctct

SEQ ID NO: 23279 - protein, 475 aa, Arabidopsis thaliana
  peptide (1)..(475): Ceres Seq. ID no. 13487096
MGGGFRVLHLVRPFLAFLPEVQSADRKIPFREKVIYTVISLFIFLVCSQLPLYGIHSTTGADPFYWMRVILASNRGTVMELGITPIVTSGLVMQLLAGSKIIEVDNNVREDRALLNGAQKLLGILIAIGEAVAYVLSGMYGPVGQLGVGNAILIILQLFFAGIIVICLDELLQKGYGLGSGISLFIATNICESIIWKAFSPTTINTGRGAEFEGAVIALFHMLITKSNKVAALRQAFYRQNLPNVTNLLATVLIFLIVIYFQGFRVVLPVRSKSARGQQGSYPIKLFYTSNMPIILQSALVSNLYFISQLLYRKFSGNFFVNLLGQWKESEYSGQSIPVSGLAYLITAPASFADMAAHPFHALFYIVFMLTACALFSKTWIEVSGSSARDVAKQLKEQQMVMPGHRESNLQKELNRYIPTAAAFGGVCIGALTVLADFMGAIGSGTGILLAVTIIYQYFETFEKEKASELGFFGF

SEQ ID NO: 23280 - protein, 409 aa, Arabidopsis thaliana
  peptide (1)..(409): Ceres Seq. ID no. 13487097
MRVILASNRGTVMELGITPIVTSGLVMQLLAGSKIIEVDNNVREDRALLNGAQKLLGILIAIGEAVAYVLSGMYGPVGQLGVGNAILIILQLFFAGIIVICLDELLQKGYGLGSGISLFIATNICESIIWKAFSPTTINTGRGAEFEGAVIALFHMLITKSNKVAALRQAFYRQNLPNVTNLLATVLIFLIVIYFQGFRVVLPVRSKSARGQQGSYPIKLFYTSNMPIILQSALVSNLYFISQLLYRKFSGNFFVNLLGQWKESEYSGQSIPVSGLAYLITAPASFADMAAHPFHALFYIVFMLTACALFSKTWIEVSGSSARDVAKQLKEQQMVMPGHRESNLQKELNRYIPTAAAFGGVCIGALTVLADFMGAIGSGTGILLAVTIIYQYFETFEKEKASELGFFGF

SEQ ID NO: 23281 - protein, 397 aa, Arabidopsis thaliana
  peptide (1)..(397): Ceres Seq. ID no. 13487098
MELGITPIVTSGLVMQLLAGSKIIEVDNNVREDRALLNGAQKLLGILIAIGEAVAYVLSGMYGPVGQLGVGNAILIILQLFFAGIIVICLDELLQKGYGLGSGISLFIATNICESIIWKAFSPTTINTGRGAEFEGAVIALFHMLITKSNKVAALRQAFYRQNLPNVTNLLATVLIFLIVIYFQGFRVVLPVRSKSARGQQGSYPIKLFYTSNMPIILQSALVSNLYFISQLLYRKFSGNFFVNLLGQWKESEYSGQSIPVSGLAYLITAPASFADMAAHPFHALFYIVFMLTACALFSKTWIEVSGSSARDVAKQLKEQQMVMPGHRESNLQKELNRYIPTAAAFGGVCIGALTVLADFMGAIGSGTGILLAVTIIYQYFETFEKEKASELGFFGF

SEQ ID NO: 23282 - DNA, 1015 bp, Arabidopsis thaliana
  misc_feature (1)..(1015): Ceres Seq. ID no. 13490836
  misc_feature (1)..(1015): Ortholog of  Ceres SEQ ID NO 12635162 as cited in SEQ ID NO 0
acagaacaagtagccactctctcatctcaccacccctctttctctctacttgctctctatctctctctgtgtctctccactttctcttcttcttcttcttcttgctctagagatctctctatctccattcttttctctctctgtttctagaaagacaacagtgacattttgtctgaacgcatctatggctgctctggtgctttcacttctccttctatccttggctggacattctagtgcctcatggtgtgtgtgtaagacagggctgagtgatacagtgctacaggcaaccctagactatgcttgtggaaatggagcagattgtaatcctactaaaccaaaacaatcttgcttcaaccctgacaatgttaggtctcattgcaactatgcagtcaatagcttcttccaaaagaagggtcaatctcctggctcttgtaatttcgatggaactgccactcccactaactccgatcccagttatacaggttgtgcctttcctactagtgccagtggctctagcggcagcacaactgtgacacctggcacaaccaatccaaaaggcagcccaacgaccaccacacttcctggtagtggtaccaacagtccttattcagggaacccaaccaatggagtttttgggggaaatagcacaggaggcaccactgggacagggattaacccggattacacgacagacagcagcgcgtttgctctcaagaactcaagcaaattgttcatctgccttctcttgatcgcttcgagtggattctgctctttcctgatgctctaaggatgttaatggtctctggttctgtgggtgcacttagttatcgtttcgaggacattttggtctagtttagtggtaatctctgtctctgtgttatgggtctatgttatgtttttgtttgtaagaagatttcagctcttgcagttactcttaattacctctttgactgttctggtagatttgatgccagtgaaaaaaaatcttaatatataattacattatctcgtc

SEQ ID NO: 23283 - protein, 201 aa, Arabidopsis thaliana
  peptide (1)..(201): Ceres Seq. ID no. 13490837
MAALVLSLLLLSLAGHSSASWCVCKTGLSDTVLQATLDYACGNGADCNPTKPKQSCFNPDNVRSHCNYAVNSFFQKKGQSPGSCNFDGTATPTNSDPSYTGCAFPTSASGSSGSTTVTPGTTNPKGSPTTTTLPGSGTNSPYSGNPTNGVFGGNSTGGTTGTGINPDYTTDSSAFALKNSSKLFICLLLIASSGFCSFLML

SEQ ID NO: 23284 - DNA, 1762 bp, Arabidopsis thaliana
  misc_feature (1)..(1762): Ceres Seq. ID no. 13488250
  misc_feature (1)..(1762): Ortholog of  Ceres SEQ ID NO 13596816 as cited in SEQ ID NO 62287
atctccactcttctttcttcttaccaaattactcaatccatctccctctcttcttctccttctccaaacaacaaaccaaagcttctctcttttcttgcttcagagagacctagaagagttatcaacatgagtcttcttctacatctctttgctctgtctctgctcatctctgtttcaggagcaaagttctccggccggccaggaatcaactatggccagctcggaaacaacctcccgtcaccgtccgactcagtcaacctcatcaagtccctaaacgcgaaacgcgtcaaactctacgacgctaacccaaaaatcctcgccgcgttaaacggcaccgacattaccgtctccgtcatggtcccaaacgagctcctcgtcaacatctccaaatccgcatcactctccgacgactggatccgatccaacatcctcccgttttacccaaccaccaagatccgttacctcctcgtcggcaacgagatcctctctttaccagactctgagctcaaatcttcactcgttcccgcaatgcgcaagatccaacgctccttaaagtctctcggcgttaaaaaagtcaaagtcggtactacactcgccaccgacgttctccaatcttcgtttcctccgtctagcggcgagtttcgggaggatatctccggtttaattatgaaaccgatgctccaattcttaaaccggaccaaatctttcctattcgttgatgtttacccgtatttcgcgtgggcacaagatccgacccatgtggatctcgattacgcgattttcgaatctaccaacgtcaccgtcacggatccggtttcgaatctgacataccacaacctattcgatcagatgattgacgctttcgtcttcgccatgaaacgagtcgggtatccggatattcggatctgggtcgcggaaacgggttggcccaataacggtgactacgaccaaattggagcgaatatttacaacgccgctacttacaatcgcaatgttgtcaagaaactcgccgctgacccgcccgtaggtacgcccgcccgacccggaaaggttctaccggcgtttgtattcgcactttacaacgaaaatcagaaaacgggtccgggtacggagcggcatttcggacttttacatccgaatgggactcaggtttacgggattgatttgtcggggaagacggagtacaaggaatcattgccggcgccggagaataacgacctgtacaaagggaagatttggtgcgtggtggctaaaggagcgaattggactcagctaggtgatgctctatcgtacgcttgctcacaggggaataatacctgtgacccgattcaacgcggaggcccatgtcagaaacctgatttgaccgttttgcacgccagttacgcctttagctcttattgggcccaatttcgtaagatcgggggaacttgctccttcaacggcttagctacacaaaccatcaaagatccaagttacggacgatgtgagtttccgagcgtgacattgtgaagacttacgagttacgaaaatgcatggtcgagaagagacgcacgagggaaaaccgcacgatgttacggctttcattaatggaaacagcacgtgactctctgtacgatgttacgtagcttgattatttagaaacggcacgtgattagtgtttaacttgctgtttatttattttatttttcttttcccgcgaataatgaaaactcatgaaataattaattcgttttcgggtaatgcaatcgccaatcggtctctt

SEQ ID NO: 23285 - protein, 502 aa, Arabidopsis thaliana
  peptide (1)..(502): Ceres Seq. ID no. 13488251
ISTLLSSYQITQSISLSSSPSPNNKPKLLSFLASERPRRVINMSLLLHLFALSLLISVSGAKFSGRPGINYGQLGNNLPSPSDSVNLIKSLNAKRVKLYDANPKILAALNGTDITVSVMVPNELLVNISKSASLSDDWIRSNILPFYPTTKIRYLLVGNEILSLPDSELKSSLVPAMRKIQRSLKSLGVKKVKVGTTLATDVLQSSFPPSSGEFREDISGLIMKPMLQFLNRTKSFLFVDVYPYFAWAQDPTHVDLDYAIFESTNVTVTDPVSNLTYHNLFDQMIDAFVFAMKRVGYPDIRIWVAETGWPNNGDYDQIGANIYNAATYNRNVVKKLAADPPVGTPARPGKVLPAFVFALYNENQKTGPGTERHFGLLHPNGTQVYGIDLSGKTEYKESLPAPENNDLYKGKIWCVVAKGANWTQLGDALSYACSQGNNTCDPIQRGGPCQKPDLTVLHASYAFSSYWAQFRKIGGTCSFNGLATQTIKDPSYGRCEFPSVTL

SEQ ID NO: 23286 - protein, 460 aa, Arabidopsis thaliana
  peptide (1)..(460): Ceres Seq. ID no. 13488252
MSLLLHLFALSLLISVSGAKFSGRPGINYGQLGNNLPSPSDSVNLIKSLNAKRVKLYDANPKILAALNGTDITVSVMVPNELLVNISKSASLSDDWIRSNILPFYPTTKIRYLLVGNEILSLPDSELKSSLVPAMRKIQRSLKSLGVKKVKVGTTLATDVLQSSFPPSSGEFREDISGLIMKPMLQFLNRTKSFLFVDVYPYFAWAQDPTHVDLDYAIFESTNVTVTDPVSNLTYHNLFDQMIDAFVFAMKRVGYPDIRIWVAETGWPNNGDYDQIGANIYNAATYNRNVVKKLAADPPVGTPARPGKVLPAFVFALYNENQKTGPGTERHFGLLHPNGTQVYGIDLSGKTEYKESLPAPENNDLYKGKIWCVVAKGANWTQLGDALSYACSQGNNTCDPIQRGGPCQKPDLTVLHASYAFSSYWAQFRKIGGTCSFNGLATQTIKDPSYGRCEFPSVTL

SEQ ID NO: 23287 - protein, 384 aa, Arabidopsis thaliana
  peptide (1)..(384): Ceres Seq. ID no. 13488253
MVPNELLVNISKSASLSDDWIRSNILPFYPTTKIRYLLVGNEILSLPDSELKSSLVPAMRKIQRSLKSLGVKKVKVGTTLATDVLQSSFPPSSGEFREDISGLIMKPMLQFLNRTKSFLFVDVYPYFAWAQDPTHVDLDYAIFESTNVTVTDPVSNLTYHNLFDQMIDAFVFAMKRVGYPDIRIWVAETGWPNNGDYDQIGANIYNAATYNRNVVKKLAADPPVGTPARPGKVLPAFVFALYNENQKTGPGTERHFGLLHPNGTQVYGIDLSGKTEYKESLPAPENNDLYKGKIWCVVAKGANWTQLGDALSYACSQGNNTCDPIQRGGPCQKPDLTVLHASYAFSSYWAQFRKIGGTCSFNGLATQTIKDPSYGRCEFPSVTL

SEQ ID NO: 23288 - DNA, 1216 bp, Arabidopsis thaliana
  misc_feature (1)..(1216): Ceres Seq. ID no. 12324710
  misc_feature (1)..(1216): Ortholog of  Ceres SEQ ID NO 14311731 as cited in SEQ ID NO 51632
atataagaaaataggcttcaataggcaaaatattcttcctgtgatgcagtgaggatgaagaatatgctgatgtagattgggacaaccttggattcagtcttgtacggacagatttcatgttcgccaccaaaagttgcagagacggaaacttcgaacagggttaccttagccgttacggcaacatcgagctcaaccctgctgctggaattctcaactatggccagggactaatagaggggatgaaagcgtacagaggagaagacggtagggttcttctcttccgtccagagctaaacgcgatgcgtatgaagataggagctgagagaatgtgtatgcattctccttctgttcatcagtttattgaaggtgttaagcagaccgttcttgcaaacaggcgttgggttcctcctccgggcaaaggctcgttgtatctcagaccgttgttgttcggaagtggagcaagcttgggtgtggctgcagcatcagagtacacgtttcttgtgtttggctctcctgttcaaaactacttcaaggaaggcacagcggcgttgaacctgtatgtggaggaggtgattccacgcgcttatcttggaggaactggtggtgtaaaggcaatatccaattacggtccagtgcttgaagtgatgagaagagcaaaatcaagagggttttcggatgttttgtatcttgatgcagatactgggaagaacatagaagaagtctctgctgctaatatattccttgtgaagggcaatacaatagtgacaccagctacgagcggaacgattctcggagggatcacacgtaagagcataatcgaaatcgcccttgatcttggttacaaagtggaagaacgaagtgttccggtagaagaactgaaggaagctgaagaagttttctgcactggaactgccgctggagttgcttctgttggaagcatcacttttaagaacacaaggactgagtacaaagttggagatgggattgttacacagcaacttcgatctattcttgtcggaatacaaacaggttctatccaagacactaaagattgggttttgcagattgcctaagttactttcatatcctataaataatgttgcactctcttgatcacccatcaaaagcttttgaaatagtttttggtaaatttgtgacataaatttgtgatatatcaccacatcgtattagtattaaacatttgtttcactcttcc

SEQ ID NO: 23289 - protein, 318 aa, Arabidopsis thaliana
  peptide (1)..(318): Ceres Seq. ID no. 12324711
MFATKSCRDGNFEQGYLSRYGNIELNPAAGILNYGQGLIEGMKAYRGEDGRVLLFRPELNAMRMKIGAERMCMHSPSVHQFIEGVKQTVLANRRWVPPPGKGSLYLRPLLFGSGASLGVAAASEYTFLVFGSPVQNYFKEGTAALNLYVEEVIPRAYLGGTGGVKAISNYGPVLEVMRRAKSRGFSDVLYLDADTGKNIEEVSAANIFLVKGNTIVTPATSGTILGGITRKSIIEIALDLGYKVEERSVPVEELKEAEEVFCTGTAAGVASVGSITFKNTRTEYKVGDGIVTQQLRSILVGIQTGSIQDTKDWVLQIA

SEQ ID NO: 23290 - protein, 277 aa, Arabidopsis thaliana
  peptide (1)..(277): Ceres Seq. ID no. 12324712
MKAYRGEDGRVLLFRPELNAMRMKIGAERMCMHSPSVHQFIEGVKQTVLANRRWVPPPGKGSLYLRPLLFGSGASLGVAAASEYTFLVFGSPVQNYFKEGTAALNLYVEEVIPRAYLGGTGGVKAISNYGPVLEVMRRAKSRGFSDVLYLDADTGKNIEEVSAANIFLVKGNTIVTPATSGTILGGITRKSIIEIALDLGYKVEERSVPVEELKEAEEVFCTGTAAGVASVGSITFKNTRTEYKVGDGIVTQQLRSILVGIQTGSIQDTKDWVLQIA

SEQ ID NO: 23291 - protein, 257 aa, Arabidopsis thaliana
  peptide (1)..(257): Ceres Seq. ID no. 12324713
MRMKIGAERMCMHSPSVHQFIEGVKQTVLANRRWVPPPGKGSLYLRPLLFGSGASLGVAAASEYTFLVFGSPVQNYFKEGTAALNLYVEEVIPRAYLGGTGGVKAISNYGPVLEVMRRAKSRGFSDVLYLDADTGKNIEEVSAANIFLVKGNTIVTPATSGTILGGITRKSIIEIALDLGYKVEERSVPVEELKEAEEVFCTGTAAGVASVGSITFKNTRTEYKVGDGIVTQQLRSILVGIQTGSIQDTKDWVLQIA

SEQ ID NO: 23292 - DNA, 961 bp, Arabidopsis thaliana
  misc_feature (1)..(961): Ceres Seq. ID no. 12421482
  misc_feature (1)..(961): Ortholog of  Ceres SEQ ID NO 15225572 as cited in SEQ ID NO 61651
atcatctccacattttccaaggcttcagtttcacttcatcactctctctgccaaaaaaaacaaaaatgagctctcaaatctgcagatctgcttccaaagcagccaaatctcttctctcttcagctaaaaatgctcgcttcttctctgaaggacgagccattggtgctgcggcagcggtttcggcgtcaggaaaaattcctttgtatgcatctaactttgcaagatcatcaggttctggtgttgcttctaagagttggatcactggactcttagctcttcctgctgcagcttatatgattcaagatcaagaggttcttgctgctgagatggaacgaacttttattgctatcaagcctgatggtgtgcaaagaggactgatatcagagatcatttctcgattcgaacgcaagggattcaagctagttggtatcaaagtcattgttccttctaaagatttcgcacaaaagcattaccatgatcttaaggaaagacctttcttcaatggtttgtgtgacttccttagctctggtcctgttattgccatggtctgggaaggagatggtgtgatcagatacggacgtaaactgattggagccactgatcctcagaaatctgagcctggaacaatccgaggagatcttgcagttactgttggcaggaacataatccatggaagtgatggaccagagactgcaaaggatgagatcagtctgtggtttaagcctcaagaacttgtttcttacactagtaactctgagaagtggctctatggtgacaactaaatccctcttcctcttgtcttttgaaatcaaatcacattggtttttcttttcttttcttacccatacaataaaaacaagaaacagttgttacggatacaaacacattccgggttttgatttttccccggtgaactcagtaatcagagcataagcaataagtatgggatgactagtatttg

SEQ ID NO: 23293 - protein, 259 aa, Arabidopsis thaliana
  peptide (1)..(259): Ceres Seq. ID no. 12421483
HLHIFQGFSFTSSLSLPKKTKMSSQICRSASKAAKSLLSSAKNARFFSEGRAIGAAAAVSASGKIPLYASNFARSSGSGVASKSWITGLLALPAAAYMIQDQEVLAAEMERTFIAIKPDGVQRGLISEIISRFERKGFKLVGIKVIVPSKDFAQKHYHDLKERPFFNGLCDFLSSGPVIAMVWEGDGVIRYGRKLIGATDPQKSEPGTIRGDLAVTVGRNIIHGSDGPETAKDEISLWFKPQELVSYTSNSEKWLYGDN

SEQ ID NO: 23294 - protein, 238 aa, Arabidopsis thaliana
  peptide (1)..(238): Ceres Seq. ID no. 12421484
MSSQICRSASKAAKSLLSSAKNARFFSEGRAIGAAAAVSASGKIPLYASNFARSSGSGVASKSWITGLLALPAAAYMIQDQEVLAAEMERTFIAIKPDGVQRGLISEIISRFERKGFKLVGIKVIVPSKDFAQKHYHDLKERPFFNGLCDFLSSGPVIAMVWEGDGVIRYGRKLIGATDPQKSEPGTIRGDLAVTVGRNIIHGSDGPETAKDEISLWFKPQELVSYTSNSEKWLYGDN

SEQ ID NO: 23295 - protein, 162 aa, Arabidopsis thaliana
  peptide (1)..(162): Ceres Seq. ID no. 12421485
MIQDQEVLAAEMERTFIAIKPDGVQRGLISEIISRFERKGFKLVGIKVIVPSKDFAQKHYHDLKERPFFNGLCDFLSSGPVIAMVWEGDGVIRYGRKLIGATDPQKSEPGTIRGDLAVTVGRNIIHGSDGPETAKDEISLWFKPQELVSYTSNSEKWLYGDN

SEQ ID NO: 23296 - DNA, 1220 bp, Arabidopsis thaliana
  misc_feature (1)..(1220): Ceres Seq. ID no. 12338755
  misc_feature (1)..(1220): Ortholog of  Ceres SEQ ID NO 15169300 as cited in SEQ ID NO 59572
  misc_feature (1)..(1220): Ortholog of  Ceres SEQ ID NO 13596876 as cited in SEQ ID NO 62696
  misc_feature (1)..(1220): Ortholog of  Ceres SEQ ID NO 13655442 as cited in SEQ ID NO 64359
  misc_feature (1)..(1220): Ortholog of  Ceres SEQ ID NO 14303652 as cited in SEQ ID NO 67569
gtaatttctctttcgttcaatgttattcttttagatctcgaacaaaacaaaatctccagaagaaaaaaccaaattccatggcgtctaaatcgaagcagcatcttcgttatcagccgcgaaaatctgtgtcacgatcaacacaagctttcacggtgcttatacttcttctcgtagtgattctgattcttctgggtctcgggattttgtcactacctaatgctaatagaaactcttccaagacgaatgatttgaccaacattgtacgaaagagtgagacgagttctggagatgaagaagggaatggtgaacgttgggttgaagttatttcttgggagcctcgtgctgttgtttatcacaatttcttgactaatgaagaatgtgagcacttgatcagccttgctaaaccgagtatggttaagtcaaccgtggtagatgagaaaaccggtgggagcaaagatagcagagtgagaactagctcaggaacttttcttagaagaggacatgacgaagttgtcgaggtgattgagaaaaggatttcagatttcaccttcattcctgttgaaaatggtgaaggtcttcaagttcttcactaccaagttgggcagaagtatgagcctcactatgactatttcttagatgagttcaacaccaagaatggaggacaacgaatagctactgtgcttatgtacctctctgatgtcgatgatggtggcgagactgtgttccctgcagcaagaggaaacattagtgctgtcccatggtggaacgagctctcaaaatgtggtaaagaaggactatctgttctaccaaagaagcgagatgctttacttttctggaacatgaggcctgatgcatctctagacccttcgagcttgcacggtggatgtccagtggtgaaaggaaacaaatggtcatccacgaaatggttccatgtccacgagttcaaggtttaagagaaaccaaacaaagaaagctaaaatatgaggaggtttttcatggaagcttcgaatgtgtgtggatacagttaaacaggtataatgtgtatttcccttttgaagtgagagatccttaggaaattggaggctgttctttcatgggggatatttgaactttttgtactttttcttctaaattattttgaatgatttgtactttacgacatattcgaatctgagtcttgtaacttttaacaactcaatacgaaccatgaattttccgtt

SEQ ID NO: 23297 - protein, 316 aa, Arabidopsis thaliana
  peptide (1)..(316): Ceres Seq. ID no. 12338756
NFSFVQCYSFRSRTKQNLQKKKPNSMASKSKQHLRYQPRKSVSRSTQAFTVLILLLVVILILLGLGILSLPNANRNSSKTNDLTNIVRKSETSSGDEEGNGERWVEVISWEPRAVVYHNFLTNEECEHLISLAKPSMVKSTVVDEKTGGSKDSRVRTSSGTFLRRGHDEVVEVIEKRISDFTFIPVENGEGLQVLHYQVGQKYEPHYDYFLDEFNTKNGGQRIATVLMYLSDVDDGGETVFPAARGNISAVPWWNELSKCGKEGLSVLPKKRDALLFWNMRPDASLDPSSLHGGCPVVKGNKWSSTKWFHVHEFKV

SEQ ID NO: 23298 - protein, 291 aa, Arabidopsis thaliana
  peptide (1)..(291): Ceres Seq. ID no. 12338758
MASKSKQHLRYQPRKSVSRSTQAFTVLILLLVVILILLGLGILSLPNANRNSSKTNDLTNIVRKSETSSGDEEGNGERWVEVISWEPRAVVYHNFLTNEECEHLISLAKPSMVKSTVVDEKTGGSKDSRVRTSSGTFLRRGHDEVVEVIEKRISDFTFIPVENGEGLQVLHYQVGQKYEPHYDYFLDEFNTKNGGQRIATVLMYLSDVDDGGETVFPAARGNISAVPWWNELSKCGKEGLSVLPKKRDALLFWNMRPDASLDPSSLHGGCPVVKGNKWSSTKWFHVHEFKV

SEQ ID NO: 23299 - protein, 180 aa, Arabidopsis thaliana
  peptide (1)..(180): Ceres Seq. ID no. 12338759
MVKSTVVDEKTGGSKDSRVRTSSGTFLRRGHDEVVEVIEKRISDFTFIPVENGEGLQVLHYQVGQKYEPHYDYFLDEFNTKNGGQRIATVLMYLSDVDDGGETVFPAARGNISAVPWWNELSKCGKEGLSVLPKKRDALLFWNMRPDASLDPSSLHGGCPVVKGNKWSSTKWFHVHEFKV

SEQ ID NO: 23300 - DNA, 1386 bp, Arabidopsis thaliana
  misc_feature (1)..(1386): Ceres Seq. ID no. 12324734
  misc_feature (1)..(1386): Ortholog of  Ceres SEQ ID NO 14313147 as cited in SEQ ID NO 54166
  misc_feature (1)..(1386): Ortholog of  Ceres SEQ ID NO 13598882 as cited in SEQ ID NO 0
acttcttttatctctctttctatctcacacagagtgaagaatccagagagtctctaatggcagaatgaacaaaggaattagcaatcatcttcttctcggaagagaaaaatcatggctttagaagaggaggaagagagtcaaaacgcaccgttttgtgttcttgatggtcttttctgtgaggaagagagtgagtttcacgaacaagtagatttgtgcgacgagagtgttgaaaagtttccttttttaaatctgggtttgtctgatcatgatatgttgtgggatgatgatgagttatcaactttgatttcgaaacaagaaccgtgtctttatgacgaaatcttagatgatgagtttctggttttgtgtcgtgaaaaggctcttgattggatttttaaagtgaaatctcattatgggtttaattcattgacggctcttttagctgttaattacttcgataggtttattacaagcaggaagtttcagacagataagccatggatgtctcagcttactgctttggcttgtctgtctttagctgctaaggttgaagagatccgtgttccttttctcttagattttcaagtggaagaagcaagatatgtctttgaagctaagactatacagagaatggagcttcttgttctgtctactcttgactggaggatgcatcctgtgactccaatctcgtttttcgatcacattattcgacgatacagctttaaatctcatcatcaattggagttcttgagtagatgtgaatctttattactctccattattcctgattcgagatttctgagttttagtccttctgtgttagccactgcaataatggtctctgttattagagatttgaagatgtgtgacgaagctgtataccaatctcagctcatgactctactcaaagttgattcggagaaggtaaataaatgctatgagttagtgttagaccacagtccaagcaagaaaaggatgatgaattggatgcaacaacccgctagtccgatcggtgtgtttgatgcgtcattcagttctgatagctcgaatgagtcgtgggttgtgtctgcttctgcttcagtgtcgtcttcaccatcttcagagcctttgctcaagaggagaagagtgcaagagcagcagatgaggctatcttcaataaaccgaatgtttttcgatgtgcttagtagtagtcctcgctaataatgtcaacaacccatcaaaatgtgtcggtttagttacctaaaatctgtttccatgttttacatattatcggctatatggttctcggttcttgtgtttatggacggttgcaaatggtgtacgtttcgttatttgatattctaaaaacaaagttcttttacattaaaagtttccgctggatcttacctc

SEQ ID NO: 23301 - protein, 361 aa, Arabidopsis thaliana
  peptide (1)..(361): Ceres Seq. ID no. 12324735
MALEEEEESQNAPFCVLDGLFCEEESEFHEQVDLCDESVEKFPFLNLGLSDHDMLWDDDELSTLISKQEPCLYDEILDDEFLVLCREKALDWIFKVKSHYGFNSLTALLAVNYFDRFITSRKFQTDKPWMSQLTALACLSLAAKVEEIRVPFLLDFQVEEARYVFEAKTIQRMELLVLSTLDWRMHPVTPISFFDHIIRRYSFKSHHQLEFLSRCESLLLSIIPDSRFLSFSPSVLATAIMVSVIRDLKMCDEAVYQSQLMTLLKVDSEKVNKCYELVLDHSPSKKRMMNWMQQPASPIGVFDASFSSDSSNESWVVSASASVSSSPSSEPLLKRRRVQEQQMRLSSINRMFFDVLSSSPR

SEQ ID NO: 23302 - protein, 308 aa, Arabidopsis thaliana
  peptide (1)..(308): Ceres Seq. ID no. 12324736
MLWDDDELSTLISKQEPCLYDEILDDEFLVLCREKALDWIFKVKSHYGFNSLTALLAVNYFDRFITSRKFQTDKPWMSQLTALACLSLAAKVEEIRVPFLLDFQVEEARYVFEAKTIQRMELLVLSTLDWRMHPVTPISFFDHIIRRYSFKSHHQLEFLSRCESLLLSIIPDSRFLSFSPSVLATAIMVSVIRDLKMCDEAVYQSQLMTLLKVDSEKVNKCYELVLDHSPSKKRMMNWMQQPASPIGVFDASFSSDSSNESWVVSASASVSSSPSSEPLLKRRRVQEQQMRLSSINRMFFDVLSSSPR

SEQ ID NO: 23303 - protein, 232 aa, Arabidopsis thaliana
  peptide (1)..(232): Ceres Seq. ID no. 12324737
MSQLTALACLSLAAKVEEIRVPFLLDFQVEEARYVFEAKTIQRMELLVLSTLDWRMHPVTPISFFDHIIRRYSFKSHHQLEFLSRCESLLLSIIPDSRFLSFSPSVLATAIMVSVIRDLKMCDEAVYQSQLMTLLKVDSEKVNKCYELVLDHSPSKKRMMNWMQQPASPIGVFDASFSSDSSNESWVVSASASVSSSPSSEPLLKRRRVQEQQMRLSSINRMFFDVLSSSPR

SEQ ID NO: 23304 - DNA, 1460 bp, Arabidopsis thaliana
  misc_feature (1)..(1460): Ceres Seq. ID no. 13592742
  misc_feature (1)..(1460): Ortholog of  Ceres SEQ ID NO 14312212 as cited in SEQ ID NO 54399
  misc_feature (1)..(1460): Ortholog of  Ceres SEQ ID NO 15225341 as cited in SEQ ID NO 55222
  misc_feature (1)..(1460): Ortholog of  Ceres SEQ ID NO 13653980 as cited in SEQ ID NO 69253
ctctttgctctcactatcaaaactctgaatttcgatttcaatggagtcacgcgtgctgttacgcgccaccgcgaatgtcgttggaattccgaaattgagacgaccaatcggagcgatccaccgtcaattcagcactgcatcgtcttcctcgttctcggttaaaccaatcggaggaatcggagagggagcgaatctgatctccggtcgtcagcttcgtccaattcttcttctcgattcgtcggcgatcaacggaggagagaaaagagagattctcaaaccggttaaagccgccgctgctgaaggtggagataccgctggggaagctaaagttggattcctcgccaagtatccatggctagtcactggattcttcttcttcatgtggtacttcttaaatgtgattttcaacatccttaacaagaagatctataattacttcccttatccctattttgtatcggtgatacacttgttcgtgggagttgtttactgcttgatcagctggtccgtgggtcttcctaaacgtgccccgattgactcgaacctcctcaaggtattgataccagtcgcagtctgtcacgccttaggccatgtcactagcaatgtctctttcgctgcggttgctgtctccttcactcacaccatcaaagcacttgagccattcttcaatgcggctgcttctcaattcattatgggacaatccatccccataacactatggttgtctctagctcctgttgttcttggtgttgcaatggcttcactaactgagctatcattcaactggctcggtttcatcagtgctatgatatcaaacatttctttcacttaccgaagcatcttctccaagaaagccatgactgatatggacagtacaaatgtctacgcttacatctccatcatcgcactcttcgtctgcattcctcctgccatcatcgttgaaggtcctaaactacttaaccatggtttcgccgacgcgattgctaaagttggaatgactaaattcatctctgatctcttctgggttggaatgttttaccatctctacaatcagctggctaccaataccttggagagggttgcaccgctgactcacgcggttggaaacgttctgaaacgtgtgttcgtgatcggtttctccatcgttatcttcggaaacaagatatcgacacagacaggtataggaacaggaatagccattgctggagttgcaatgtactctatcattaaggccaagatcgaagaagagaaacggcaaggaaagaaagcatagaaagcagctgaagacggcggtcgacagttgcataaacaagttctccgatggatatatatatctatataataaataaccaaatgcaatagtatgttgtattgtaccatcaaccattgttttcgagtttttcctttctttgttttttttttgctttctgaaaagttatatataaattttttattctgcc

SEQ ID NO: 23305 - protein, 410 aa, Arabidopsis thaliana
  peptide (1)..(410): Ceres Seq. ID no. 13592743
MESRVLLRATANVVGIPKLRRPIGAIHRQFSTASSSSFSVKPIGGIGEGANLISGRQLRPILLLDSSAINGGEKREILKPVKAAAAEGGDTAGEAKVGFLAKYPWLVTGFFFFMWYFLNVIFNILNKKIYNYFPYPYFVSVIHLFVGVVYCLISWSVGLPKRAPIDSNLLKVLIPVAVCHALGHVTSNVSFAAVAVSFTHTIKALEPFFNAAASQFIMGQSIPITLWLSLAPVVLGVAMASLTELSFNWLGFISAMISNISFTYRSIFSKKAMTDMDSTNVYAYISIIALFVCIPPAIIVEGPKLLNHGFADAIAKVGMTKFISDLFWVGMFYHLYNQLATNTLERVAPLTHAVGNVLKRVFVIGFSIVIFGNKISTQTGIGTGIAIAGVAMYSIIKAKIEEEKRQGKKA

SEQ ID NO: 23306 - protein, 297 aa, Arabidopsis thaliana
  peptide (1)..(297): Ceres Seq. ID no. 13592744
MWYFLNVIFNILNKKIYNYFPYPYFVSVIHLFVGVVYCLISWSVGLPKRAPIDSNLLKVLIPVAVCHALGHVTSNVSFAAVAVSFTHTIKALEPFFNAAASQFIMGQSIPITLWLSLAPVVLGVAMASLTELSFNWLGFISAMISNISFTYRSIFSKKAMTDMDSTNVYAYISIIALFVCIPPAIIVEGPKLLNHGFADAIAKVGMTKFISDLFWVGMFYHLYNQLATNTLERVAPLTHAVGNVLKRVFVIGFSIVIFGNKISTQTGIGTGIAIAGVAMYSIIKAKIEEEKRQGKKA

SEQ ID NO: 23307 - DNA, 588 bp, Arabidopsis thaliana
  misc_feature (1)..(588): Ceres Seq. ID no. 13621944
  misc_feature (1)..(588): Ortholog of  Ceres SEQ ID NO 15169443 as cited in SEQ ID NO 58785
acacttcttcatcgccgtctgcacaaaaccctaatctcacaatctcctacgagatctatcagtctccacgaagatgaaggttgttgccgcatacttgctcgctgttttgagcggaaaagcttcaccaaccagtgccgatatcaagactatccttggatcagttggtgctgagacagaggattctcagattgagcttttgttgaaggaagtgaaaggaaaagatttggctgagttgattgctgctggaagggagaagttagcttcagtgccgtctggtggcggaggtggtgttgcggttgcttctgctacatctggaggtggaggaggtggtggtgcttctgctgctgagtccaagaaagaagagaagaaggaagaaaaggaagaatccgatgatgacatgggtttcagtctattcgagtaagctggtagtagcatgaaaagtccggttttgttgtcctcttttaatattgtaaccttttgaaatctatatgttgttgttgtttagtttgtattcgatcatcttttttagacattgctgaaattctcaagagtttttgacccgaatgtcatttgcactttgttgttagc

SEQ ID NO: 23308 - protein, 115 aa, Arabidopsis thaliana
  peptide (1)..(115): Ceres Seq. ID no. 13621945
MKVVAAYLLAVLSGKASPTSADIKTILGSVGAETEDSQIELLLKEVKGKDLAELIAAGREKLASVPSGGGGGVAVASATSGGGGGGGASAAESKKEEKKEEKEESDDDMGFSLFE

SEQ ID NO: 23309 - DNA, 1209 bp, Arabidopsis thaliana
  misc_feature (1)..(1209): Ceres Seq. ID no. 12324461
  misc_feature (1)..(1209): Ortholog of  Ceres SEQ ID NO 14307456 as cited in SEQ ID NO 54480
aagcgtggcaagtttaggatcacaggtcaatagagtgaaaaatgatcccaaactgaaaagagatgtcatcttctgaaacaggggaagttgcagagaatctagcgagaccaatggctactctggtctcgtctcaaacttacatctaccattgtcatattagtaaacaagctctttatcaggcaaaagaatcatactctcatcgtagaatttcccgtcataatcacagagaaagactcgatttttctcatagaaaccatagattgacaataactagaaagcagcaacctttgtctttcaacaccgtgtgttttgccgcagacgagccctccgaaatcagtgctgatgctagaatccgtagtgaggttctgtctccgttcagatcagtccgtatgttcttctacctcgcctttatagcaagcggttcattaggagaactaatagccacttctaggctcataggtaccctggcgaatccggctagatcaggtgaagttcttgagatcgttaagggtttgggagttgacattggtgctgcttctctctttgcgttcctatacttcaacgaaaacaagaccaagaacgcgcaaatggctaggctctcgagggaagagaatcttggcaaactcaaaatgagagtcgaagagaacaataaggtaatctccgtaggtgatctgagaggggttgctaggcttgtgatctgtgctggtcctgcggagtttattgaagaagcgtttaagagaagtaaagagtatacacaagggctcgtggagagaggtgtggttgtggtggcttatgctacggatgggaattcaccggttttggagtttgatgaaactgacattgcggatgaagaaatgagccagagaaggaagaaactgtggcgggtgactccggtttttgtcccggaatgggaaaagtggttaaatgagcagaagaagcttgccaatgtttcctcagactctccagtgtatttgtctctgcgtttggatgggcgtgtaagggcaagtggagtgggttatcctccatggcaagccttcgttgcacagcttcctccggttaagggaatgtggaccggtcttcttgacggtatggatggtagagtgtaaatactctaatacttagggataaagtcatatgttttttagtctcctataaattttataaaatgtatagttatgaaaagattttgacttcaaaattattatttcc

SEQ ID NO: 23310 - protein, 347 aa, Arabidopsis thaliana
  peptide (1)..(347): Ceres Seq. ID no. 12324462
MSSSETGEVAENLARPMATLVSSQTYIYHCHISKQALYQAKESYSHRRISRHNHRERLDFSHRNHRLTITRKQQPLSFNTVCFAADEPSEISADARIRSEVLSPFRSVRMFFYLAFIASGSLGELIATSRLIGTLANPARSGEVLEIVKGLGVDIGAASLFAFLYFNENKTKNAQMARLSREENLGKLKMRVEENNKVISVGDLRGVARLVICAGPAEFIEEAFKRSKEYTQGLVERGVVVVAYATDGNSPVLEFDETDIADEEMSQRRKKLWRVTPVFVPEWEKWLNEQKKLANVSSDSPVYLSLRLDGRVRASGVGYPPWQAFVAQLPPVKGMWTGLLDGMDGRV

SEQ ID NO: 23311 - protein, 331 aa, Arabidopsis thaliana
  peptide (1)..(331): Ceres Seq. ID no. 12324463
MATLVSSQTYIYHCHISKQALYQAKESYSHRRISRHNHRERLDFSHRNHRLTITRKQQPLSFNTVCFAADEPSEISADARIRSEVLSPFRSVRMFFYLAFIASGSLGELIATSRLIGTLANPARSGEVLEIVKGLGVDIGAASLFAFLYFNENKTKNAQMARLSREENLGKLKMRVEENNKVISVGDLRGVARLVICAGPAEFIEEAFKRSKEYTQGLVERGVVVVAYATDGNSPVLEFDETDIADEEMSQRRKKLWRVTPVFVPEWEKWLNEQKKLANVSSDSPVYLSLRLDGRVRASGVGYPPWQAFVAQLPPVKGMWTGLLDGMDGRV

SEQ ID NO: 23312 - protein, 238 aa, Arabidopsis thaliana
  peptide (1)..(238): Ceres Seq. ID no. 12324464
MFFYLAFIASGSLGELIATSRLIGTLANPARSGEVLEIVKGLGVDIGAASLFAFLYFNENKTKNAQMARLSREENLGKLKMRVEENNKVISVGDLRGVARLVICAGPAEFIEEAFKRSKEYTQGLVERGVVVVAYATDGNSPVLEFDETDIADEEMSQRRKKLWRVTPVFVPEWEKWLNEQKKLANVSSDSPVYLSLRLDGRVRASGVGYPPWQAFVAQLPPVKGMWTGLLDGMDGRV

SEQ ID NO: 23313 - DNA, 1475 bp, Arabidopsis thaliana
  misc_feature (1)..(1475): Ceres Seq. ID no. 12738585
  misc_feature (1)..(1475): Ortholog of  Ceres SEQ ID NO 14314280 as cited in SEQ ID NO 57429
  misc_feature (1)..(1475): Ortholog of  Ceres SEQ ID NO 13595870 as cited in SEQ ID NO 62101
  misc_feature (1)..(1475): Ortholog of  Ceres SEQ ID NO 13590241 as cited in SEQ ID NO 63878
  misc_feature (1)..(1475): Ortholog of  Ceres SEQ ID NO 13657939 as cited in SEQ ID NO 66349
gtgatctatctttgaatctcaaaagcatacttgagagagatctgtttcgataatttgcttcaatcaccgtgttaatggcggccgtaggagtggaggcgagacctcctgtgacagcgatggaggaaacctgcaacgttaagggagcggcggcgaaacaaggagaagggcttaacaagtactacctccagcatctcgatgagctccagcgcctgcaacgcgaaaagtcgtataaccttaatcgtcttgaagctcagaggaatgaactcaattctcgagtacgaatgctcagagaagagttacagctccttcaagaacctgggtcctatgtgggtgaagtggtaaaagtgatgggaaaaaacaaggtcttggttaaggttcatccagaggggaagtatgttgtcgatattgacaaaagtatagacataacgaaactcactccatcaacgagagttgctctccgtaatgatagctatgttctccacctggttctgccaagtaaagtagatcccttggttaaccttatgaaagttgagaaggttccagactccacatatgacatgattggtggtcttgaccagcaaatcaaggaaataaaggaggtcattgaactgccaatcaagcatcctgaattgtttgagtctcttggaattgcgcagccaaagggtgtgttgttgtacggtccacctggaactgggaagacactattggctcgggctgtggcacatcacactgactgtactttcatcagagtttctggttctgagctggtccagaaatacattggagaaggttctagaatggtcagagaactttttgtgatggcaagggagcatgcaccatcaatcatcttcatggatgaaatcgatagtatcgggtctgctcgtatggaatctggtagtggaaatggtgacagtgaggtgcaaaggactatgcttgagcttctcaatcaacttgacggattcgaggcgtcaaacaaaatcaaggttttgatggctacaaatcgtattgatattctggatcaagctcttctccggcctggaaggattgataggaaaattgaatttcctaatcctaatgaagagtcacgttttgatatcttgaagatacactcaaggaaaatgaatttgatgcgtggaatcgatctgaaaaagattgcagagaagatgaatggtgcttcaggtgctgagctgaaggctgtatgcacggaggcgggcatgtttgcacttcgtgagaggagagtacatgtgactcaggaagactttgagatggctgtggcgaaggtaatgaagaaagacacagagaagaacatgtctctgcgtaagctctggaagtaggaatttcagagtcacagattaatttcgattatttcttctctactgtctgtggttctttctgaaaccttttcggctagcgctttaagcttttctaaacaatgtttgtacactagtttctattcattcaattggttgttcagc

SEQ ID NO: 23314 - protein, 419 aa, Arabidopsis thaliana
  peptide (1)..(419): Ceres Seq. ID no. 12738586
MAAVGVEARPPVTAMEETCNVKGAAAKQGEGLNKYYLQHLDELQRLQREKSYNLNRLEAQRNELNSRVRMLREELQLLQEPGSYVGEVVKVMGKNKVLVKVHPEGKYVVDIDKSIDITKLTPSTRVALRNDSYVLHLVLPSKVDPLVNLMKVEKVPDSTYDMIGGLDQQIKEIKEVIELPIKHPELFESLGIAQPKGVLLYGPPGTGKTLLARAVAHHTDCTFIRVSGSELVQKYIGEGSRMVRELFVMAREHAPSIIFMDEIDSIGSARMESGSGNGDSEVQRTMLELLNQLDGFEASNKIKVLMATNRIDILDQALLRPGRIDRKIEFPNPNEESRFDILKIHSRKMNLMRGIDLKKIAEKMNGASGAELKAVCTEAGMFALRERRVHVTQEDFEMAVAKVMKKDTEKNMSLRKLWK

SEQ ID NO: 23315 - protein, 405 aa, Arabidopsis thaliana
  peptide (1)..(405): Ceres Seq. ID no. 12738587
MEETCNVKGAAAKQGEGLNKYYLQHLDELQRLQREKSYNLNRLEAQRNELNSRVRMLREELQLLQEPGSYVGEVVKVMGKNKVLVKVHPEGKYVVDIDKSIDITKLTPSTRVALRNDSYVLHLVLPSKVDPLVNLMKVEKVPDSTYDMIGGLDQQIKEIKEVIELPIKHPELFESLGIAQPKGVLLYGPPGTGKTLLARAVAHHTDCTFIRVSGSELVQKYIGEGSRMVRELFVMAREHAPSIIFMDEIDSIGSARMESGSGNGDSEVQRTMLELLNQLDGFEASNKIKVLMATNRIDILDQALLRPGRIDRKIEFPNPNEESRFDILKIHSRKMNLMRGIDLKKIAEKMNGASGAELKAVCTEAGMFALRERRVHVTQEDFEMAVAKVMKKDTEKNMSLRKLWK

SEQ ID NO: 23316 - protein, 350 aa, Arabidopsis thaliana
  peptide (1)..(350): Ceres Seq. ID no. 12738588
MLREELQLLQEPGSYVGEVVKVMGKNKVLVKVHPEGKYVVDIDKSIDITKLTPSTRVALRNDSYVLHLVLPSKVDPLVNLMKVEKVPDSTYDMIGGLDQQIKEIKEVIELPIKHPELFESLGIAQPKGVLLYGPPGTGKTLLARAVAHHTDCTFIRVSGSELVQKYIGEGSRMVRELFVMAREHAPSIIFMDEIDSIGSARMESGSGNGDSEVQRTMLELLNQLDGFEASNKIKVLMATNRIDILDQALLRPGRIDRKIEFPNPNEESRFDILKIHSRKMNLMRGIDLKKIAEKMNGASGAELKAVCTEAGMFALRERRVHVTQEDFEMAVAKVMKKDTEKNMSLRKLWK

SEQ ID NO: 23317 - DNA, 1156 bp, Arabidopsis thaliana
  misc_feature (1)..(1156): Ceres Seq. ID no. 12327690
  misc_feature (1)..(1156): Ortholog of  Ceres SEQ ID NO 14312281 as cited in SEQ ID NO 59172
  misc_feature (1)..(1156): Ortholog of  Ceres SEQ ID NO 14302299 as cited in SEQ ID NO 68665
  misc_feature (1)..(1156): Ortholog of  Ceres SEQ ID NO 15174396 as cited in SEQ ID NO 0
cttcataaaacattttaatctctcttctcttttttttgtctgtgcaaagatatcactttcttgctcccaaagcaaaatcaactcttcttcttcttcttctcccagacatcagcaagattcaggagattaaaaccttaaattaaaacaatacaaactccaaattcaccggaggaaataacttaaaacttgaatctgaaaagatgagctgcaatggttgccgtgttctccggaaaggttgcagcgagaattgtatcctccggccatgtattcaatggattgaaaccgccgatgctcaaggccacgccaccgtcttcgtcgctaaattcttcggccgtgctggtctcatgtcctttatctccgctgttccggattctcaacgtcctgctttgtttcagtcgttgctctacgaagcttgtggaagaactgtcaatccagttaacggagcaatcggaatgttatggactggaaactggaatatctgtcaagcggctgttgaaacagtgcttcgcggcggttctttaagaccgatcccggagcttctcactcacggcggcggtttcgctggctttccttcgcctacatctgaagaagcatctgagatctgcaccgaaatgttgaatctccagcaaaatgattccaccgatcgtaacatctatcatcattcacgattctcaagctctagatctagatctactatggattcttcttctccgacgaaacgtaagagattatcatcggaagaccaaccatcttcggagcttgatctatctctcatccctaattttcccattaagcaaacaacaccttcttctacacggcggcgatcagtaacaccgtcgatgaactcagaggactccgggacgacgacgactacgacggcgttttgtgacaagggtgatgtgtacggtaacgaaggaggagaaacgaccaagttgcttaacctttttgtttaatgcaaaacggcgtcggttttctcagagttagtctagggttttaaatgtaattttacacattttcttcctttttcctggataaatattggaccggcgaattaacaactacgtcgttttgttctctcggttttgagtccccccccccccccattaaccaattgtaaaacttaatgagtgaaaaaagttatgtctagtttttctgc

SEQ ID NO: 23318 - protein, 250 aa, Arabidopsis thaliana
  peptide (1)..(250): Ceres Seq. ID no. 12327691
MSCNGCRVLRKGCSENCILRPCIQWIETADAQGHATVFVAKFFGRAGLMSFISAVPDSQRPALFQSLLYEACGRTVNPVNGAIGMLWTGNWNICQAAVETVLRGGSLRPIPELLTHGGGFAGFPSPTSEEASEICTEMLNLQQNDSTDRNIYHHSRFSSSRSRSTMDSSSPTKRKRLSSEDQPSSELDLSLIPNFPIKQTTPSSTRRRSVTPSMNSEDSGTTTTTTAFCDKGDVYGNEGGETTKLLNLFV

SEQ ID NO: 23319 - protein, 202 aa, Arabidopsis thaliana
  peptide (1)..(202): Ceres Seq. ID no. 12327692
MSFISAVPDSQRPALFQSLLYEACGRTVNPVNGAIGMLWTGNWNICQAAVETVLRGGSLRPIPELLTHGGGFAGFPSPTSEEASEICTEMLNLQQNDSTDRNIYHHSRFSSSRSRSTMDSSSPTKRKRLSSEDQPSSELDLSLIPNFPIKQTTPSSTRRRSVTPSMNSEDSGTTTTTTAFCDKGDVYGNEGGETTKLLNLFV

SEQ ID NO: 23320 - protein, 166 aa, Arabidopsis thaliana
  peptide (1)..(166): Ceres Seq. ID no. 12327693
MLWTGNWNICQAAVETVLRGGSLRPIPELLTHGGGFAGFPSPTSEEASEICTEMLNLQQNDSTDRNIYHHSRFSSSRSRSTMDSSSPTKRKRLSSEDQPSSELDLSLIPNFPIKQTTPSSTRRRSVTPSMNSEDSGTTTTTTAFCDKGDVYGNEGGETTKLLNLFV

SEQ ID NO: 23321 - DNA, 1133 bp, Arabidopsis thaliana
  misc_feature (1)..(1133): Ceres Seq. ID no. 12324532
  misc_feature (1)..(1133): Ortholog of  Ceres SEQ ID NO 13638643 as cited in SEQ ID NO 52149
atttttaatagactatcaaaaaaacaatctcatttcatttgctctcttctccgagaaaatggcgtttggtttgatcggaagagttgttggaacgaaaccgtcacgattatccacggcggcgcgattgattccggcgcgatggacatcaaaaggatcagaagcacaatcgaaagcttcaaccggcggcggaggagcgagtctgaagacgtttcagatctatcgatggaatccagataatcctggaaagccagagcttcaagattacaaaatcgatctcaaggattgtggtccaatggttctagatgctttgattaagattaagaacgagatggatccatcgctcactttccgtcgctcttgccgtgaaggtatttgtggttcgtgtgctatgaacattgatggatgtaatggtcttgcttgtttaacgaagattgaatctggatctaaagagacgacgattacgccgttgccgcatatgtttgtgattaaggatttggttgtggatatgacgaatttttataatcagtataagagtattgagccgtggttgaagaggaagaatccagcatctgttcctgggaaagagattttacagagtaagaaagatagagctaagcttgatggaatgtatgaatgtattctctgtgcttgttgtagcacgtcttgccctagctattggtggaaccctgagtcttatcttggtccagctgctttgcttcatgccaacaggtggataagtgatagccgagatgagtacactaaggaaagacttgaagccattgacgatgagttcaaactgtatcgatgccacacaattctgaactgtgctcgtgcctgtccaaagggattgaacccagggaaacagatcacacacatcaagcagcttcagaaatctggttgaacaacaaatgaatcaggcagtacctaatggatttttgattctaataatctgcaagaaactccaattttggattcattcttgtattgctgtcacaactatcagaattagattattttgtggtatatcttgatgaattttttttgcctacaacaagcaataaaactctgctttttttatcatccactcattcagctttgccttaatacaaacatttggatttcgagttttgctc

SEQ ID NO: 23322 - protein, 299 aa, Arabidopsis thaliana
  peptide (1)..(299): Ceres Seq. ID no. 12324533
FLIDYQKNNLISFALFSEKMAFGLIGRVVGTKPSRLSTAARLIPARWTSKGSEAQSKASTGGGGASLKTFQIYRWNPDNPGKPELQDYKIDLKDCGPMVLDALIKIKNEMDPSLTFRRSCREGICGSCAMNIDGCNGLACLTKIESGSKETTITPLPHMFVIKDLVVDMTNFYNQYKSIEPWLKRKNPASVPGKEILQSKKDRAKLDGMYECILCACCSTSCPSYWWNPESYLGPAALLHANRWISDSRDEYTKERLEAIDDEFKLYRCHTILNCARACPKGLNPGKQITHIKQLQKSG

SEQ ID NO: 23323 - protein, 280 aa, Arabidopsis thaliana
  peptide (1)..(280): Ceres Seq. ID no. 12324534
MAFGLIGRVVGTKPSRLSTAARLIPARWTSKGSEAQSKASTGGGGASLKTFQIYRWNPDNPGKPELQDYKIDLKDCGPMVLDALIKIKNEMDPSLTFRRSCREGICGSCAMNIDGCNGLACLTKIESGSKETTITPLPHMFVIKDLVVDMTNFYNQYKSIEPWLKRKNPASVPGKEILQSKKDRAKLDGMYECILCACCSTSCPSYWWNPESYLGPAALLHANRWISDSRDEYTKERLEAIDDEFKLYRCHTILNCARACPKGLNPGKQITHIKQLQKSG

SEQ ID NO: 23324 - protein, 202 aa, Arabidopsis thaliana
  peptide (1)..(202): Ceres Seq. ID no. 12324535
MVLDALIKIKNEMDPSLTFRRSCREGICGSCAMNIDGCNGLACLTKIESGSKETTITPLPHMFVIKDLVVDMTNFYNQYKSIEPWLKRKNPASVPGKEILQSKKDRAKLDGMYECILCACCSTSCPSYWWNPESYLGPAALLHANRWISDSRDEYTKERLEAIDDEFKLYRCHTILNCARACPKGLNPGKQITHIKQLQKSG

SEQ ID NO: 23325 - DNA, 1694 bp, Arabidopsis thaliana
  misc_feature (1)..(1694): Ceres Seq. ID no. 13488383
  misc_feature (1)..(1694): Ortholog of  Ceres SEQ ID NO 15225553 as cited in SEQ ID NO 51170
attatattgtccttgcaatttataagtaaaaacatttcttttctggtccactcgttttaacttccggcgatcgattttcacggcgagaaatgttgtcggcgcttggctttgctttactcagcatcttcgcgatcctcttgtcgttatcaaccttgtctaatggattacttcaacctcgtaggatttctcatggcttgacggaaagtagcaagtacttgacgagggatgagctctggttcaatcaaaccctagatcattactctccttctgatcatcgcgaattcaaacagcgatactatgaatatctagaccatttacgagttcctgatggacctatctttatgatgatctgtggcgaaggaccttgcaatggaatccccaatgactatataactgtgttagcaaagaagtttgatgcaggcattgtttcacttgagcatcgttattacggaaagagctcaccgtttaagtcattagccactgagaatctcaagtatctttcttctaaacaggctcttttcgatttagctgctttccgccaatattaccaggactctttgaatgttaagtttaatagaagtggcgatgttgagaatccgtggtttttcttcggagcttcttattctggagctttaagtgcttggttccggcttaagttccctcatttgacctgtggaagccttgctagttctgcagttgttcgtgcagtctacgaattccctgaatttgatcaacagataggtgagtcggctggaccggaatgtaaagctgcactacaagagactaataagctcttggaactagggcttaaagtgaataacagggctgtgaaagctctcttcaatgccaccgagcttgacgttgatgctgatttcttatacttgatagcagatgcagaagttatggcgatccaatacggaaacccagataaactatgtgtaccactcgtggaagctcagaagaatcgtgatgatttagtggaagcatatgctaaatatgttagagagttttgtgtgggggttttcgggctaagctctaaaacatatagccggaaacatctgctagacactgcggtcaccccagaaagtgcagataggctttggtggttccaagtttgcactgaagtggcatatttccaagtggcacctgcaaacgatagcatccggtctcatcaaatcaatacagagtatcatttggatctatgcaagagtctgtttgggaaaggtgtttaccctgaagtcgatgcaacaaacctgtattatggaagtgacagaattgctgcgaccaagattatcttcacaaatgggtcacaggatccatggcgtcatgcatccaaacagacctcatctcctgaactgccttcttacattgtgacttgccacaactgtggccatggaagtgatctccgtggatgccctcaatctcccatggtcattggaggtgattccaagaattgcagttcacctgatgcagtgaacaaagtgaggcaacatatagtagatcatatggacttgtggctctctgagtgtcgtggagggattaggagttccatgtaaagagtcacacgaagtcagaaactgcggttatgcaaataaataaaacatcagatgtatgtttcaaacctgtatctgtgtaactgtaacctctgatgtatgtttcgaacttgtctctacggacctaatacagtagtttac

SEQ ID NO: 23326 - protein, 488 aa, Arabidopsis thaliana
  peptide (1)..(488): Ceres Seq. ID no. 13488384
MLSALGFALLSIFAILLSLSTLSNGLLQPRRISHGLTESSKYLTRDELWFNQTLDHYSPSDHREFKQRYYEYLDHLRVPDGPIFMMICGEGPCNGIPNDYITVLAKKFDAGIVSLEHRYYGKSSPFKSLATENLKYLSSKQALFDLAAFRQYYQDSLNVKFNRSGDVENPWFFFGASYSGALSAWFRLKFPHLTCGSLASSAVVRAVYEFPEFDQQIGESAGPECKAALQETNKLLELGLKVNNRAVKALFNATELDVDADFLYLIADAEVMAIQYGNPDKLCVPLVEAQKNRDDLVEAYAKYVREFCVGVFGLSSKTYSRKHLLDTAVTPESADRLWWFQVCTEVAYFQVAPANDSIRSHQINTEYHLDLCKSLFGKGVYPEVDATNLYYGSDRIAATKIIFTNGSQDPWRHASKQTSSPELPSYIVTCHNCGHGSDLRGCPQSPMVIGGDSKNCSSPDAVNKVRQHIVDHMDLWLSECRGGIRSSM

SEQ ID NO: 23327 - protein, 404 aa, Arabidopsis thaliana
  peptide (1)..(404): Ceres Seq. ID no. 13488385
MMICGEGPCNGIPNDYITVLAKKFDAGIVSLEHRYYGKSSPFKSLATENLKYLSSKQALFDLAAFRQYYQDSLNVKFNRSGDVENPWFFFGASYSGALSAWFRLKFPHLTCGSLASSAVVRAVYEFPEFDQQIGESAGPECKAALQETNKLLELGLKVNNRAVKALFNATELDVDADFLYLIADAEVMAIQYGNPDKLCVPLVEAQKNRDDLVEAYAKYVREFCVGVFGLSSKTYSRKHLLDTAVTPESADRLWWFQVCTEVAYFQVAPANDSIRSHQINTEYHLDLCKSLFGKGVYPEVDATNLYYGSDRIAATKIIFTNGSQDPWRHASKQTSSPELPSYIVTCHNCGHGSDLRGCPQSPMVIGGDSKNCSSPDAVNKVRQHIVDHMDLWLSECRGGIRSSM

SEQ ID NO: 23328 - protein, 403 aa, Arabidopsis thaliana
  peptide (1)..(403): Ceres Seq. ID no. 13488386
MICGEGPCNGIPNDYITVLAKKFDAGIVSLEHRYYGKSSPFKSLATENLKYLSSKQALFDLAAFRQYYQDSLNVKFNRSGDVENPWFFFGASYSGALSAWFRLKFPHLTCGSLASSAVVRAVYEFPEFDQQIGESAGPECKAALQETNKLLELGLKVNNRAVKALFNATELDVDADFLYLIADAEVMAIQYGNPDKLCVPLVEAQKNRDDLVEAYAKYVREFCVGVFGLSSKTYSRKHLLDTAVTPESADRLWWFQVCTEVAYFQVAPANDSIRSHQINTEYHLDLCKSLFGKGVYPEVDATNLYYGSDRIAATKIIFTNGSQDPWRHASKQTSSPELPSYIVTCHNCGHGSDLRGCPQSPMVIGGDSKNCSSPDAVNKVRQHIVDHMDLWLSECRGGIRSSM

SEQ ID NO: 23329 - DNA, 1321 bp, Arabidopsis thaliana
  misc_feature (1)..(1321): Ceres Seq. ID no. 13487919
  misc_feature (1)..(1321): Ortholog of  Ceres SEQ ID NO 13659644 as cited in SEQ ID NO 67118
  misc_feature (1)..(1321): Ortholog of  Ceres SEQ ID NO 14302856 as cited in SEQ ID NO 68824
aaggtttgaacataaatcctaatttcgttgctcgacagcaatctcggaccaagtggaaaccgaaaatggcggcgaatgggctaatggcggcatctagtgtgtttctccaccgtcctgtacatccccatttctcgttctcttctagaacgaatcaaatggttccactcggcttcaaaggccgtgttagtttcatcggcaatgtgaaacgctgttttccggtggtattgtcaatgggaaagtcggagactttcgaggaagctggaaattccgttgcgcctggtaacggcatatcgatcatggtgaatggatgcagtggtaaaatggggaaagctgtcatcaaagcggcagattctgctggagtgaatattgttcctacatcatttgagtctgttgaagaggctggccagactgttgaggtctgtgaaaggagattcttgtgcatggtcctactgaaagagaaaaggtgctgtcttcagtgtttgagaagtatcctgaactaattgttgtggactacacaattccctctgcagtaaatgataatgcagagctgtatggcaaagtaggagttccgttcgtaatgggaacaactggaggagacaggacaagattgtataaaactgtcgaggaatcaaagatttatgctgtgatttctccacagatgggtaaacaggttgttgcgtttcttgcagcaatggagatcatgtctgagcagtttcctggtgcatttgctggttattccttagaggtgatggagtctcatcaagctagcaaattggatgcatctggtactgcaaaagctgttatttcttgctttcagaaattaggcgtgtcttacgacatggaccagatacaattaattcgagatcctaagcagcagattgaggtggtgggtgttccagaggagcatgtctcgggtcatgctttccatctttatcacttgacatcaccagataaaactgtgtcctttgagttccagcacaatgtttgcggaagatcaatatatgctgagggtactgttgatgcagtgctattccttgccaaaaagatccggtctaaagcagagaagaggatctataacatgattgatgtcttgtgagagggaaacatgcgttgaacaaaccccaagctgcagtggctagtaaagaagagtatatgaaactctatataaaaaaatgtcatgccaagttaaatgtgctttggttcttcatttctttgtagggttttgtctttttatggcttctctgtttctcttttcggatttgcaaaattcctgagaaaattgtcatttcttttcgattatagtcgtctttcttcgggatct

SEQ ID NO: 23330 - protein, 172 aa, Arabidopsis thaliana
  peptide (1)..(172): Ceres Seq. ID no. 13487920
MGTTGGDRTRLYKTVEESKIYAVISPQMGKQVVAFLAAMEIMSEQFPGAFAGYSLEVMESHQASKLDASGTAKAVISCFQKLGVSYDMDQIQLIRDPKQQIEVVGVPEEHVSGHAFHLYHLTSPDKTVSFEFQHNVCGRSIYAEGTVDAVLFLAKKIRSKAEKRIYNMIDVL

SEQ ID NO: 23331 - protein, 165 aa, Arabidopsis thaliana
  peptide (1)..(165): Ceres Seq. ID no. 13487921
GLNINPNFVARQQSRTKWKPKMAANGLMAASSVFLHRPVHPHFSFSSRTNQMVPLGFKGRVSFIGNVKRCFPVVLSMGKSETFEEAGNSVAPGNGISIMVNGCSGKMGKAVIKAADSAGVNIVPTSFESVEEAGQTVEVCERRFLCMVLLKEKRCCLQCLRSILN

SEQ ID NO: 23332 - protein, 145 aa, Arabidopsis thaliana
  peptide (1)..(145): Ceres Seq. ID no. 13487922
MGKQVVAFLAAMEIMSEQFPGAFAGYSLEVMESHQASKLDASGTAKAVISCFQKLGVSYDMDQIQLIRDPKQQIEVVGVPEEHVSGHAFHLYHLTSPDKTVSFEFQHNVCGRSIYAEGTVDAVLFLAKKIRSKAEKRIYNMIDVL

SEQ ID NO: 23333 - DNA, 1286 bp, Arabidopsis thaliana
  misc_feature (1)..(1286): Ceres Seq. ID no. 12335298
  misc_feature (1)..(1286): Ortholog of  Ceres SEQ ID NO 13596048 as cited in SEQ ID NO 68476
  misc_feature (1)..(1286): Ortholog of  Ceres SEQ ID NO 12589137 as cited in SEQ ID NO 0
aaaattgattactctgttttggttttggatcagatcaaccaaaggaagcgaagaagaagaagactttatacactctcgacgctattgatttcgtctgtgcagttttgtttctctatcagttagttttaaagatgagttcttcagagagtgtggaaaacgagtgcatgtgttgggctgcaagagatccatctggtcttctttctcctcatactatcactcgcaggtctgttacaactgacgatgtttcactcacaatcactcattgtggagtgtgttacgctgatgttatctggagtagaaaccaacatggagactccaagtaccctttggttcctgggcatgagattgctggaatagtgactaaggttgggcctaatgttcaacgattcaaagttggagaccatgttggtgttggaacgtatgttaactcctgcagggagtgtgaatattgtaatgaaggacaagaagttaattgtgcgaaaggagtttttactttcaatggcattgatcatgatggctctgttactaaaggaggctactctagtcacattgttgttcatgaaaggtactgctacaagatacctgtggactatcccttggaatcagctgcaccattactctgtgctggaatcacggtttatgcacctatgatgcgtcacaatatgaatcaacctggtaaatctcttggggtgatcgggctaggtggtcttggacacatggcggttaagtttggcaaggcttttggacttagtgttacggtttttagcaccagcatttccaagaaagaagaagctttgaatctgctaggagctgagaatttcgttatctcatctgaccatgaccagatgaaggcactagagaaatctctagactttctagttgacacagcatctggtgatcacgcgtttgatccttacatgtctctcttgaagattgctggaacttatgtattggttggtttcccaagtgaaattaaaatcagtcctgccaatctcaatcttggtatgagaatgctcgctggaagcgtaaccggggggaccaaaataacacagcaaatgttagatttctgtgcagctcataagatttatccaaacatagaggtgattcccattcaaaagataaacgaagctctcgaaagagtggtgaagaaggacatcaagtaccgtttcgtgattgacatcaagaactccctcaaatagatgttgctcaaaggaaggaataatggagtctgtaataagagaataatactcactgctacaatctttattacgtatttggttttagtc

SEQ ID NO: 23334 - protein, 355 aa, Arabidopsis thaliana
  peptide (1)..(355): Ceres Seq. ID no. 12335299
MSSSESVENECMCWAARDPSGLLSPHTITRRSVTTDDVSLTITHCGVCYADVIWSRNQHGDSKYPLVPGHEIAGIVTKVGPNVQRFKVGDHVGVGTYVNSCRECEYCNEGQEVNCAKGVFTFNGIDHDGSVTKGGYSSHIVVHERYCYKIPVDYPLESAAPLLCAGITVYAPMMRHNMNQPGKSLGVIGLGGLGHMAVKFGKAFGLSVTVFSTSISKKEEALNLLGAENFVISSDHDQMKALEKSLDFLVDTASGDHAFDPYMSLLKIAGTYVLVGFPSEIKISPANLNLGMRMLAGSVTGGTKITQQMLDFCAAHKIYPNIEVIPIQKINEALERVVKKDIKYRFVIDIKNSLK

SEQ ID NO: 23335 - protein, 344 aa, Arabidopsis thaliana
  peptide (1)..(344): Ceres Seq. ID no. 12335300
MCWAARDPSGLLSPHTITRRSVTTDDVSLTITHCGVCYADVIWSRNQHGDSKYPLVPGHEIAGIVTKVGPNVQRFKVGDHVGVGTYVNSCRECEYCNEGQEVNCAKGVFTFNGIDHDGSVTKGGYSSHIVVHERYCYKIPVDYPLESAAPLLCAGITVYAPMMRHNMNQPGKSLGVIGLGGLGHMAVKFGKAFGLSVTVFSTSISKKEEALNLLGAENFVISSDHDQMKALEKSLDFLVDTASGDHAFDPYMSLLKIAGTYVLVGFPSEIKISPANLNLGMRMLAGSVTGGTKITQQMLDFCAAHKIYPNIEVIPIQKINEALERVVKKDIKYRFVIDIKNSLK

SEQ ID NO: 23336 - protein, 183 aa, Arabidopsis thaliana
  peptide (1)..(183): Ceres Seq. ID no. 12335301
MMRHNMNQPGKSLGVIGLGGLGHMAVKFGKAFGLSVTVFSTSISKKEEALNLLGAENFVISSDHDQMKALEKSLDFLVDTASGDHAFDPYMSLLKIAGTYVLVGFPSEIKISPANLNLGMRMLAGSVTGGTKITQQMLDFCAAHKIYPNIEVIPIQKINEALERVVKKDIKYRFVIDIKNSLK

SEQ ID NO: 23337 - DNA, 1207 bp, Arabidopsis thaliana
  misc_feature (1)..(1207): Ceres Seq. ID no. 12324558
  misc_feature (1)..(1207): Ortholog of  Ceres SEQ ID NO 14306201 as cited in SEQ ID NO 59956
aagctttaagcgaatccaaacgctatcgtattaaacgctattactatctgcgttttagctcttcatcttcttctccacttcagatgactttctcgcttaataaaaaaacactaacccaatcaaatccactttaatccttccctctctcgcgtccgattctccgatggctttaacggaggacaaatcagattccgatggtcgacgttggggcaaattcaaacttccatttcgaaactctaattcccaagctccttcagcctcctcgtcctcttccatggctacttcttcttcttctgtaacatcttctcatctaaatcaaaattacattcatcaatctcgccattttcaatatcacggtcctcctgtcgtcgaaggattgggtcaaaaccatcatcaatccgccgccacgatcccttctatgtcatctgtcgcgagatcgcttcttccaacaaaacgccgattaaagcttgatccttcagcaaaactttacttcccttatgagcctgggaagcaagtcaggagtgccattaagattaagaatacgagcaagtcacatgtagcgtttaagtttcaaacaacagtaccaaagagttgcttcatgcgcccggctggtgctattcttgctcccggggaagaaattatcgcaactgttttcaagtttgttgagcctcctgagaataatgaaaagccaatggaacaaaagagcggggttaagtttaaaatcatgagcttgaagatgaaagttccaacagactatatgcctgagctgtttgaggagcaaaaagatcatgtctctgaggagcaagtaatgcgtgtggtattcttggatcccgaaaaccctaactccatgatggagaaattgaagagtcaattggctgaagcggatgctgcagatgaagcacggaaaaaagcatcagagggtattgttggtccaaagccaattggagaagggcttgtgatcgatgaatggaagcaacgccgagagagatatcttgcacaacaacaaggaggagtagacgctgcttgaaacttaaagaccaccaagaccaaaaagtgtgtgtatgtgttttttttttttaattttgtgccgagtcaaaatgtgttgtgtgacgagatagaagattgtatttatgatcaattatcttagtaatcccaaaattatttgcagaggagatcatcgtgtttggtaaatgaaaaggatatttgc

SEQ ID NO: 23338 - protein, 287 aa, Arabidopsis thaliana
  peptide (1)..(287): Ceres Seq. ID no. 12324559
MALTEDKSDSDGRRWGKFKLPFRNSNSQAPSASSSSSMATSSSSVTSSHLNQNYIHQSRHFQYHGPPVVEGLGQNHHQSAATIPSMSSVARSLLPTKRRLKLDPSAKLYFPYEPGKQVRSAIKIKNTSKSHVAFKFQTTVPKSCFMRPAGAILAPGEEIIATVFKFVEPPENNEKPMEQKSGVKFKIMSLKMKVPTDYMPELFEEQKDHVSEEQVMRVVFLDPENPNSMMEKLKSQLAEADAADEARKKASEGIVGPKPIGEGLVIDEWKQRRERYLAQQQGGVDAA

SEQ ID NO: 23339 - protein, 250 aa, Arabidopsis thaliana
  peptide (1)..(250): Ceres Seq. ID no. 12324560
MATSSSSVTSSHLNQNYIHQSRHFQYHGPPVVEGLGQNHHQSAATIPSMSSVARSLLPTKRRLKLDPSAKLYFPYEPGKQVRSAIKIKNTSKSHVAFKFQTTVPKSCFMRPAGAILAPGEEIIATVFKFVEPPENNEKPMEQKSGVKFKIMSLKMKVPTDYMPELFEEQKDHVSEEQVMRVVFLDPENPNSMMEKLKSQLAEADAADEARKKASEGIVGPKPIGEGLVIDEWKQRRERYLAQQQGGVDAA

SEQ ID NO: 23340 - protein, 202 aa, Arabidopsis thaliana
  peptide (1)..(202): Ceres Seq. ID no. 12324561
MSSVARSLLPTKRRLKLDPSAKLYFPYEPGKQVRSAIKIKNTSKSHVAFKFQTTVPKSCFMRPAGAILAPGEEIIATVFKFVEPPENNEKPMEQKSGVKFKIMSLKMKVPTDYMPELFEEQKDHVSEEQVMRVVFLDPENPNSMMEKLKSQLAEADAADEARKKASEGIVGPKPIGEGLVIDEWKQRRERYLAQQQGGVDAA

SEQ ID NO: 23341 - DNA, 1123 bp, Arabidopsis thaliana
  misc_feature (1)..(1123): Ceres Seq. ID no. 12335538
  misc_feature (1)..(1123): Ortholog of  Ceres SEQ ID NO 13599448 as cited in SEQ ID NO 521
  misc_feature (1)..(1123): Ortholog of  Ceres SEQ ID NO 14307472 as cited in SEQ ID NO 54559
  misc_feature (1)..(1123): Ortholog of  Ceres SEQ ID NO 13596408 as cited in SEQ ID NO 62028
actttgtttgcttctattatatccacttccaacaagattcctcaaaaggaaagaagagaaagaagataagagatatctggttggtcggagatggagatgatcggaggagacgatacagatacagagatgtacggagctctagtgacggcacagtccttaaggttgcgtcatcttcaccactgcagagagaaccagtgtacctctgttctcgtcaaatacattcaagctcctgttcatcttgtttggtcactggtgcggagatttgatcagccgcagaaatacaaaccatttataagcagatgcactgtaaatggtgatcctgagatcggttgtctcagagaagtaaatgtcaaatctggtcttccagcaaccaccagtacagagagattggaacagcttgatgatgaagaacacatcctcggtatcaacatcattggtggtgatcatagacttaagaattactcttcgatcttgactgtgcatccggagatgattgatggaaggtcaggaactatggtgatggagtcttttgttgtggatgttcctcaaggcaacaccaaagatgatacatgttacttcgtggaatcactcataaagtgtaacctcaaatccttggcttgtgtctctgaaagattggctgctcaagacattaccaattccatcgcaactttctgtaacgcttccaatggatacagagagaagaatcatacagaaaccaacctttgaagatttggctagattagtcccacgaacaaactcagtgaaggaaatttagattcatagaagcacgtgtgatcatgcttctctgctgctttactcagatcagctccatgggccattttcgagcatgcagtcaaagttttgatgtaatttgttttctggtgtttgttggacagtgtctgtatttacgcaccattgttagaaaaaacagagctaggtagtatctatattatcaccaagagtcgttgcaggaacattttccgtctctgaaatgatgaacccttgccccttcttgtaaaacaatctcacggtttctcaaaaccgacatgtatttggctacggtgtggctatcagaacatatattcgtgtttttgaccactcttataggagctaagcctttctt

SEQ ID NO: 23342 - protein, 211 aa, Arabidopsis thaliana
  peptide (1)..(211): Ceres Seq. ID no. 12335539
MEMIGGDDTDTEMYGALVTAQSLRLRHLHHCRENQCTSVLVKYIQAPVHLVWSLVRRFDQPQKYKPFISRCTVNGDPEIGCLREVNVKSGLPATTSTERLEQLDDEEHILGINIIGGDHRLKNYSSILTVHPEMIDGRSGTMVMESFVVDVPQGNTKDDTCYFVESLIKCNLKSLACVSERLAAQDITNSIATFCNASNGYREKNHTETNL

SEQ ID NO: 23343 - protein, 209 aa, Arabidopsis thaliana
  peptide (1)..(209): Ceres Seq. ID no. 12335540
MIGGDDTDTEMYGALVTAQSLRLRHLHHCRENQCTSVLVKYIQAPVHLVWSLVRRFDQPQKYKPFISRCTVNGDPEIGCLREVNVKSGLPATTSTERLEQLDDEEHILGINIIGGDHRLKNYSSILTVHPEMIDGRSGTMVMESFVVDVPQGNTKDDTCYFVESLIKCNLKSLACVSERLAAQDITNSIATFCNASNGYREKNHTETNL

SEQ ID NO: 23344 - protein, 199 aa, Arabidopsis thaliana
  peptide (1)..(199): Ceres Seq. ID no. 12335541
MYGALVTAQSLRLRHLHHCRENQCTSVLVKYIQAPVHLVWSLVRRFDQPQKYKPFISRCTVNGDPEIGCLREVNVKSGLPATTSTERLEQLDDEEHILGINIIGGDHRLKNYSSILTVHPEMIDGRSGTMVMESFVVDVPQGNTKDDTCYFVESLIKCNLKSLACVSERLAAQDITNSIATFCNASNGYREKNHTETNL

SEQ ID NO: 23345 - DNA, 1271 bp, Arabidopsis thaliana
  misc_feature (1)..(1271): Ceres Seq. ID no. 12335844
  misc_feature (1)..(1271): Ortholog of  Ceres SEQ ID NO 15170609 as cited in SEQ ID NO 52683
aagaacaacagaaaatttcaaaatggtttctcagataatctcgtgtttatctcaatcttcgtctcttctatgtttatccgattcaaggaggttaattcttccgaagacttgtacttacggcggtttgagccggttttctccaggatttgctagccgccggttatttacggttaatcggaagaaatggagatcggcctgcattttcaactctggaaaggaacctggaggagagggaaagttacaaggaggtagctcagagtggccgatacttcagagatgggaagttccatggggatggcagacagtttcgttaacttcgtttgcttgtgcactaaggcagttttgttttgacaggattaaccgagatggcagtcataccgtttttaggaatcgacgttgagaaactgaccttggacgataaggcggagattttgttcctggatcaaggcctaacaaccgcggtggtacttgctgtcatattcactgttgccaaaaccttcgacccacttcctgaagatattcttcgctatgatttgagacaacccgtcaacctgcaaaaaggatggcttgtgtggggtggaatcggtctggttggtgctgttggtgctattgcgttaacaggtgttgttttatccgtgttcaggacagaagcacctgaaagggaggtagactctttgatgaagcttcttccattaattggatcctcaaacataagcaccttaagcttagtgggcataactggaatccttgctccacttctggaggagaccgtgtttcgcggattcttcatggtctctcttaccaaatgggtcccgaccccaatagcgatcatcatcagctcagctgcgtttgcccttgcccatttcacacctggtgaattcccgcagctgtttattctaggaagtgttttgggattatcatatgcacaaacccgcaatctcattaccccaatggtcatacacggtttctggaactcgggagttattttgctactcacttttcttcagatccaagggtatgacattaaggagctattgcaggcaaactagctctgagccatgctctttgtgctgtccgcatttaacatcaaaaagcttcattatgtgctcgatgttagtaagatattttgtattcgagaacagatttcatacttaatgcaatttgggttttggtagagttatctttattacaacatcatgacagtaatgtatgaactaatatggtagagatgaatctttttggaacaaaaaacaaatttatttacacagatt

SEQ ID NO: 23346 - protein, 227 aa, Arabidopsis thaliana
  peptide (1)..(227): Ceres Seq. ID no. 12335845
MAVIPFLGIDVEKLTLDDKAEILFLDQGLTTAVVLAVIFTVAKTFDPLPEDILRYDLRQPVNLQKGWLVWGGIGLVGAVGAIALTGVVLSVFRTEAPEREVDSLMKLLPLIGSSNISTLSLVGITGILAPLLEETVFRGFFMVSLTKWVPTPIAIIISSAAFALAHFTPGEFPQLFILGSVLGLSYAQTRNLITPMVIHGFWNSGVILLLTFLQIQGYDIKELLQAN

SEQ ID NO: 23347 - protein, 132 aa, Arabidopsis thaliana
  peptide (1)..(132): Ceres Seq. ID no. 12335846
RTTENFKMVSQIISCLSQSSSLLCLSDSRRLILPKTCTYGGLSRFSPGFASRRLFTVNRKKWRSACIFNSGKEPGGEGKLQGGSSEWPILQRWEVPWGWQTVSLTSFACALRQFCFDRINRDGSHTVFRNRR

SEQ ID NO: 23348 - protein, 125 aa, Arabidopsis thaliana
  peptide (1)..(125): Ceres Seq. ID no. 12335847
MVSQIISCLSQSSSLLCLSDSRRLILPKTCTYGGLSRFSPGFASRRLFTVNRKKWRSACIFNSGKEPGGEGKLQGGSSEWPILQRWEVPWGWQTVSLTSFACALRQFCFDRINRDGSHTVFRNRR

SEQ ID NO: 23349 - DNA, 774 bp, Arabidopsis thaliana
  misc_feature (1)..(774): Ceres Seq. ID no. 12394701
  misc_feature (1)..(774): Ortholog of  Ceres SEQ ID NO 13595021 as cited in SEQ ID NO 55815
atcatcaaaacataccaataagcaatttgctcattagagaacagagaaaaaaaaaacaatggcaactcaagccgccgggatcttcaactccgccataacaaccgccgcaacctccggcgtcaagaaactccactttttctcaacaacccaccgtcccaaatccctctccttcaccaaaaccgcaatccgcgccgagaaaacagattcctccgccgccgctgctgcagcccccgccacgaaagaagctcccgtgggattcacgccaccgcagctagacccaaacacaccgtctccgatcttcgctggaagcaccggtggtcttctacgtaaagcgcaagtggaagagttctacgttatcacgtggaactcaccgaaagaacagatctttgagatgccgacaggaggagcagcgatcatgagagaaggtccgaatcttctgaagctagcgaggaaagagcagtgtttagctttggggacaaggcttagatccaagtacaagatcacttaccagttttacagagtgtttcctaacggtgaggttcaatatcttcatcctaaagatggtgtttatccagagaaggcgaatccaggaagagaaggtgttggtctcaacatgagatctattgggaaaaatgttagtcccattgaagttaagtttactggcaaacaaagttatgatttgtaagatctgtaaactaaaaaaaccaaaaactatgtgcatgtggtgatgattatgactatgtttcatgttaatttttaatagattttgttttg

SEQ ID NO: 23350 - protein, 208 aa, Arabidopsis thaliana; identical to SEQ ID NO: 21188
  peptide (1)..(208): Ceres Seq. ID no. 12394702

SEQ ID NO: 23351 - DNA, 2006 bp, Arabidopsis thaliana
  misc_feature (1)..(2006): Ceres Seq. ID no. 13488387
  misc_feature (1)..(2006): Ortholog of  Ceres SEQ ID NO 12613725 as cited in SEQ ID NO 68196
aagtcgccgggaaaagtaaaataaaaagccgtcacgtctccgataaataatagagtatcgttagataggtagcttcaacgtaaggaatctaaattggttcagctcaaaaaacgaaaacgatgggttccatcgaagaagaagcaagacctctcatcgaagaaggtttaattttacaggaagtgaaattgtatgctgaagatggttcagtggactttaatggaaacccaccattgaaggagaaaacaggaaactggaaagcttgtccttttattcttggtaatgaatgttgtgagaggctagcttactatggtattgctgggaatttaatcacttacctcaccactaagcttcaccaaggaaatgtttctgctgctacaaacgttaccacatggcaagggacttgttatctcactcctctcattggagctgttctggctgatgcttactggggacgttactggaccatcgcttgtttctccgggatttatttcatcgggatgtctgcgttaactctttcagcttcagttccggcattgaagccagcggaatgtattggtgacttttgtccatctgcaacgccagctcagtatgcgatgttctttggtgggctttacctgatcgctcttggaactggaggtatcaaaccgtgtgtctcatccttcggtgccgatcagtttgatgacacggactctcgggaacgagttagaaaagcttcgttctttaactggttttacttctccatcaatattggagcacttgtgtcatctagtcttctagtttggattcaagagaatcgcgggtggggtttagggtttgggataccaacagtgttcatgggactagccattgcaagtttcttctttggcacacctctttataggtttcagaaacctggaggaagccctataactcggatttcccaagtcgtggttgcttcgttccggaaatcgtctgtcaaagtccctgaagacgccacacttctgtatgaaactcaagacaagaactctgctattgctggaagtagaaaaatcgagcataccgatgattgccagtatcttgacaaagccgctgttatctcagaagaagaatcgaaatccggagattattccaactcgtggagactatgcacggttacgcaagtcgaagaactcaagattctgatccgaatgttcccaatctgggcttctggtatcattttctcagctgtatacgcacaaatgtccacaatgtttgttcaacaaggccgagccatgaactgcaaaattggatcattccagcttcctcctgcagcactcgggacattcgacacagcaagcgtcatcatctgggtgccgctctacgaccggttcatcgttcccttagcaagaaagttcacaggagtagacaaaggattcactgagatacaaagaatgggaattggtctgtttgtctctgttctctgtatggcagctgcagctatcgtcgaaatcatccgtctccatatggccaacgatcttggattagtcgagtcaggagccccagttcccatatccgtcttgtggcagattccacagtacttcattctcggtgcagccgaagtattctacttcatcggtcagctcgagttcttctacgaccaatctccagatgcaatgagaagcttgtgcagtgccttagctcttttgaccaatgcacttggtaactacttgagctcgttgatcctcacgctcgtgacttattttacaacaagaaatgggcaagaaggttggatttcggataatctcaattcaggtcatctcgattacttcttctggctcttggctggtcttagccttgtgaacatggcggtttacttcttctctgctgctaggtataagcaaaagaaagcttcgtcgtagtaatgctgttatctatctactttcattacatacaaaagtttgtttctttcaactgtaactgtctctgtatcaataacaacattgctgtgtacttttcctttcaatttcaaaagtttaagtcgcatttgc

SEQ ID NO: 23352 - protein, 585 aa, Arabidopsis thaliana
  peptide (1)..(585): Ceres Seq. ID no. 13488388
MGSIEEEARPLIEEGLILQEVKLYAEDGSVDFNGNPPLKEKTGNWKACPFILGNECCERLAYYGIAGNLITYLTTKLHQGNVSAATNVTTWQGTCYLTPLIGAVLADAYWGRYWTIACFSGIYFIGMSALTLSASVPALKPAECIGDFCPSATPAQYAMFFGGLYLIALGTGGIKPCVSSFGADQFDDTDSRERVRKASFFNWFYFSINIGALVSSSLLVWIQENRGWGLGFGIPTVFMGLAIASFFFGTPLYRFQKPGGSPITRISQVVVASFRKSSVKVPEDATLLYETQDKNSAIAGSRKIEHTDDCQYLDKAAVISEEESKSGDYSNSWRLCTVTQVEELKILIRMFPIWASGIIFSAVYAQMSTMFVQQGRAMNCKIGSFQLPPAALGTFDTASVIIWVPLYDRFIVPLARKFTGVDKGFTEIQRMGIGLFVSVLCMAAAAIVEIIRLHMANDLGLVESGAPVPISVLWQIPQYFILGAAEVFYFIGQLEFFYDQSPDAMRSLCSALALLTNALGNYLSSLILTLVTYFTTRNGQEGWISDNLNSGHLDYFFWLLAGLSLVNMAVYFFSAARYKQKKASS

SEQ ID NO: 23353 - protein, 459 aa, Arabidopsis thaliana
  peptide (1)..(459): Ceres Seq. ID no. 13488389
MSALTLSASVPALKPAECIGDFCPSATPAQYAMFFGGLYLIALGTGGIKPCVSSFGADQFDDTDSRERVRKASFFNWFYFSINIGALVSSSLLVWIQENRGWGLGFGIPTVFMGLAIASFFFGTPLYRFQKPGGSPITRISQVVVASFRKSSVKVPEDATLLYETQDKNSAIAGSRKIEHTDDCQYLDKAAVISEEESKSGDYSNSWRLCTVTQVEELKILIRMFPIWASGIIFSAVYAQMSTMFVQQGRAMNCKIGSFQLPPAALGTFDTASVIIWVPLYDRFIVPLARKFTGVDKGFTEIQRMGIGLFVSVLCMAAAAIVEIIRLHMANDLGLVESGAPVPISVLWQIPQYFILGAAEVFYFIGQLEFFYDQSPDAMRSLCSALALLTNALGNYLSSLILTLVTYFTTRNGQEGWISDNLNSGHLDYFFWLLAGLSLVNMAVYFFSAARYKQKKASS

SEQ ID NO: 23354 - protein, 427 aa, Arabidopsis thaliana
  peptide (1)..(427): Ceres Seq. ID no. 13488390
MFFGGLYLIALGTGGIKPCVSSFGADQFDDTDSRERVRKASFFNWFYFSINIGALVSSSLLVWIQENRGWGLGFGIPTVFMGLAIASFFFGTPLYRFQKPGGSPITRISQVVVASFRKSSVKVPEDATLLYETQDKNSAIAGSRKIEHTDDCQYLDKAAVISEEESKSGDYSNSWRLCTVTQVEELKILIRMFPIWASGIIFSAVYAQMSTMFVQQGRAMNCKIGSFQLPPAALGTFDTASVIIWVPLYDRFIVPLARKFTGVDKGFTEIQRMGIGLFVSVLCMAAAAIVEIIRLHMANDLGLVESGAPVPISVLWQIPQYFILGAAEVFYFIGQLEFFYDQSPDAMRSLCSALALLTNALGNYLSSLILTLVTYFTTRNGQEGWISDNLNSGHLDYFFWLLAGLSLVNMAVYFFSAARYKQKKASS

SEQ ID NO: 23355 - DNA, 1396 bp, Arabidopsis thaliana
  misc_feature (1)..(1396): Ceres Seq. ID no. 13493873
  misc_feature (1)..(1396): Ortholog of  Ceres SEQ ID NO 15169316 as cited in SEQ ID NO 54821
  misc_feature (1)..(1396): Ortholog of  Ceres SEQ ID NO 13598294 as cited in SEQ ID NO 61982
atcaaagtataaagtaaaaacaaagactcgagttaatatgtctagtactgaagaaatgtcatcagtcaaaaacacaactcaggttattggcgttgacccatcctccaccgtacgagttaccatcgttcaatcttccaccgtctataatgataccccggccactttagacaaggcggagaagtttattgtggaggcggcgagcaaaggagcgaagttggtgttgtttcccgaggcgttcatcggcggttatcctcgaggttttaggtttggtttagcggtgggagttcataacgaagaagggcgtgatgagtttcgtaactaccatgcttctgctattaaagtccctggccctgaagtggaaagattggctgagttggccgggaaaaataatgtgcacttggtaatgggggctatagagaaggatggttatacactctattgcacagctcttttcttcagtccacaaggtcagtttttaggtaagcaccgtaaagtcatgcccacatctttggaacgttgcatatggggtcaaggggacggatcaaccatccccgtttacgacactcctattggcaaaatcggtgctgctatttgctgggagaataggatgcccctctacagaactgcattgtacgctaaaggcattgagatttattgtgcacctactgctgattattcgttggaatggcaagcatcgatgattcacattgcggtagaaggtggatgtttcgtgttgtcagcgcaccagttctgcaagcgtagagagttccctgaacatcctgattacttgtttaatgacatagtagacactaaagaacatgatcctactgtctccggaggtggaagtgtcattatttcacctttgggaaaggttctcgccggaccaaactatgaatcagagggtctcgtcacagctgatcttgatcttggtgatatagcaagagccaagttatacttcgatgtggttggacattactcaaagccagatatttttaacttgaccgtaaatgagcacccgaagaaaccggttacattcatgacgaaggtcgagaaagcagaggatgaatcaaacaaatagtcaagatttgcaattcgtctactgaagttaagtcaagttcgaaatgtttttttttcagttttaaagttgatgttcaagtttatttttctttctcttcaataatgtaagaggactatttcgatatgttaaaataaaaccaattggttctctcctcttgtattcaattgtcgtgtaataatgttttgttcaattcgagtgttgattaagttgtattctttatttttcctttgcatgtcaaacacagattttttgctgtttaaataagttgctagctaagtctagatgtgagtttgaaaagtcactacaaaactacttaat

SEQ ID NO: 23356 - protein, 358 aa, Arabidopsis thaliana
  peptide (1)..(358): Ceres Seq. ID no. 13493874
SKYKVKTKTRVNMSSTEEMSSVKNTTQVIGVDPSSTVRVTIVQSSTVYNDTPATLDKAEKFIVEAASKGAKLVLFPEAFIGGYPRGFRFGLAVGVHNEEGRDEFRNYHASAIKVPGPEVERLAELAGKNNVHLVMGAIEKDGYTLYCTALFFSPQGQFLGKHRKVMPTSLERCIWGQGDGSTIPVYDTPIGKIGAAICWENRMPLYRTALYAKGIEIYCAPTADYSLEWQASMIHIAVEGGCFVLSAHQFCKRREFPEHPDYLFNDIVDTKEHDPTVSGGGSVIISPLGKVLAGPNYESEGLVTADLDLGDIARAKLYFDVVGHYSKPDIFNLTVNEHPKKPVTFMTKVEKAEDESNK

SEQ ID NO: 23357 - protein, 346 aa, Arabidopsis thaliana
  peptide (1)..(346): Ceres Seq. ID no. 13493875
MSSTEEMSSVKNTTQVIGVDPSSTVRVTIVQSSTVYNDTPATLDKAEKFIVEAASKGAKLVLFPEAFIGGYPRGFRFGLAVGVHNEEGRDEFRNYHASAIKVPGPEVERLAELAGKNNVHLVMGAIEKDGYTLYCTALFFSPQGQFLGKHRKVMPTSLERCIWGQGDGSTIPVYDTPIGKIGAAICWENRMPLYRTALYAKGIEIYCAPTADYSLEWQASMIHIAVEGGCFVLSAHQFCKRREFPEHPDYLFNDIVDTKEHDPTVSGGGSVIISPLGKVLAGPNYESEGLVTADLDLGDIARAKLYFDVVGHYSKPDIFNLTVNEHPKKPVTFMTKVEKAEDESNK

SEQ ID NO: 23358 - protein, 340 aa, Arabidopsis thaliana
  peptide (1)..(340): Ceres Seq. ID no. 13493876
MSSVKNTTQVIGVDPSSTVRVTIVQSSTVYNDTPATLDKAEKFIVEAASKGAKLVLFPEAFIGGYPRGFRFGLAVGVHNEEGRDEFRNYHASAIKVPGPEVERLAELAGKNNVHLVMGAIEKDGYTLYCTALFFSPQGQFLGKHRKVMPTSLERCIWGQGDGSTIPVYDTPIGKIGAAICWENRMPLYRTALYAKGIEIYCAPTADYSLEWQASMIHIAVEGGCFVLSAHQFCKRREFPEHPDYLFNDIVDTKEHDPTVSGGGSVIISPLGKVLAGPNYESEGLVTADLDLGDIARAKLYFDVVGHYSKPDIFNLTVNEHPKKPVTFMTKVEKAEDESNK

SEQ ID NO: 23359 - DNA, 1252 bp, Arabidopsis thaliana
  misc_feature (1)..(1252): Ceres Seq. ID no. 12338760
  misc_feature (1)..(1252): Ortholog of  Ceres SEQ ID NO 12608620 as cited in SEQ ID NO 60192
  misc_feature (1)..(1252): Ortholog of  Ceres SEQ ID NO 13662898 as cited in SEQ ID NO 66199
  misc_feature (1)..(1252): Ortholog of  Ceres SEQ ID NO 14313358 as cited in SEQ ID NO 67347
  misc_feature (1)..(1252): Ortholog of  Ceres SEQ ID NO 13654314 as cited in SEQ ID NO 67914
atagctaaaactcacaaactagagcttcaagagttagaagaggcttcaagagctctatctctctcttaatttctcttggcctttgatactttttcccgctcataagttttttcgatagtccgaccaaacaaagggagagaaaactaatcaagaaacatcaagaaatggctctaactaacaatttatgggcatttgtgtttggaatcttgggtaacatcatatcattcgtcgtgttcttggccccagtgcccacttttgtaaggatatgcaagaagaaatcaaccgaaggttttcagtctctaccctatgtttcagcactttttagcgcgatgctttggatttactacgctatgcaaaaagatggcacagcctttcttctcatcaccataaacgcttttggatgcgtcatcgaaaccatctacatcgtcctctttgtctcctatgctaacaagaaaactagaatatccactttgaaagttcttggtctcttgaactttttgggatttgccgccattgttcttgtctgcgagctcttaaccaaaggttcaacacgtgagaaagttctcggagggatttgcgttggattttccgtcagtgttttcgcagctcctttgagtatcatgagagtggtggtacgaacaagaagtgtggagtttatgcctttctctttatcgttgtttcttacaattagcgccgtcacgtggctcttctacggtctcgctattaaagacttctacgttgcccttccaaatgtattaggcgcgttcttaggagctgttcaaatgattctctacataattttcaaatactacaaaactcctgtggctcagaagacagataaatccaaagacgtgtccgatcattccatcgacatagcaaagctaacgaccgtcatacccggtgcagttttggattccgcggttcatcaaccgcctgctcttcacaatgttcccgagactaaaattcaattgaccgaggtcaagagccagaacatgaccgatccgaaagaccagatcaacaaggatgtccagaaacaaagtcaagtttaagtagtgaatcttatttagagcctcattaataatgcattgtttgagttgtgcactctagctaactttccttttactgtagctttttggattttgtggtctttgtctctttaattagttttcttgtaccactttttatttctcatcattttcattccagggtatctggaaattgtgctatatatgatcaataaataagttgtttt

SEQ ID NO: 23360 - protein, 294 aa, Arabidopsis thaliana
  peptide (1)..(294): Ceres Seq. ID no. 12338761
MALTNNLWAFVFGILGNIISFVVFLAPVPTFVRICKKKSTEGFQSLPYVSALFSAMLWIYYAMQKDGTAFLLITINAFGCVIETIYIVLFVSYANKKTRISTLKVLGLLNFLGFAAIVLVCELLTKGSTREKVLGGICVGFSVSVFAAPLSIMRVVVRTRSVEFMPFSLSLFLTISAVTWLFYGLAIKDFYVALPNVLGAFLGAVQMILYIIFKYYKTPVAQKTDKSKDVSDHSIDIAKLTTVIPGAVLDSAVHQPPALHNVPETKIQLTEVKSQNMTDPKDQINKDVQKQSQV

SEQ ID NO: 23361 - protein, 239 aa, Arabidopsis thaliana
  peptide (1)..(239): Ceres Seq. ID no. 12338762
MLWIYYAMQKDGTAFLLITINAFGCVIETIYIVLFVSYANKKTRISTLKVLGLLNFLGFAAIVLVCELLTKGSTREKVLGGICVGFSVSVFAAPLSIMRVVVRTRSVEFMPFSLSLFLTISAVTWLFYGLAIKDFYVALPNVLGAFLGAVQMILYIIFKYYKTPVAQKTDKSKDVSDHSIDIAKLTTVIPGAVLDSAVHQPPALHNVPETKIQLTEVKSQNMTDPKDQINKDVQKQSQV

SEQ ID NO: 23362 - protein, 232 aa, Arabidopsis thaliana
  peptide (1)..(232): Ceres Seq. ID no. 12338764
MQKDGTAFLLITINAFGCVIETIYIVLFVSYANKKTRISTLKVLGLLNFLGFAAIVLVCELLTKGSTREKVLGGICVGFSVSVFAAPLSIMRVVVRTRSVEFMPFSLSLFLTISAVTWLFYGLAIKDFYVALPNVLGAFLGAVQMILYIIFKYYKTPVAQKTDKSKDVSDHSIDIAKLTTVIPGAVLDSAVHQPPALHNVPETKIQLTEVKSQNMTDPKDQINKDVQKQSQV

SEQ ID NO: 23363 - DNA, 1298 bp, Arabidopsis thaliana
  misc_feature (1)..(1298): Ceres Seq. ID no. 12340096
  misc_feature (1)..(1298): Ortholog of  Ceres SEQ ID NO 13582285 as cited in SEQ ID NO 59817
gagattggaatgtttgtatcatggttggcaatttgaaggagagggcaaatgtgtcaagattcctcagcttcctgcaagtgctaagattccaaaggctgcttgtgtgaagacgtatgaggtgaaggattcacaaggagttgtgtgggtgtggatgtcaacaaagacacctccaaaccctgagaagcttccttggtttgagaatttcgctagacccggttttttcgacatttcgactactcatgagcttccttatgaccattccattcttttagagaatctgatggatcctgctcatgttcctatctctcatgatagaacggatttcactgctaaaagagaagatgctcagcctttggttttcgaggtcacagagcgaagtaatcggggtttcgcagggacttggggccgagagaaagaaggtgggaaagggagtaatttacttcggtttggtgctccttgtgttctgcagaacaatcgagagttcgaggggaaggatggagtgaagaactatttttcagggctgtttctttgtagacctacagggcaagggaagtctatgcttattgttaggtttggggtcacaaaaagatcgcctttggtttcggtgttacctcaatgtttctggcatcagaatgcctgcaaggtttttgaacaagacatggggtttctatcgtctcaaaacgaggttctgatgaaggagaaagtaccaactaaggacttgtatttgaatctaaagtcatcggacacatgggtcgctgaatatagaaagtggatggacaaagttggtcatgggatgccttaccatttcgggcataggaccatatctctccccaaagtccctcctgtcgtggaacatgccccggcagggctcattgcagctctctctgcttcttaccctgcaaaaggcggaattgggactatgcatgctcccaatttggctaaccggtacttcagacatattattcattgtagaagctgcagcaatgtgatcaaatcttttgagctctggaaaaatatcctctctgccacggcagtggctttgacggctttggccattctggtggttagtagacagtggaaggctgtcctgttaggttcagcagcattgtgctcagccgcagcttatacctgcttaagagctataaatctaaacaccaataacttcattagaacacacagaagactatgaaaatgtatagtgtcatgtttcctcttcttccaacaatatgtatttcatgaaataaatttttgcttgtaaacgcaattatataattcagaaggttccaatgtttgccacc

SEQ ID NO: 23364 - protein, 395 aa, Arabidopsis thaliana
  peptide (1)..(395): Ceres Seq. ID no. 12340097
RLECLYHGWQFEGEGKCVKIPQLPASAKIPKAACVKTYEVKDSQGVVWVWMSTKTPPNPEKLPWFENFARPGFFDISTTHELPYDHSILLENLMDPAHVPISHDRTDFTAKREDAQPLVFEVTERSNRGFAGTWGREKEGGKGSNLLRFGAPCVLQNNREFEGKDGVKNYFSGLFLCRPTGQGKSMLIVRFGVTKRSPLVSVLPQCFWHQNACKVFEQDMGFLSSQNEVLMKEKVPTKDLYLNLKSSDTWVAEYRKWMDKVGHGMPYHFGHRTISLPKVPPVVEHAPAGLIAALSASYPAKGGIGTMHAPNLANRYFRHIIHCRSCSNVIKSFELWKNILSATAVALTALAILVVSRQWKAVLLGSAALCSAAAYTCLRAINLNTNNFIRTHRRL

SEQ ID NO: 23365 - protein, 345 aa, Arabidopsis thaliana
  peptide (1)..(345): Ceres Seq. ID no. 12340098
MSTKTPPNPEKLPWFENFARPGFFDISTTHELPYDHSILLENLMDPAHVPISHDRTDFTAKREDAQPLVFEVTERSNRGFAGTWGREKEGGKGSNLLRFGAPCVLQNNREFEGKDGVKNYFSGLFLCRPTGQGKSMLIVRFGVTKRSPLVSVLPQCFWHQNACKVFEQDMGFLSSQNEVLMKEKVPTKDLYLNLKSSDTWVAEYRKWMDKVGHGMPYHFGHRTISLPKVPPVVEHAPAGLIAALSASYPAKGGIGTMHAPNLANRYFRHIIHCRSCSNVIKSFELWKNILSATAVALTALAILVVSRQWKAVLLGSAALCSAAAYTCLRAINLNTNNFIRTHRRL

SEQ ID NO: 23366 - protein, 302 aa, Arabidopsis thaliana
  peptide (1)..(302): Ceres Seq. ID no. 12340099
MDPAHVPISHDRTDFTAKREDAQPLVFEVTERSNRGFAGTWGREKEGGKGSNLLRFGAPCVLQNNREFEGKDGVKNYFSGLFLCRPTGQGKSMLIVRFGVTKRSPLVSVLPQCFWHQNACKVFEQDMGFLSSQNEVLMKEKVPTKDLYLNLKSSDTWVAEYRKWMDKVGHGMPYHFGHRTISLPKVPPVVEHAPAGLIAALSASYPAKGGIGTMHAPNLANRYFRHIIHCRSCSNVIKSFELWKNILSATAVALTALAILVVSRQWKAVLLGSAALCSAAAYTCLRAINLNTNNFIRTHRRL

SEQ ID NO: 23367 - DNA, 1285 bp, Arabidopsis thaliana
  misc_feature (1)..(1285): Ceres Seq. ID no. 12422321
  misc_feature (1)..(1285): Ortholog of  Ceres SEQ ID NO 15178007 as cited in SEQ ID NO 54186
  misc_feature (1)..(1285): Ortholog of  Ceres SEQ ID NO 14314100 as cited in SEQ ID NO 68860
accgttttggtcaatcctttgaatctctcctaataaaaccctaaaagatcatcatcatcatcgtcgtcgtcgtcccgctcaatggatactcgtcgcggagctcttgcggttcctaaagtccgtcgagtaggtttcttcacatcaatcgagccgcctccagaatcatcattacaacgaccaaatcgaagccaatccggtccagtagatgcaaccacctcttcttctcctctctccgattcaccttccggtaacttaatttctccggtcttaattccaccgtcgcgtcaccattccgacaatttaacctctcgcgttgctgctgctgctgctgctcctgtgcccgtccctggacctgcagctttccgccgatacttaactcctgaacggactcttcttcacgttggtagttacaatcctccggattcgcttctcgggacatcatcaccctcgagtaacggagggctttctgaggattcggcttctctgtttgggttccaacggagtgattcgacgaaattatcagcaagcttacctaatggaggctttgatttgactctagctgttagagctcctcaggaatctgaaaccaaaattgcgaccacgtctgcttctcaagggaaaaagaagatcgccgaagtttctggaaagagtgagtctgcgaccacaaaaccccagaaggaaaaggaaccaaaagcattgaaagataaaaccactaaagcagaaagacgtgccatccaagaggcacaacgggcagcaaaagctgctgcaaaaggcgaaggaagcaggcgtgcagatgagtctggtagagctaatcctggcaaggctgccataaagccccaaccaaagaaagaaagacttcccgtcacgtcctctgtttctgaaaaaacagctgtagcagtagaaaaagagaagaggatggatgtccctcagacacaaatgcagtatgatgataaaagccgagtggataaagctaagaggcgagctgtggttgaacagaccgagagcaagaacaaagttgaattatttctccatcttcctcaatacgaacgcagcaatcagcttcccaatttaagctccaattttttcacactcgattccatacaccatgcagtctataaggtgggtttgcaacatttggctggagatatatctggggacaatgcacgatgtattgccatgctccaagcatttcaagaagctatagaagattacagtacacctcctatgaaagacctgaccatggacttgacagccaagataaacggttatgtttcattcttgatag

SEQ ID NO: 23368 - protein, 401 aa, Arabidopsis thaliana
  peptide (1)..(401): Ceres Seq. ID no. 12422322
MDTRRGALAVPKVRRVGFFTSIEPPPESSLQRPNRSQSGPVDATTSSSPLSDSPSGNLISPVLIPPSRHHSDNLTSRVAAAAAAPVPVPGPAAFRRYLTPERTLLHVGSYNPPDSLLGTSSPSSNGGLSEDSASLFGFQRSDSTKLSASLPNGGFDLTLAVRAPQESETKIATTSASQGKKKIAEVSGKSESATTKPQKEKEPKALKDKTTKAERRAIQEAQRAAKAAAKGEGSRRADESGRANPGKAAIKPQPKKERLPVTSSVSEKTAVAVEKEKRMDVPQTQMQYDDKSRVDKAKRRAVVEQTESKNKVELFLHLPQYERSNQLPNLSSNFFTLDSIHHAVYKVGLQHLAGDISGDNARCIAMLQAFQEAIEDYSTPPMKDLTMDLTAKINGYVSFLI

SEQ ID NO: 23369 - DNA, 969 bp, Arabidopsis thaliana
  misc_feature (1)..(969): Ceres Seq. ID no. 12482521
  misc_feature (1)..(969): Ortholog of  Ceres SEQ ID NO 14308727 as cited in SEQ ID NO 58726
  misc_feature (1)..(969): Ortholog of  Ceres SEQ ID NO 13663517 as cited in SEQ ID NO 66850
aagattttccagatcttaaattctctcctcccccaattccatcttcgcaaattctccagattcttccgtcaatctttgagtttggtagagaaatggatcaacaaggacaatcatcagctatgaactatggttcaaacccatatcaaaccaacgccatgaccactacaccaaccggttcagaccatccagcttaccatcagatccaccagcaacaacaacaacagctcactcaacagcttcaatctttctgggagactcaattcaaagagattgagaaaaccactgatttcaagaaccatagccttccattggcaagaatcaagaaaatcatgaaagctgatgaagatgtgcgtatgatctcggccgaggcgcctgttgtgttcgccagggcctgcgagatgtttattctggagcttacgttaaggtcttggaaccatactgaggagaacaagagaaggacgttgcagaagaatgatatcgcggctgcggtgactagaactgatatttttgattttcttgtggatattgttcctcgggaggatcttcgtgatgaagtcttgggtggtgttggtgctgaagctgctacagctgcgggttatccgtatggatacttgcctcctggaacagctccaattgggaacccgggaatggttatgggtaacccgggcgcgtatccgccgaacccgtatatgggtcagccaatgtggcaacaaccaggacctgagcagcaggatcctgacaattagcttggcctaataaactagccgtctaattcgaagctctccccggtggatctactcaagaagaagaatgttaatagaaaactattgcgacataaaaagtttggtgtagtagaataatttctgttttatgatccatggatttatctattgttattcagtttggtttatcttgtcatcaaactgttttcggtcaatgtaacaaattcataaactgagaattgaactt

SEQ ID NO: 23370 - protein, 247 aa, Arabidopsis thaliana
  peptide (1)..(247): Ceres Seq. ID no. 12482522
DFPDLKFSPPPIPSSQILQILPSIFEFGREMDQQGQSSAMNYGSNPYQTNAMTTTPTGSDHPAYHQIHQQQQQQLTQQLQSFWETQFKEIEKTTDFKNHSLPLARIKKIMKADEDVRMISAEAPVVFARACEMFILELTLRSWNHTEENKRRTLQKNDIAAAVTRTDIFDFLVDIVPREDLRDEVLGGVGAEAATAAGYPYGYLPPGTAPIGNPGMVMGNPGAYPPNPYMGQPMWQQPGPEQQDPDN

SEQ ID NO: 23371 - protein, 217 aa, Arabidopsis thaliana
  peptide (1)..(217): Ceres Seq. ID no. 12482523
MDQQGQSSAMNYGSNPYQTNAMTTTPTGSDHPAYHQIHQQQQQQLTQQLQSFWETQFKEIEKTTDFKNHSLPLARIKKIMKADEDVRMISAEAPVVFARACEMFILELTLRSWNHTEENKRRTLQKNDIAAAVTRTDIFDFLVDIVPREDLRDEVLGGVGAEAATAAGYPYGYLPPGTAPIGNPGMVMGNPGAYPPNPYMGQPMWQQPGPEQQDPDN

SEQ ID NO: 23372 - protein, 208 aa, Arabidopsis thaliana
  peptide (1)..(208): Ceres Seq. ID no. 12482524
MNYGSNPYQTNAMTTTPTGSDHPAYHQIHQQQQQQLTQQLQSFWETQFKEIEKTTDFKNHSLPLARIKKIMKADEDVRMISAEAPVVFARACEMFILELTLRSWNHTEENKRRTLQKNDIAAAVTRTDIFDFLVDIVPREDLRDEVLGGVGAEAATAAGYPYGYLPPGTAPIGNPGMVMGNPGAYPPNPYMGQPMWQQPGPEQQDPDN

SEQ ID NO: 23373 - DNA, 1827 bp, Arabidopsis thaliana
  misc_feature (1)..(1827): Ceres Seq. ID no. 13504796
  misc_feature (1)..(1827): Ortholog of  Ceres SEQ ID NO 14303366 as cited in SEQ ID NO 54418
  misc_feature (1)..(1827): Ortholog of  Ceres SEQ ID NO 13503610 as cited in SEQ ID NO 62416
  misc_feature (1)..(1827): Ortholog of  Ceres SEQ ID NO 13657610 as cited in SEQ ID NO 66165
  misc_feature (1)..(1827): Ortholog of  Ceres SEQ ID NO 13598312 as cited in SEQ ID NO 68448
  misc_feature (1)..(1827): Ortholog of  Ceres SEQ ID NO 13596100 as cited in SEQ ID NO 68573
attaactcatcttcaaaaataccctaatcacattttgtaacaataatacaattatacattaaaactctccgacgatgcctcaggcaccgatgccagagttctctagctcggtgaagctcaagtacgtgaaacttggttaccaatatttggttaaccatttcttgagttttcttttgatcccgatcatggctattgtcgccgttgagcttcttcggatgggtcctgaagagatccttaatgtttggaattcactccagtttgacctagttcaggttctatgttcttccttctttgtcatcttcatctccactgtttacttcatgtccaagccacgcaccatctacctcgttgactattcttgttacaagccacctgtcacgtgtcgtgtccccttcgcaactttcatggaacactctcgtttgatcctcaaggacaagcctaagagcgtcgagttccaaatgagaatccttgaacgttctggcctcggtgaggagacttgtctccctccggctattcattatattcctcccacaccaaccatggacgcggctagaagcgaggctcagatggttatcttcgaggctatggacgatcttttcaagaaaaccggtcttaaacctaaagacgtcgacatccttatcgtcaactgctctcttttctctcccacaccatcgctctcagctatggtcatcaacaaatataagcttaggagtaatatcaagagcttcaatctttcggggatgggctgcagcgcgggcctgatctcagttgatctagcccgcgacttgctccaagttcatcccaattcaaatgcaatcatcgtcagcacggagatcataacgccaaattactatcaaggcaacgagagagccatgttgttacccaattgtctcttccgcatgggtgcggcagccatacacatgtcaaaccgccggtctgaccggtggcgagccaaatacaagctttcccacctcgtccggacacaccgtggcgctgacgacaagtctttctactgtgtctacgaacaggaagacaaagaaggacacgttggcatcaacttgtccaaagatctcatggccatcgccggtgaagccctcaaggcaaacatcaccacaataggtcctttggtcctaccggcgtcagaacaacttctcttcctcacgtccctaatcggacgtaaaatcttcaacccgaaatggaaaccatacataccggatttcaagctggccttcgaacacttttgcattcacgcaggaggcagagcggtgatcgacgagctccaaaagaatctacaactatcaggagaacacgttgaggcctcaagaatgacactacatcgttttggtaacacgtcatcttcatcgttatggtacgagcttagctacatcgagtctaaagggagaatgaggagaggcgatcgcgtttggcaaatcgcgtttgggagtggtttcaagtgtaactctgccgtgtggaagtgtaaccgtacgattaagacacctaaggacggaccatggtccgattgtatcgaccgttaccctgtctttattcccgaagttgtcaaactctaaactgaaaacgtctttgaacggtttagtaacggtttgattttgtgttacggtttaggtttatttggtctcgggatttggtttaaaggggattgagaaatgggaagttagagagaagaaaaagcaaagcataaatgtttgtatttaattgctctgcatatacttaaatctctgcttttcatttggggtattttttagtttctcgtgctgtaattaataacttgtggtgtactcaaataagaatatttctctctgttttatt

SEQ ID NO: 23374 - protein, 497 aa, Arabidopsis thaliana
  peptide (1)..(497): Ceres Seq. ID no. 13504797
MPQAPMPEFSSSVKLKYVKLGYQYLVNHFLSFLLIPIMAIVAVELLRMGPEEILNVWNSLQFDLVQVLCSSFFVIFISTVYFMSKPRTIYLVDYSCYKPPVTCRVPFATFMEHSRLILKDKPKSVEFQMRILERSGLGEETCLPPAIHYIPPTPTMDAARSEAQMVIFEAMDDLFKKTGLKPKDVDILIVNCSLFSPTPSLSAMVINKYKLRSNIKSFNLSGMGCSAGLISVDLARDLLQVHPNSNAIIVSTEIITPNYYQGNERAMLLPNCLFRMGAAAIHMSNRRSDRWRAKYKLSHLVRTHRGADDKSFYCVYEQEDKEGHVGINLSKDLMAIAGEALKANITTIGPLVLPASEQLLFLTSLIGRKIFNPKWKPYIPDFKLAFEHFCIHAGGRAVIDELQKNLQLSGEHVEASRMTLHRFGNTSSSSLWYELSYIESKGRMRRGDRVWQIAFGSGFKCNSAVWKCNRTIKTPKDGPWSDCIDRYPVFIPEVVKL

SEQ ID NO: 23375 - protein, 492 aa, Arabidopsis thaliana
  peptide (1)..(492): Ceres Seq. ID no. 13504798
MPEFSSSVKLKYVKLGYQYLVNHFLSFLLIPIMAIVAVELLRMGPEEILNVWNSLQFDLVQVLCSSFFVIFISTVYFMSKPRTIYLVDYSCYKPPVTCRVPFATFMEHSRLILKDKPKSVEFQMRILERSGLGEETCLPPAIHYIPPTPTMDAARSEAQMVIFEAMDDLFKKTGLKPKDVDILIVNCSLFSPTPSLSAMVINKYKLRSNIKSFNLSGMGCSAGLISVDLARDLLQVHPNSNAIIVSTEIITPNYYQGNERAMLLPNCLFRMGAAAIHMSNRRSDRWRAKYKLSHLVRTHRGADDKSFYCVYEQEDKEGHVGINLSKDLMAIAGEALKANITTIGPLVLPASEQLLFLTSLIGRKIFNPKWKPYIPDFKLAFEHFCIHAGGRAVIDELQKNLQLSGEHVEASRMTLHRFGNTSSSSLWYELSYIESKGRMRRGDRVWQIAFGSGFKCNSAVWKCNRTIKTPKDGPWSDCIDRYPVFIPEVVKL

SEQ ID NO: 23376 - protein, 460 aa, Arabidopsis thaliana
  peptide (1)..(460): Ceres Seq. ID no. 13504799
MAIVAVELLRMGPEEILNVWNSLQFDLVQVLCSSFFVIFISTVYFMSKPRTIYLVDYSCYKPPVTCRVPFATFMEHSRLILKDKPKSVEFQMRILERSGLGEETCLPPAIHYIPPTPTMDAARSEAQMVIFEAMDDLFKKTGLKPKDVDILIVNCSLFSPTPSLSAMVINKYKLRSNIKSFNLSGMGCSAGLISVDLARDLLQVHPNSNAIIVSTEIITPNYYQGNERAMLLPNCLFRMGAAAIHMSNRRSDRWRAKYKLSHLVRTHRGADDKSFYCVYEQEDKEGHVGINLSKDLMAIAGEALKANITTIGPLVLPASEQLLFLTSLIGRKIFNPKWKPYIPDFKLAFEHFCIHAGGRAVIDELQKNLQLSGEHVEASRMTLHRFGNTSSSSLWYELSYIESKGRMRRGDRVWQIAFGSGFKCNSAVWKCNRTIKTPKDGPWSDCIDRYPVFIPEVVKL

SEQ ID NO: 23377 - DNA, 1502 bp, Arabidopsis thaliana
  misc_feature (1)..(1502): Ceres Seq. ID no. 12371616
  misc_feature (1)..(1502): Ortholog of  Ceres SEQ ID NO 15225627 as cited in SEQ ID NO 64323
atcgaagctcctctctcttacatatcatcacttcacatcaaccaaacctacttctgtctctctctctcgctctctatctctcacgctctcacagaagaaaaaattagaaaggttgtgagaatggcctacagcagcttcaccttacaaattgctacacgaaggccgagcatgtcttcgcctagcaaaattcttaaagcaggaacctacattgttggtgccaatcctggaaacgcttcatgggataaactttcatgcactcgccaattatcaaaccttggatgtttgagaaaccacagtgctgttccaacttgtaagagacccttttctttttccacaagggcaatgtctgaatccagtgaaaacaaggctccttcagggcttccaattgatttgagagggaaaagagctttcattgctggtatagctgatgataatggctatggttgggccatagcaaaatctcttgctgctgctggagctgaaatattggttgggacttgggttcctgcacttaatatatttgagacaagcttgagacgtggaaaattcgaccagtcacgagtgttgcctgacgggtcattgatggagattaagaaggtttatgctttggatgctgtgtttgacaatcctgaagatgtgcctgaagatgtgaaaacgaataagcgatatgcaggatcgtcaaactggaccgtacaggaagctgctgaatgtgtgaaaaaagattttggaagcattgacattcttgtccattcccttgcaaatggcccagaggttagcaaacctcttctggagacatcaaggaaaggctatctcgctgctatctctgcttcgagttactcctttgtttccttgctgaggcattttctgccaattatgaacccaggaggtgcttcaatatctcttacttacattgcctctgaaagaatcattcctgggtatggtggaggtatgagttctgccaaagctgcactagagagtgacacacgggtgcttgcatatgaagctggaaggaaatcaaacattagggtcaacaccatctctgcgggtcctttgggaagccgagcagcaaaagccattgggttcatagacaccatgattgagtattcctacaataatggacctattcagaaaacactgaccgcagatgaagttgggaatgcagcagccttcttggcatctccattggcctctgccataaccggtgcaaccatatatgtggacaatggtttgaatgcaatgggcgttgcactggacagccccgtgttcaaagaccttaacagcaagaattagagtcttgatcgacgactgaactcgagaaattccgtgttttcgtgagcttgcttgtttctttatgagttagtatgtacggcatatgttccccatcggctgtctttttttttctttctttaagagaataaattatggttctaggttgggtcatttagcaactatatatgtagtgatggattattattcctcttatgattgaaaatttgcaagtg

SEQ ID NO: 23378 - protein, 429 aa, Arabidopsis thaliana
  peptide (1)..(429): Ceres Seq. ID no. 12371617
IEAPLSYISSLHINQTYFCLSLSLSISHALTEEKIRKVVRMAYSSFTLQIATRRPSMSSPSKILKAGTYIVGANPGNASWDKLSCTRQLSNLGCLRNHSAVPTCKRPFSFSTRAMSESSENKAPSGLPIDLRGKRAFIAGIADDNGYGWAIAKSLAAAGAEILVGTWVPALNIFETSLRRGKFDQSRVLPDGSLMEIKKVYALDAVFDNPEDVPEDVKTNKRYAGSSNWTVQEAAECVKKDFGSIDILVHSLANGPEVSKPLLETSRKGYLAAISASSYSFVSLLRHFLPIMNPGGASISLTYIASERIIPGYGGGMSSAKAALESDTRVLAYEAGRKSNIRVNTISAGPLGSRAAKAIGFIDTMIEYSYNNGPIQKTLTADEVGNAAAFLASPLASAITGATIYVDNGLNAMGVALDSPVFKDLNSKN

SEQ ID NO: 23379 - protein, 389 aa, Arabidopsis thaliana
  peptide (1)..(389): Ceres Seq. ID no. 12371618
MAYSSFTLQIATRRPSMSSPSKILKAGTYIVGANPGNASWDKLSCTRQLSNLGCLRNHSAVPTCKRPFSFSTRAMSESSENKAPSGLPIDLRGKRAFIAGIADDNGYGWAIAKSLAAAGAEILVGTWVPALNIFETSLRRGKFDQSRVLPDGSLMEIKKVYALDAVFDNPEDVPEDVKTNKRYAGSSNWTVQEAAECVKKDFGSIDILVHSLANGPEVSKPLLETSRKGYLAAISASSYSFVSLLRHFLPIMNPGGASISLTYIASERIIPGYGGGMSSAKAALESDTRVLAYEAGRKSNIRVNTISAGPLGSRAAKAIGFIDTMIEYSYNNGPIQKTLTADEVGNAAAFLASPLASAITGATIYVDNGLNAMGVALDSPVFKDLNSKN

SEQ ID NO: 23380 - protein, 373 aa, Arabidopsis thaliana
  peptide (1)..(373): Ceres Seq. ID no. 12371619
MSSPSKILKAGTYIVGANPGNASWDKLSCTRQLSNLGCLRNHSAVPTCKRPFSFSTRAMSESSENKAPSGLPIDLRGKRAFIAGIADDNGYGWAIAKSLAAAGAEILVGTWVPALNIFETSLRRGKFDQSRVLPDGSLMEIKKVYALDAVFDNPEDVPEDVKTNKRYAGSSNWTVQEAAECVKKDFGSIDILVHSLANGPEVSKPLLETSRKGYLAAISASSYSFVSLLRHFLPIMNPGGASISLTYIASERIIPGYGGGMSSAKAALESDTRVLAYEAGRKSNIRVNTISAGPLGSRAAKAIGFIDTMIEYSYNNGPIQKTLTADEVGNAAAFLASPLASAITGATIYVDNGLNAMGVALDSPVFKDLNSKN

SEQ ID NO: 23381 - DNA, 1085 bp, Arabidopsis thaliana
  misc_feature (1)..(1085): Ceres Seq. ID no. 12489481
  misc_feature (1)..(1085): Ortholog of  Ceres SEQ ID NO 13596762 as cited in SEQ ID NO 63019
ccatctaacaaaactcttgtacttaagcatggtggttaatcagaagatatccggccttgcatccgctatgaacgccaaaatcatcggttcaggagagagatcgatggtcttggcacacggtttcggaggcgaccagtcggtttgggataagataataccggtcttgtcccaatccttcaaagttttggtctttgactggcttttctctggagccattaaagatcaaactctctatgacccttcaaagtataactccttagacgtcttctctgacgatctcattgctcttatggaggagttgaagtttggccctgtcgtgttcgtaggccattccatgtcgggggtgatcggttgtgctgcttctattaaaaggcccgacttgtttacaaatcttctccttattgctgcttctccaaggtatataaacactgaggattataaaggagggtttgagtcaaaagacattgacacgatcattaccagcattggctccaactacgaagcttgggcggttgatttctcctcattcgtggtcgacccgagagactctctctcggtccaaaggttcgagaagtcccttaagaagatgaagcccgagacagctcttagctaagatagtgtttggtagcgacgagagagagattttgggacaagtgtcagtgccttgccatgtcatacaaccaggaaacgacgtcgtagtgcctgtctccgttgcatacttcatgcaggagaagattaaagggaaatcgacagtggagatcatcgaggacgcgatcgggcattttccacagatgacatcacatttggagctgcttggcgtcatgaggcgcctcctcgagttttaaggcttatataagagctttgcgtcgtttgatcgagtttcttcttgtctataatatcgtattactaatataacgaagtgggtctattagaagttttcatatatgtttgtgtaatgtgaatgtgttattttattcttagcacaatgattttcatttttagtgttttttttaaaacagatggattgaaagtactatgttataagtttctttatatcacactgtcaaaaaaaatttattgttacg

SEQ ID NO: 23382 - protein, 203 aa, Arabidopsis thaliana
  peptide (1)..(203): Ceres Seq. ID no. 12489482
HLTKLLYLSMVVNQKISGLASAMNAKIIGSGERSMVLAHGFGGDQSVWDKIIPVLSQSFKVLVFDWLFSGAIKDQTLYDPSKYNSLDVFSDDLIALMEELKFGPVVFVGHSMSGVIGCAASIKRPDLFTNLLLIAASPRYINTEDYKGGFESKDIDTIITSIGSNYEAWAVDFSSFVVDPRDSLSVQRFEKSLKKMKPETALS

SEQ ID NO: 23383 - protein, 194 aa, Arabidopsis thaliana
  peptide (1)..(194): Ceres Seq. ID no. 12489483
MVVNQKISGLASAMNAKIIGSGERSMVLAHGFGGDQSVWDKIIPVLSQSFKVLVFDWLFSGAIKDQTLYDPSKYNSLDVFSDDLIALMEELKFGPVVFVGHSMSGVIGCAASIKRPDLFTNLLLIAASPRYINTEDYKGGFESKDIDTIITSIGSNYEAWAVDFSSFVVDPRDSLSVQRFEKSLKKMKPETALS

SEQ ID NO: 23384 - protein, 181 aa, Arabidopsis thaliana
  peptide (1)..(181): Ceres Seq. ID no. 12489484
MNAKIIGSGERSMVLAHGFGGDQSVWDKIIPVLSQSFKVLVFDWLFSGAIKDQTLYDPSKYNSLDVFSDDLIALMEELKFGPVVFVGHSMSGVIGCAASIKRPDLFTNLLLIAASPRYINTEDYKGGFESKDIDTIITSIGSNYEAWAVDFSSFVVDPRDSLSVQRFEKSLKKMKPETALS

SEQ ID NO: 23385 - DNA, 1152 bp, Arabidopsis thaliana
  misc_feature (1)..(1152): Ceres Seq. ID no. 12370401
  misc_feature (1)..(1152): Ortholog of  Ceres SEQ ID NO 15168549 as cited in SEQ ID NO 56976
  misc_feature (1)..(1152): Ortholog of  Ceres SEQ ID NO 14314335 as cited in SEQ ID NO 57305
ataactagagagagaaaccaatctttttagtgagagagaaatcttagagctgagctaagaaaaatgtcaaaagaagtgagtgaagaaggaagacatggcaaagactacgtggatccacctccagctccacttctagacatggctgagcttaagctctggtctttctacagagctatcatcgcagagttcatcgccactctcctcttcctctatgtaacccagctacagtcattggccacaaaaaccaaaccggtccttgtggcggtgttggtttactcggcattgcgtgggcctttggtggcatgatctttgtcctcgtctattgcaccgccggtatctccggaggtcacattaacccagctgtgacatttggtctgttcttggctcgtaaagtgtcgctccctagagcagttgcttacatggtggctcagtgtcttggagccatttgtggagttggactcgttaaggcctttatgatgactccatacaaacgtctcggaggcggagctaacaccgtagctgatggttatagcaccggaactgctcttggtgctgagattatcggcacatttgtcttggtttacactgtcttctctgccactgaccccaaaagaagtgcccgtgactctcacgtcccggttttggctccgttacctataggatttgctgtgttcatggtgcatttggctactatccccataactggaactgggattaatccagctagaagctttggtgctgctgttatctacaacaatgagaaagcttgggacgaccattggatcttttgggttggaccattcgtgggagcattagcagcagcagcataccatcaatatatcttgagagctgcagcaatcaaagccttggcttcattccgcagcaaccccaccaattgatgattatgagacttcttagaacagtttgagatctttttttgtgtgtttaatgagagatatttgtgtcttttaatttgatgtaatcggatttattcattctcatagtttagtttggtttaattcatctttgtccgttgctttctttcatgtagggcatcttatgattcacttttatactatagtccgaattaaaacatttgttaagactttatatgaacccacatgcatgttcgtataaaacattccttggtgt

SEQ ID NO: 23386 - protein, 198 aa, Arabidopsis thaliana
  peptide (1)..(198): Ceres Seq. ID no. 12370402
MIFVLVYCTAGISGGHINPAVTFGLFLARKVSLPRAVAYMVAQCLGAICGVGLVKAFMMTPYKRLGGGANTVADGYSTGTALGAEIIGTFVLVYTVFSATDPKRSARDSHVPVLAPLPIGFAVFMVHLATIPITGTGINPARSFGAAVIYNNEKAWDDHWIFWVGPFVGALAAAAYHQYILRAAAIKALASFRSNPTN

SEQ ID NO: 23387 - protein, 159 aa, Arabidopsis thaliana
  peptide (1)..(159): Ceres Seq. ID no. 12370403
MVAQCLGAICGVGLVKAFMMTPYKRLGGGANTVADGYSTGTALGAEIIGTFVLVYTVFSATDPKRSARDSHVPVLAPLPIGFAVFMVHLATIPITGTGINPARSFGAAVIYNNEKAWDDHWIFWVGPFVGALAAAAYHQYILRAAAIKALASFRSNPTN

SEQ ID NO: 23388 - protein, 141 aa, Arabidopsis thaliana
  peptide (1)..(141): Ceres Seq. ID no. 12370404
MMTPYKRLGGGANTVADGYSTGTALGAEIIGTFVLVYTVFSATDPKRSARDSHVPVLAPLPIGFAVFMVHLATIPITGTGINPARSFGAAVIYNNEKAWDDHWIFWVGPFVGALAAAAYHQYILRAAAIKALASFRSNPTN

SEQ ID NO: 23389 - DNA, 1218 bp, Arabidopsis thaliana
  misc_feature (1)..(1218): Ceres Seq. ID no. 12738784
  misc_feature (1)..(1218): Ortholog of  Ceres SEQ ID NO 15177862 as cited in SEQ ID NO 56033
  misc_feature (1)..(1218): Ortholog of  Ceres SEQ ID NO 13661430 as cited in SEQ ID NO 61258
  misc_feature (1)..(1218): Ortholog of  Ceres SEQ ID NO 13590940 as cited in SEQ ID NO 68653
  misc_feature (1)..(1218): Ortholog of  Ceres SEQ ID NO 14301982 as cited in SEQ ID NO 0
atcttatctcaactctcaaaatcatcttcttcacccaaaaacccctaaaagccttatcccttcttcttcccatggctgcttcagctcctctctcgctctctcttccttcaaccctaaatctcttcctttcggcgtctccagacctgcctccgtttccctcttatctccttccctctcctttaaactcaattccgactccgtttccttctccatcgccgccaaatggaactctcccgcttctcgcttcgtccgtaacgttgcgattacctcagagttcgaggtggaagaagatggtttcgctgacgtcgctccgccaaaagagcaatctttctctgctgaccttaaactcttcgttggtaaccttcctttcaacgttgacagtgctcaggctcgctcagctctttgagagtgccggaaatgttgagatggttgaggtaatctatgacaaaattacaggaagaagcagaggttttggattcgtgactatgtcttcagtttctgaagttgaggcagctgctcagcagttcaatggctatgagttggatggtagacctttgagagtcaatgctggtcccccaccaccaaagagggaagatggtttctccagaggacctaggagcagctttggaagctcaggttctggatatggaggaggtggtggttctggtgctggttcaggaaaccgtgtttatgtgggtaacctctcttggggagttgatgacatggctcttgagagtttgttctcggagcaaggaaaggttgttgaggccagagtcatctacgacagggacagtggtcgatccaagggttttggatttgtgacatacgactcttctcaagaggtccaaaatgccatcaagtccttggatggtgctgatttggacggtagacaaattagagtctcggaagctgaggctaggcctccaaggcgccaatattgagcaccaatctatgacttcctattctcaaaaacgcatattctggagggcgcttcgaagtaaagagggtttgtgagatgatggcagtttcagacggtactaagctcttagcttcgcctatgtttgttgccttggatgcaagaaggtcgtaaaggaatggtctttttttttttgagaaacgtataattaagatagaaactggagagaccatgttcttgtctgtctgaatgctgccattgactgcttcgctttggttttgattcaatttttttttctctcc

SEQ ID NO: 23390 - protein, 312 aa, Arabidopsis thaliana
  peptide (1)..(312): Ceres Seq. ID no. 12738785
LISTLKIIFFTQKPLKALSLLLPMAASAPLSLSLPSTLNLFLSASPDLPPFPSYLLPSPLNSIPTPFPSPSPPNGTLPLLASSVTLRLPQSSRWKKMVSLTSLRQKSNLSLLTLNSSLVTFLSTLTVLRLAQLFESAGNVEMVEVIYDKITGRSRGFGFVTMSSVSEVEAAAQQFNGYELDGRPLRVNAGPPPPKREDGFSRGPRSSFGSSGSGYGGGGGSGAGSGNRVYVGNLSWGVDDMALESLFSEQGKVVEARVIYDRDSGRSKGFGFVTYDSSQEVQNAIKSLDGADLDGRQIRVSEAEARPPRRQY

SEQ ID NO: 23391 - protein, 289 aa, Arabidopsis thaliana
  peptide (1)..(289): Ceres Seq. ID no. 12738786
MAASAPLSLSLPSTLNLFLSASPDLPPFPSYLLPSPLNSIPTPFPSPSPPNGTLPLLASSVTLRLPQSSRWKKMVSLTSLRQKSNLSLLTLNSSLVTFLSTLTVLRLAQLFESAGNVEMVEVIYDKITGRSRGFGFVTMSSVSEVEAAAQQFNGYELDGRPLRVNAGPPPPKREDGFSRGPRSSFGSSGSGYGGGGGSGAGSGNRVYVGNLSWGVDDMALESLFSEQGKVVEARVIYDRDSGRSKGFGFVTYDSSQEVQNAIKSLDGADLDGRQIRVSEAEARPPRRQY

SEQ ID NO: 23392 - protein, 216 aa, Arabidopsis thaliana
  peptide (1)..(216): Ceres Seq. ID no. 12738787
MVSLTSLRQKSNLSLLTLNSSLVTFLSTLTVLRLAQLFESAGNVEMVEVIYDKITGRSRGFGFVTMSSVSEVEAAAQQFNGYELDGRPLRVNAGPPPPKREDGFSRGPRSSFGSSGSGYGGGGGSGAGSGNRVYVGNLSWGVDDMALESLFSEQGKVVEARVIYDRDSGRSKGFGFVTYDSSQEVQNAIKSLDGADLDGRQIRVSEAEARPPRRQY

SEQ ID NO: 23393 - DNA, 1222 bp, Arabidopsis thaliana
  misc_feature (1)..(1222): Ceres Seq. ID no. 12324946
  misc_feature (1)..(1222): Ortholog of  Ceres SEQ ID NO 12618436 as cited in SEQ ID NO 64280
aaaaaatccgggacgataattctcgcacacgttctccatcactttccctcgatccaaaaccagagtgggaactacacgcgaatcgaatcataaatggaatgtgaattttgaaatcgaggaagaagacgaaatcggagcattattggattgagttttgaagtttttaggagaaggaaatgatggcgtcggatccaaaactgaaggctgagatcggagccgatggtcttgcaagagaagctcctgttattgcttacacagagaagataatcgaggaagagcaagttcagctgaggaaatacattgaggagaactatacaaaaattagggatgttgaaagggaatttggaaacctttcaatggaattgaaactcactgctggacctaagaaagcagcaatggaacacttgagaaagaaaatcgaagtctcaactgaaaggatccatgctgctaagttgaaagaagaagaagcgcgaaaggcatttgaagcagcatcaaaagttgtgaaggatgaagaagcaacaaaacagagtctttgcgaagatttaaacagtctggtacaacaaagcagcaatacgcagtacgccagacttgaggaattgaaaagaagactagaagcgttgaatccaaatcgatcatctacttctattcagcaagtgcaagaaccggagactaaatctgtagtagacagcgcaccagcagccaatgcgaaccaaactcacccgggaaaacctgaaaataaccacgggaacgaggaaggtggtaaagaacatggacagagaccagcaacagctgaaggagaatcaaaagcgaaaaagaaaccacagaatcaagggaggggaagaggaattggaataatgaacaaaggcagaggaggttggacaggtgctggattcgatgtcgatggtagaaattgagatacatatatctagataatccatataccgaaagtgtcatttcgaatcagaagtatgtcaaatatattgttaccaggtatgttctatcatcttttaacatcgatggaccagtacgtagccacaaagacttctcattttctcatacacttgtgttactgaaaagaaatccatccaatcatatttggactgttcattgatcatctcttgtgtatgtctccaattttgtgcaattgggtttgatgtaataatctgagaacagttaagtttgattgtctaagaggttagagtgaggcatgattcgttatggc

SEQ ID NO: 23394 - protein, 245 aa, Arabidopsis thaliana
  peptide (1)..(245): Ceres Seq. ID no. 12324947
MMASDPKLKAEIGADGLAREAPVIAYTEKIIEEEQVQLRKYIEENYTKIRDVEREFGNLSMELKLTAGPKKAAMEHLRKKIEVSTERIHAAKLKEEEARKAFEAASKVVKDEEATKQSLCEDLNSLVQQSSNTQYARLEELKRRLEALNPNRSSTSIQQVQEPETKSVVDSAPAANANQTHPGKPENNHGNEEGGKEHGQRPATAEGESKAKKKPQNQGRGRGIGIMNKGRGGWTGAGFDVDGRN

SEQ ID NO: 23395 - protein, 244 aa, Arabidopsis thaliana
  peptide (1)..(244): Ceres Seq. ID no. 12324948
MASDPKLKAEIGADGLAREAPVIAYTEKIIEEEQVQLRKYIEENYTKIRDVEREFGNLSMELKLTAGPKKAAMEHLRKKIEVSTERIHAAKLKEEEARKAFEAASKVVKDEEATKQSLCEDLNSLVQQSSNTQYARLEELKRRLEALNPNRSSTSIQQVQEPETKSVVDSAPAANANQTHPGKPENNHGNEEGGKEHGQRPATAEGESKAKKKPQNQGRGRGIGIMNKGRGGWTGAGFDVDGRN

SEQ ID NO: 23396 - protein, 185 aa, Arabidopsis thaliana
  peptide (1)..(185): Ceres Seq. ID no. 12324949
MELKLTAGPKKAAMEHLRKKIEVSTERIHAAKLKEEEARKAFEAASKVVKDEEATKQSLCEDLNSLVQQSSNTQYARLEELKRRLEALNPNRSSTSIQQVQEPETKSVVDSAPAANANQTHPGKPENNHGNEEGGKEHGQRPATAEGESKAKKKPQNQGRGRGIGIMNKGRGGWTGAGFDVDGRN

SEQ ID NO: 23397 - DNA, 1484 bp, Arabidopsis thaliana
  misc_feature (1)..(1484): Ceres Seq. ID no. 13487099
  misc_feature (1)..(1484): Ortholog of  Ceres SEQ ID NO 12609146 as cited in SEQ ID NO 52118
  misc_feature (1)..(1484): Ortholog of  Ceres SEQ ID NO 13594056 as cited in SEQ ID NO 55691
  misc_feature (1)..(1484): Ortholog of  Ceres SEQ ID NO 13638136 as cited in SEQ ID NO 58644
  misc_feature (1)..(1484): Ortholog of  Ceres SEQ ID NO 13596868 as cited in SEQ ID NO 62806
  misc_feature (1)..(1484): Ortholog of  Ceres SEQ ID NO 12587035 as cited in SEQ ID NO 63605
  misc_feature (1)..(1484): Ortholog of  Ceres SEQ ID NO 14301886 as cited in SEQ ID NO 64201
  misc_feature (1)..(1484): Ortholog of  Ceres SEQ ID NO 13595885 as cited in SEQ ID NO 69265
  misc_feature (1)..(1484): Ortholog of  Ceres SEQ ID NO 12566239 as cited in SEQ ID NO 0
  misc_feature (1)..(1484): Ortholog of  Ceres SEQ ID NO 13599119 as cited in SEQ ID NO 0
  misc_feature (1)..(1484): Ortholog of  Ceres SEQ ID NO 15179992 as cited in SEQ ID NO 0
ctcttaacgtcgatcacctgtttttctctttccctctctctctatttttctcaactaggaatcaaccatgaatctcccatcattctcacttctctcttctaattctttcatggaattttcaggttagaagaagattccgggcagattatctgttgattcgaagaataccgaatacgcgtttgaaatttctgaagaattatgggatacttggacttggccttgtcgtattccaaccagccgcagactgttgaagctccagcgagcggaggaggtctcagccagaatggaaaatttagctatggatatgcaagctccgctggcaagagatcatctatggaagacttttttgaaactaggatcgacggtatcaatggagaaatagttggtctatttggagtttttgatggccatggtggagccagagcagctgagtacgtgaagcgccatcttttcagtaatctgatcacccacccaaagtttatctctgacaccaaatcagctataactgatgcttataaccatacagactccgaacttctcaagtcagaaaatagtcacaatagagacgctggttctactgcgtctacagctattcttgttggtgaccgtttagttgttgcaaatgttggtgattctagagctgttatcagcagaggcggaaaagccattgctgtgtcaagggaccataaaccggaccaaagtgatgaacgtgaaaggattgagaatgctggtggatttgtgatgtgggcaggaacttggagggtaggaggagttcttgcagtttctcgtgcgtttggtgatcggcttctgaagcaatatgttgttgctgatccagaaatccaggaagaaaagattgatgatactcttgagtttttgattctagcaagtgatggactgtgggatgttttctctaatgaggcagcagttgcaatggtaaaggaagttgaagatcccgaggactcagcgaaaaaactggtgggtgaagcaataaagagaggaagtgcagataacatcacatgtgttgtcgttcgtttcttggagaagaagtcagcttcatcaagccacattagctcttcctcctccaaggaagccaaggaaatgcctccacttggagaccttgctatctcatcgaatgaagctaagcaagtccagatcggctcagggaacaaaccagagaatgtaacgaatcgaaaaccggacactgcaagtcgctcaactgatacactgacccttgagaggaattcagtgaccgacaaggtataaatagcgattccctctattctctaggaactaaagacagtgttctcttccctcaaacacggcaaacaaacttactgatcgttgatcgcgtttgcatttaggattgaagatgtatttaatacgattgttttaagtttatgattacgtttgtgtgtatataatacatgcatcgacttttgtatttgtttatgtgtaaatgttttaaatttcatgatagtttattc

SEQ ID NO: 23398 - protein, 354 aa, Arabidopsis thaliana
  peptide (1)..(354): Ceres Seq. ID no. 13487100
MGYLDLALSYSNQPQTVEAPASGGGLSQNGKFSYGYASSAGKRSSMEDFFETRIDGINGEIVGLFGVFDGHGGARAAEYVKRHLFSNLITHPKFISDTKSAITDAYNHTDSELLKSENSHNRDAGSTASTAILVGDRLVVANVGDSRAVISRGGKAIAVSRDHKPDQSDERERIENAGGFVMWAGTWRVGGVLAVSRAFGDRLLKQYVVADPEIQEEKIDDTLEFLILASDGLWDVFSNEAAVAMVKEVEDPEDSAKKLVGEAIKRGSADNITCVVVRFLEKKSASSSHISSSSSKEAKEMPPLGDLAISSNEAKQVQIGSGNKPENVTNRKPDTASRSTDTLTLERNSVTDKV

SEQ ID NO: 23399 - protein, 309 aa, Arabidopsis thaliana
  peptide (1)..(309): Ceres Seq. ID no. 13487101
MEDFFETRIDGINGEIVGLFGVFDGHGGARAAEYVKRHLFSNLITHPKFISDTKSAITDAYNHTDSELLKSENSHNRDAGSTASTAILVGDRLVVANVGDSRAVISRGGKAIAVSRDHKPDQSDERERIENAGGFVMWAGTWRVGGVLAVSRAFGDRLLKQYVVADPEIQEEKIDDTLEFLILASDGLWDVFSNEAAVAMVKEVEDPEDSAKKLVGEAIKRGSADNITCVVVRFLEKKSASSSHISSSSSKEAKEMPPLGDLAISSNEAKQVQIGSGNKPENVTNRKPDTASRSTDTLTLERNSVTDKV

SEQ ID NO: 23400 - DNA, 1626 bp, Arabidopsis thaliana
  misc_feature (1)..(1626): Ceres Seq. ID no. 12379505
  misc_feature (1)..(1626): Ortholog of  Ceres SEQ ID NO 13656404 as cited in SEQ ID NO 65806
  misc_feature (1)..(1626): Ortholog of  Ceres SEQ ID NO 12779935 as cited in SEQ ID NO 66774
  misc_feature (1)..(1626): Ortholog of  Ceres SEQ ID NO 13598695 as cited in SEQ ID NO 67368
  misc_feature (1)..(1626): Ortholog of  Ceres SEQ ID NO 13591174 as cited in SEQ ID NO 68289
ctgcttccgccattgctcgaaaatcgcgtcttctgacaatgtgctgaaactgagtcatcgtccgagttagcaaagtgaaacttcgaagtttctcttacactaatctcaggtttgggattttgtaagaaaccgcgtttacaaaatgttcaagttgaagcaatggttgatttatttggtgtattcgttagtaataatgaacacagaaggactgtttgtcaatattacatttgttcgaaacgcagtcgctaaaggggccgtttgtttagatggaagtccaccagcttatcatttggatagaggttctggaactggaatcaatagttggttgatacagcttgagggaggaggatggtgcaataatgtaacaaattgcgttagtcggatgcatactcgattaggttcatcgaagaaaatggtggagaaccttgctttctcagctattcttagcaataagaaacaatataatcctgatttttacaattggaatagagtgaaagttagatactgtgacggggcatcattcacaggagatgtagaagcagtgaaccctgctactaatcttcacttcagaggtgctcgagtttggttagccgttatgcaagagctgctagctaaaggcatgataaacgccgagaatgctgttttgtctggctgttctgctggcgggttagcttcgctgatgcattgtgatagtttccgtgctctattaccgatgggaaccaaagtaaaatgtctttcagatgctgggttttttctcaacacaagagacgtctcaggagttcaatacattaaaacatacttcgaagatgttgttactcttcatggatcagcaaagaacttgccgaggtcatgcacatcaagattaactcctgcaatgtgtttctttccgcaatatgtggctcgccagattagaactcctctgttcattcttaatgccgcttatgactcttggcagataaagaacattttggctccgcgagcagctgatccttacggaaaatggcaaagttgtcaactagacatcaagaattgccatccaagtcagatcaaagttatgcaagatttcaggttagagttcttgagtgcagtgataggtttagggagatcttcatcaagagggatgttcatagattcttgctacactcactgccaaaccgagacacaaacttcatggttctggcaagattctccaattctaaaccgaacgacaatagcaaaagctgttggagattgggtttatgacagaacattgtttcagaagatagattgtccttacccttgtaaccctacttgccaccacagggtttttcactcctctagatgctcctccaatttaagtgattctaccatatacagtatagatttattattattttgaaaagaaaatttgcttataaatgattcatttgttagatacatatagtgaaatattcctagggtttagctatagaagatgaaaaagaaaaagagtgtgattaattcttgagtgttgagaataagcaataggagtaattttcttcagcacttgtcttgtgtgctgtttaaattgctctgtttctcttctattctgatgtaaaatgcaaattgttacctttatcctatcaaataaagtataattcttttctc

SEQ ID NO: 23401 - protein, 411 aa, Arabidopsis thaliana
  peptide (1)..(411): Ceres Seq. ID no. 12379506
MFKLKQWLIYLVYSLVIMNTEGLFVNITFVRNAVAKGAVCLDGSPPAYHLDRGSGTGINSWLIQLEGGGWCNNVTNCVSRMHTRLGSSKKMVENLAFSAILSNKKQYNPDFYNWNRVKVRYCDGASFTGDVEAVNPATNLHFRGARVWLAVMQELLAKGMINAENAVLSGCSAGGLASLMHCDSFRALLPMGTKVKCLSDAGFFLNTRDVSGVQYIKTYFEDVVTLHGSAKNLPRSCTSRLTPAMCFFPQYVARQIRTPLFILNAAYDSWQIKNILAPRAADPYGKWQSCQLDIKNCHPSQIKVMQDFRLEFLSAVIGLGRSSSRGMFIDSCYTHCQTETQTSWFWQDSPILNRTTIAKAVGDWVYDRTLFQKIDCPYPCNPTCHHRVFHSSRCSSNLSDSTIYSIDLLLF

SEQ ID NO: 23402 - protein, 394 aa, Arabidopsis thaliana
  peptide (1)..(394): Ceres Seq. ID no. 12379507
MNTEGLFVNITFVRNAVAKGAVCLDGSPPAYHLDRGSGTGINSWLIQLEGGGWCNNVTNCVSRMHTRLGSSKKMVENLAFSAILSNKKQYNPDFYNWNRVKVRYCDGASFTGDVEAVNPATNLHFRGARVWLAVMQELLAKGMINAENAVLSGCSAGGLASLMHCDSFRALLPMGTKVKCLSDAGFFLNTRDVSGVQYIKTYFEDVVTLHGSAKNLPRSCTSRLTPAMCFFPQYVARQIRTPLFILNAAYDSWQIKNILAPRAADPYGKWQSCQLDIKNCHPSQIKVMQDFRLEFLSAVIGLGRSSSRGMFIDSCYTHCQTETQTSWFWQDSPILNRTTIAKAVGDWVYDRTLFQKIDCPYPCNPTCHHRVFHSSRCSSNLSDSTIYSIDLLLF

SEQ ID NO: 23403 - protein, 331 aa, Arabidopsis thaliana
  peptide (1)..(331): Ceres Seq. ID no. 12379508
MHTRLGSSKKMVENLAFSAILSNKKQYNPDFYNWNRVKVRYCDGASFTGDVEAVNPATNLHFRGARVWLAVMQELLAKGMINAENAVLSGCSAGGLASLMHCDSFRALLPMGTKVKCLSDAGFFLNTRDVSGVQYIKTYFEDVVTLHGSAKNLPRSCTSRLTPAMCFFPQYVARQIRTPLFILNAAYDSWQIKNILAPRAADPYGKWQSCQLDIKNCHPSQIKVMQDFRLEFLSAVIGLGRSSSRGMFIDSCYTHCQTETQTSWFWQDSPILNRTTIAKAVGDWVYDRTLFQKIDCPYPCNPTCHHRVFHSSRCSSNLSDSTIYSIDLLLF

SEQ ID NO: 23404 - DNA, 954 bp, Arabidopsis thaliana
  misc_feature (1)..(954): Ceres Seq. ID no. 13497549
  misc_feature (1)..(954): Ortholog of  Ceres SEQ ID NO 12635789 as cited in SEQ ID NO 0
aaaaaagataaaacaaaagctgaaaggaggaaaccagaggaaggagacgacgaccaccaccacaacgcatctcagctcttccttaatccatggcagacaagggccgcccgttgccgaagtttggaagagctgagatgcgttgtggtggtggtcgtcgcctccttcttcaatctcatcgcaatcatgatcatatccgagactaatcgccgtgagatctccaagtacctcttcaaagagggtgttttgtttgccaaaaaggatttcaatttaccacaacatcctttgattgagagtgttccaaatctgcaagttatcaagttgatgcagagtttcaaatctaaggaatatgtgagagagacctttgcttggatgcattactactggttcctcacaaatgaaggtattgactttcttaggacttaccttaatctcccatctgagattgttcctgctactctgaagaagcaacagaagcctcttggtcgaccttttggaggtggtggtgaccgtccccgtggccctcctcgtggtgatggagagaggaggtttggtgacagagatggataccgtggaggtcctaaatcaggtggagagtatggtgacaaggctggagcacctgctgattaccagcctggcttcaggggtggagctagtggagcaaggcaagggtttggtcgtggagctggtggttttggtggtggtgctggtccagctgctggatctgatctaccttgaaaaggactttcttgtttctttttggtcttatttaaggttacatagcaccttattgagaacgaatgtgtcttttggaactttgtttctttctcttaaaccatttcacaatatgattgtttttttacgttagaattttatgaagaaatgttggatcgttacatgaatctttttacactgtcctcctttttaaattctcctatttagtttttttcgaagctt

SEQ ID NO: 23405 - protein, 244 aa, Arabidopsis thaliana
  peptide (1)..(244): Ceres Seq. ID no. 13497550
KKDKTKAERRKPEEGDDDHHHNASQLFLNPWQTRAARCRSLEELRCVVVVVVASFFNLIAIMIISETNRREISKYLFKEGVLFAKKDFNLPQHPLIESVPNLQVIKLMQSFKSKEYVRETFAWMHYYWFLTNEGIDFLRTYLNLPSEIVPATLKKQQKPLGRPFGGGGDRPRGPPRGDGERRFGDRDGYRGGPKSGGEYGDKAGAPADYQPGFRGGASGARQGFGRGAGGFGGGAGPAAGSDLP

SEQ ID NO: 23406 - protein, 183 aa, Arabidopsis thaliana
  peptide (1)..(183): Ceres Seq. ID no. 13497551
MIISETNRREISKYLFKEGVLFAKKDFNLPQHPLIESVPNLQVIKLMQSFKSKEYVRETFAWMHYYWFLTNEGIDFLRTYLNLPSEIVPATLKKQQKPLGRPFGGGGDRPRGPPRGDGERRFGDRDGYRGGPKSGGEYGDKAGAPADYQPGFRGGASGARQGFGRGAGGFGGGAGPAAGSDLP

SEQ ID NO: 23407 - protein, 137 aa, Arabidopsis thaliana
  peptide (1)..(137): Ceres Seq. ID no. 13497552
MQSFKSKEYVRETFAWMHYYWFLTNEGIDFLRTYLNLPSEIVPATLKKQQKPLGRPFGGGGDRPRGPPRGDGERRFGDRDGYRGGPKSGGEYGDKAGAPADYQPGFRGGASGARQGFGRGAGGFGGGAGPAAGSDLP

SEQ ID NO: 23408 - DNA, 1682 bp, Arabidopsis thaliana
  misc_feature (1)..(1682): Ceres Seq. ID no. 12348720
  misc_feature (1)..(1682): Ortholog of  Ceres SEQ ID NO 15176532 as cited in SEQ ID NO 58184
  misc_feature (1)..(1682): Ortholog of  Ceres SEQ ID NO 14303627 as cited in SEQ ID NO 62070
  misc_feature (1)..(1682): Ortholog of  Ceres SEQ ID NO 13597546 as cited in SEQ ID NO 65017
  misc_feature (1)..(1682): Ortholog of  Ceres SEQ ID NO 14308015 as cited in SEQ ID NO 65798
  misc_feature (1)..(1682): Ortholog of  Ceres SEQ ID NO 15176077 as cited in SEQ ID NO 66728
  misc_feature (1)..(1682): Ortholog of  Ceres SEQ ID NO 14307908 as cited in SEQ ID NO 67189
  misc_feature (1)..(1682): Ortholog of  Ceres SEQ ID NO 13654353 as cited in SEQ ID NO 68318
tccattaatactctctctccctcatcctctcttcttctctcatcatcatcttcttcttcaatggccttcaccgcttttctcctcctcctctcttccatcgccgccggcttcctcctcctactccgccgtacacgttaccgtcggatgggtctgcctccgggaagccttggtctccctctgataggagagacttttcagctgatcggagcttacaaaacagagaaccctgagcctttcatcgacgagagagtagcccggtacggttcggttttcatgacgcatctttttggtgaaccgacgattttctcagctgacccggaaacgaaccggtttgttcttcagaacgaagggaagctttttgagtgttcttatcctgcttccatttgtaaccttttggggaaacactctctgcttcttatgaaaggttctttgcataaacgtatgcactctctcaccatgagctttgctaattcttcaatcattaaagaccatctcatgcttgatattgaccggttagtccggtttaatcttgattcttggtcttctcgtgttctcctcatggaagaagccaaaaagataacgtttgagctaacggtgaagcagttgatgagctttgatccaggggaatggagtgagagtttaaggaaagagtatcttcttgtcatcgaaggcttcttctctcttcctctccctctcttctccaccacttaccgcaaagccatccaagcgcggaggaaggtggcggaggcgttgacggtggtggtgatgaaaaggagggaggaggaggaagaaggagcggagagaaagaaagatatgcttgcggcgttgcttgcggcggatgatggattttccgatgaagagattgttgacttcttggtggctttacttgtcgccggttatgaaacaacctccacgatcatgactctcgccgtcaaatttctcaccgagactcctttagctcttgctcaactcaaggaagagcatgaaaagattagggcaatgaagagtgattcgtatagtcttgaatggagtgattacaagtcaatgccattcacacaatgtgtggttaatgagacgctacgagtggctaacatcatcggcggtgttttcagacgtgcaatgacggatgttgagatcaaaggttataaaattccaaaagggtggaaagtattctcatcgtttagagcggttcatttagacccaaaccacttcaaagatgctcgcactttcaacccttggagatggcagagcaactcggtaacgacaggcccttctaatgtgttcacaccgtttggtggagggccaaggctatgtcccggttacgagctggctagggttgcactctctgttttccttcaccgcctagtgacaggcttcagttgggttcctgcagagcaagacaagctggttttctttccaactacaagaacgcagaaacggtacccgatcttcgtgaagcgccgtgattttgctacttgaagaagaagagacccatctgattttatttatagaacaacagtatttttcaggattaatttcttcttctttttttgcctccttgtgggtctagtgtttgacaataaaagttatcattactctataaagccttagcttctgtgtacataaaaaaaaaaaacttttgtttaccttatgcttgcataaatctcttctgcttcaatggt

SEQ ID NO: 23409 - protein, 492 aa, Arabidopsis thaliana
  peptide (1)..(492): Ceres Seq. ID no. 12348721
SINTLSPSSSLLLSSSSSSSMAFTAFLLLLSSIAAGFLLLLRRTRYRRMGLPPGSLGLPLIGETFQLIGAYKTENPEPFIDERVARYGSVFMTHLFGEPTIFSADPETNRFVLQNEGKLFECSYPASICNLLGKHSLLLMKGSLHKRMHSLTMSFANSSIIKDHLMLDIDRLVRFNLDSWSSRVLLMEEAKKITFELTVKQLMSFDPGEWSESLRKEYLLVIEGFFSLPLPLFSTTYRKAIQARRKVAEALTVVVMKRREEEEEGAERKKDMLAALLAADDGFSDEEIVDFLVALLVAGYETTSTIMTLAVKFLTETPLALAQLKEEHEKIRAMKSDSYSLEWSDYKSMPFTQCVVNETLRVANIIGGVFRRAMTDVEIKGYKIPKGWKVFSSFRAVHLDPNHFKDARTFNPWRWQSNSVTTGPSNVFTPFGGGPRLCPGYELARVALSVFLHRLVTGFSWVPAEQDKLVFFPTTRTQKRYPIFVKRRDFAT

SEQ ID NO: 23410 - protein, 472 aa, Arabidopsis thaliana
  peptide (1)..(472): Ceres Seq. ID no. 12348722
MAFTAFLLLLSSIAAGFLLLLRRTRYRRMGLPPGSLGLPLIGETFQLIGAYKTENPEPFIDERVARYGSVFMTHLFGEPTIFSADPETNRFVLQNEGKLFECSYPASICNLLGKHSLLLMKGSLHKRMHSLTMSFANSSIIKDHLMLDIDRLVRFNLDSWSSRVLLMEEAKKITFELTVKQLMSFDPGEWSESLRKEYLLVIEGFFSLPLPLFSTTYRKAIQARRKVAEALTVVVMKRREEEEEGAERKKDMLAALLAADDGFSDEEIVDFLVALLVAGYETTSTIMTLAVKFLTETPLALAQLKEEHEKIRAMKSDSYSLEWSDYKSMPFTQCVVNETLRVANIIGGVFRRAMTDVEIKGYKIPKGWKVFSSFRAVHLDPNHFKDARTFNPWRWQSNSVTTGPSNVFTPFGGGPRLCPGYELARVALSVFLHRLVTGFSWVPAEQDKLVFFPTTRTQKRYPIFVKRRDFAT

SEQ ID NO: 23411 - protein, 444 aa, Arabidopsis thaliana
  peptide (1)..(444): Ceres Seq. ID no. 12348723
MGLPPGSLGLPLIGETFQLIGAYKTENPEPFIDERVARYGSVFMTHLFGEPTIFSADPETNRFVLQNEGKLFECSYPASICNLLGKHSLLLMKGSLHKRMHSLTMSFANSSIIKDHLMLDIDRLVRFNLDSWSSRVLLMEEAKKITFELTVKQLMSFDPGEWSESLRKEYLLVIEGFFSLPLPLFSTTYRKAIQARRKVAEALTVVVMKRREEEEEGAERKKDMLAALLAADDGFSDEEIVDFLVALLVAGYETTSTIMTLAVKFLTETPLALAQLKEEHEKIRAMKSDSYSLEWSDYKSMPFTQCVVNETLRVANIIGGVFRRAMTDVEIKGYKIPKGWKVFSSFRAVHLDPNHFKDARTFNPWRWQSNSVTTGPSNVFTPFGGGPRLCPGYELARVALSVFLHRLVTGFSWVPAEQDKLVFFPTTRTQKRYPIFVKRRDFAT

SEQ ID NO: 23412 - DNA, 1084 bp, Arabidopsis thaliana
  misc_feature (1)..(1084): Ceres Seq. ID no. 12422456
  misc_feature (1)..(1084): Ortholog of  Ceres SEQ ID NO 13654728 as cited in SEQ ID NO 62302
  misc_feature (1)..(1084): Ortholog of  Ceres SEQ ID NO 13597134 as cited in SEQ ID NO 64501
  misc_feature (1)..(1084): Ortholog of  Ceres SEQ ID NO 15174333 as cited in SEQ ID NO 0
aaaaaggacttgaaatattgaaatccctattctttacgcgtactcgagatttttcgctcttgagagaatcacttcgacaatgtcggtaacggctgctttcattgattcggatcaaactcagcacaacattcttatggattcccaatcaactgtctccggtgtgaaaactgtcaagattagcaatgtttcactaattgtttctaagaaagatgtcaaagagttcttttctttctctggtgacattcaatacgtcgagatgcgaagtgagacacaagagagtcaggtcgcatatgttacttttaaggattcacaaggagctgaaactgcaatgctcttaacgggagctgtcattgcagatcttcgtgttagtataactcctgctgttaactatcagctaccaccagaagcccttgcacttgactcggaacattcgtttaatggtttttctgtcaagaaagctgaagatgtggtgaacatcatggtgggaagaggttatgctcttggaaaagacgccatggagaaagccaaagcatttgatgacagacacaacttgatctcaaacgcttctgcaaccattgcatcgcttgacgataagatgggtctgagcgaaaagctaagcataggaacaactgtggttaatgagaagttgagagatatcgatgagcgatatcaggtgagggagataacgaaatctgctttagcagctgctgaagagacagcaatcagtgcaagaacggctttaatggcaaacccttatgtatcaagtggagcttcgtggttttcaaacgcgtttggcgcagtgacaaaggcggttaaagagaaagttgagaatggaggagaaggaagaaaggagatcatcacacttgatccctcttcacccaaagttcctgctgtagttcctgttaagctcggttgatgcagatctcatcaaaccaatcggatctcgactaaattctttgataggtttgttgttcatatatatgctttcgtatgctaaagaaaagataaaaagacataaaccatgaaaggtgttgttacattcaaccagcatttgttcctctcttgaaagagattattaagattc

SEQ ID NO: 23413 - protein, 278 aa, Arabidopsis thaliana
  peptide (1)..(278): Ceres Seq. ID no. 12422457
MSVTAAFIDSDQTQHNILMDSQSTVSGVKTVKISNVSLIVSKKDVKEFFSFSGDIQYVEMRSETQESQVAYVTFKDSQGAETAMLLTGAVIADLRVSITPAVNYQLPPEALALDSEHSFNGFSVKKAEDVVNIMVGRGYALGKDAMEKAKAFDDRHNLISNASATIASLDDKMGLSEKLSIGTTVVNEKLRDIDERYQVREITKSALAAAEETAISARTALMANPYVSSGASWFSNAFGAVTKAVKEKVENGGEGRKEIITLDPSSPKVPAVVPVKLG

SEQ ID NO: 23414 - protein, 260 aa, Arabidopsis thaliana
  peptide (1)..(260): Ceres Seq. ID no. 12422458
MDSQSTVSGVKTVKISNVSLIVSKKDVKEFFSFSGDIQYVEMRSETQESQVAYVTFKDSQGAETAMLLTGAVIADLRVSITPAVNYQLPPEALALDSEHSFNGFSVKKAEDVVNIMVGRGYALGKDAMEKAKAFDDRHNLISNASATIASLDDKMGLSEKLSIGTTVVNEKLRDIDERYQVREITKSALAAAEETAISARTALMANPYVSSGASWFSNAFGAVTKAVKEKVENGGEGRKEIITLDPSSPKVPAVVPVKLG

SEQ ID NO: 23415 - protein, 219 aa, Arabidopsis thaliana
  peptide (1)..(219): Ceres Seq. ID no. 12422459
MRSETQESQVAYVTFKDSQGAETAMLLTGAVIADLRVSITPAVNYQLPPEALALDSEHSFNGFSVKKAEDVVNIMVGRGYALGKDAMEKAKAFDDRHNLISNASATIASLDDKMGLSEKLSIGTTVVNEKLRDIDERYQVREITKSALAAAEETAISARTALMANPYVSSGASWFSNAFGAVTKAVKEKVENGGEGRKEIITLDPSSPKVPAVVPVKLG

SEQ ID NO: 23416 - DNA, 1456 bp, Arabidopsis thaliana
  misc_feature (1)..(1456): Ceres Seq. ID no. 12371577
  misc_feature (1)..(1456): Ortholog of  Ceres SEQ ID NO 15175597 as cited in SEQ ID NO 58317
agatattttgatttctgctaaagctgtctgatagaaagaagaggaaaactcgaaaaagctacacacaagaagaagaagaaaagatacgagcaagaagactaaacacgaaagcgatttatctactcgaaggaagagactttgattttcaaatttcgtcccttatagattgtgttgtttctgggaaggagatggcagtttatgaccagagtggagatataaacagaacacaaattgatacatcgaggaaaaggaaatctagaagtagaggtgatggtactactgtggctgagagattaaagagatggaaagagtatagagactgtagaagaagtgtctaccaagaagaggaaagtacctgcgaaagggtcgaagaagggttgtatgaaaggtaaaggaggaccagagaatagtcgatgtagtttcagaggagttaggcaaaggatttggggtaaatgggttgctgagatcagagagcctaatcgaggtagcaggctttggcttggtactttccctactgctcaagaagctgcttctgcttatgatgaggctgctaaagctatgtatggtcctttggctcgtcttaatttccctcggtctgatgtgtctgaggttacgagtacatcgagtcagtctgaggtgtgtactgttgagactcctggttgtgttcatgtgaaaacagaggatgcagattgtgaatctaaacccttctccggtggagtggagccgatgtattgtctggagaatggtgcggaagagatgaagagaggtgttaaagcggataagggttggctagcgagtttgaacataactattggagtgatattttgaaagagaaagaaaaacagaaggagcaagagattgtagaaacctgtcagcaacagcagcaacaacagcaggattcgctatctgttgcagactatggttggcccaatgatgtggatcagagtcacttggattcttcagacatgtttgatgtcgatgagcttctacgtgacctaaatggcgacgatgtttttgcaggcttaaatcacgaccagtacccggggaacaatgttgccaacggttcatacaggcctgagagtcaacaaagtggttttgatccgctacaaagcctcaactacggaatacctccgtttcagctcgaggggaaggatggtaatggattcttcgacgacttgagttacttggatctggagaactaaacaaaacaatatgaagctttttggatttgatatttgccttaatcccacaacgactgttgattctctatccgagttttagtgatatagagaactgcagaacacgttttttcttgttacaaaggtgaactgtatatatcgaaacagtgatatgacaatggagaagacaactatagtttgttagtctgcttctcttaagttgttctttagatatgttttatgttttataacaacgggaatgaataatatacacttgt

SEQ ID NO: 23417 - protein, 148 aa, Arabidopsis thaliana
  peptide (1)..(148): Ceres Seq. ID no. 12371578
MKGKGGPENSRCSFRGVRQRIWGKWVAEIREPNRGSRLWLGTFPTAQEAASAYDEAAKAMYGPLARLNFPRSDVSEVTSTSSQSEVCTVETPGCVHVKTEDADCESKPFSGGVEPMYCLENGAEEMKRGVKADKGWLASLNITIGVIF

SEQ ID NO: 23418 - protein, 89 aa, Arabidopsis thaliana
  peptide (1)..(89): Ceres Seq. ID no. 12371579
MYGPLARLNFPRSDVSEVTSTSSQSEVCTVETPGCVHVKTEDADCESKPFSGGVEPMYCLENGAEEMKRGVKADKGWLASLNITIGVIF

SEQ ID NO: 23419 - protein, 78 aa, Arabidopsis thaliana
  peptide (1)..(78): Ceres Seq. ID no. 12371580
MFDVDELLRDLNGDDVFAGLNHDQYPGNNVANGSYRPESQQSGFDPLQSLNYGIPPFQLEGKDGNGFFDDLSYLDLEN

SEQ ID NO: 23420 - DNA, 1490 bp, Arabidopsis thaliana
  misc_feature (1)..(1490): Ceres Seq. ID no. 13497463
  misc_feature (1)..(1490): Ortholog of  Ceres SEQ ID NO 14308586 as cited in SEQ ID NO 55143
  misc_feature (1)..(1490): Ortholog of  Ceres SEQ ID NO 14314308 as cited in SEQ ID NO 57259
  misc_feature (1)..(1490): Ortholog of  Ceres SEQ ID NO 15226216 as cited in SEQ ID NO 62291
agaaacatcatgatatgatatttttctcaagtcttttggtgttggagaagaagagagaagaagaacttggtttctctctctaaaagtttattgcttggctccataaaaagtgcacctttttctctcttttctttctctctctctctctctctctctctctctctcacttctcctcggatgcactattgtccgtgagatcagagattcaccctctttagattttgcgcagaaacttttgcccacaattttgtattcgtcaaatctgagctgagatctctagagtgagaaaatgagcatcactaatgaagaagcagtgaagcaattgcgtgctttaatggaagatgttgatgattcactcagagagtcgtatcggaacattcatcaagggtatccgacagagaatttgttacgctttcttaaagccagggatgggaatgtccagaaagctcataaaatgttgctcgagtgtttggaatggaggactcaaaacgagattgacaagatactaactaaacccattgttcctgttgacctgtacagaggaatcagagacacacaacttgtcggtgtgtctggttactctaaagagggtctccctgtcattgccattggtgtggggcttagcacatatgataaagcctccgttcactactatgtacagtctcacattcaaatgaatgagtaccgggatcgtgttgtattgccatctgcttcaaagaaacagggacgaccaatttgcacttgtttgaaaattttggatatgtctggtttaaagctttcagctttaagtcaaattaagttaatgactgctataacaacaatagatgatttgaactatccagagaagacagagacatactatgttgtcaatgtcccgtacatattctctgcttgttggaaaaccataaagcctctgttgcaagagagaacaaagaagaagattcaagttctgaaaggttgcgggaaagatgagttgctaaagataatggactatgagtctctcccacatttctgtagaagagaagggtctggatctggtaggcatatctcaaatggaacagtagacaattgtttctctctggatcactctttccaccaagacctttatgattatgtcaagcagcaggctctggttaaaggatcaggtgcaccgatcagacatggttcagtccacgttaagttccctgagccagacaccgaaggcaacaagatcttcgataccttagaaaatgagttccagaagcttggaaatgaccagaagatctgagtgatctacaacccttataacacgaattgcccataagaaaccggaatttgtctctggttgatgagcagtatttaagataagaatcaatcacctttacttgtattactagtttcgcttgcatcagctcgatgcaggttttgtttaaaaagaagatggaacacaatttcctcggaatggatcttttgatctagtaccattatatatatagaactcatttctattt

SEQ ID NO: 23421 - protein, 325 aa, Arabidopsis thaliana
  peptide (1)..(325): Ceres Seq. ID no. 13497464
MSITNEEAVKQLRALMEDVDDSLRESYRNIHQGYPTENLLRFLKARDGNVQKAHKMLLECLEWRTQNEIDKILTKPIVPVDLYRGIRDTQLVGVSGYSKEGLPVIAIGVGLSTYDKASVHYYVQSHIQMNEYRDRVVLPSASKKQGRPICTCLKILDMSGLKLSALSQIKLMTAITTIDDLNYPEKTETYYVVNVPYIFSACWKTIKPLLQERTKKKIQVLKGCGKDELLKIMDYESLPHFCRREGSGSGRHISNGTVDNCFSLDHSFHQDLYDYVKQQALVKGSGAPIRHGSVHVKFPEPDTEGNKIFDTLENEFQKLGNDQKI

SEQ ID NO: 23422 - protein, 310 aa, Arabidopsis thaliana
  peptide (1)..(310): Ceres Seq. ID no. 13497465
MEDVDDSLRESYRNIHQGYPTENLLRFLKARDGNVQKAHKMLLECLEWRTQNEIDKILTKPIVPVDLYRGIRDTQLVGVSGYSKEGLPVIAIGVGLSTYDKASVHYYVQSHIQMNEYRDRVVLPSASKKQGRPICTCLKILDMSGLKLSALSQIKLMTAITTIDDLNYPEKTETYYVVNVPYIFSACWKTIKPLLQERTKKKIQVLKGCGKDELLKIMDYESLPHFCRREGSGSGRHISNGTVDNCFSLDHSFHQDLYDYVKQQALVKGSGAPIRHGSVHVKFPEPDTEGNKIFDTLENEFQKLGNDQKI

SEQ ID NO: 23423 - protein, 270 aa, Arabidopsis thaliana
  peptide (1)..(270): Ceres Seq. ID no. 13497466
MLLECLEWRTQNEIDKILTKPIVPVDLYRGIRDTQLVGVSGYSKEGLPVIAIGVGLSTYDKASVHYYVQSHIQMNEYRDRVVLPSASKKQGRPICTCLKILDMSGLKLSALSQIKLMTAITTIDDLNYPEKTETYYVVNVPYIFSACWKTIKPLLQERTKKKIQVLKGCGKDELLKIMDYESLPHFCRREGSGSGRHISNGTVDNCFSLDHSFHQDLYDYVKQQALVKGSGAPIRHGSVHVKFPEPDTEGNKIFDTLENEFQKLGNDQKI

SEQ ID NO: 23424 - DNA, 1129 bp, Arabidopsis thaliana
  misc_feature (1)..(1129): Ceres Seq. ID no. 12325093
  misc_feature (1)..(1129): Ortholog of  Ceres SEQ ID NO 13597551 as cited in SEQ ID NO 65266
aagcttcccaaagcgtttgttttatcctctcagagagctttctttagtgatggcggcgcttatccggtgttgctcctccttctctcatacttccggtggccaaccaccgccgcgtgacaagtctcgagctccagagattggaaaatttgctacatctattggctactcagtagtcagaaaacctggggatcatcctcctttctccaaaattatacattcgtcttcacagcctaaggagcgacaaggaaagggaatcttacaaacgccatttgccagtgtgggatctcttgacaagttttcagcttttgagggaattgggaggctcaaattaccggtgatggcagtgttgttgacaaactcccttcagatggctacacctcttgaagctttggctgctgagatatgtgagcctgagagctccatgttcagcatgcctattttgttgcttgttgctcttattggagccaccgttggagggttgcttgctcggcagaggaaaggggagttacagaggttgaatgaacaactacgacagattaacgcagctcttaggagacaagccaaaatcgagtcttatgcaccaagcttgagttatgctccagtgggagcaagaatcccagatagtgaaatcattgtggaaccaaagaaacaagagttgatttccaagttgaaaacaggaaaaacctttcttaggaaccaagaaccagagaaagcttatacagagttcaagatagctttggaacttgcccagagtctcaaagaccccaccgaagaaaagaaggctgcaagaggcctaggcgcctcgctgcagcgccaagggaagtatagggaagccatacagtatcactccatggttctagccatctcaaagagggaaagtgaagattctggaatcactgaagcatatggagctattgcagactgttataccgagctgggagatctcgagaaagctggaaagttctatgatacgtacattgctcggttagagactgactgatccttccgcaatgtttttttctttgttgtctgtttatgttcatgtaaaatcacatagaatggatatccaaatcccttttattgaatgtaattcgcttgtcttacaatccatgggaatacataactaatc

SEQ ID NO: 23425 - protein, 332 aa, Arabidopsis thaliana
  peptide (1)..(332): Ceres Seq. ID no. 12325094
SFPKRLFYPLRELSLVMAALIRCCSSFSHTSGGQPPPRDKSRAPEIGKFATSIGYSVVRKPGDHPPFSKIIHSSSQPKERQGKGILQTPFASVGSLDKFSAFEGIGRLKLPVMAVLLTNSLQMATPLEALAAEICEPESSMFSMPILLLVALIGATVGGLLARQRKGELQRLNEQLRQINAALRRQAKIESYAPSLSYAPVGARIPDSEIIVEPKKQELISKLKTGKTFLRNQEPEKAYTEFKIALELAQSLKDPTEEKKAARGLGASLQRQGKYREAIQYHSMVLAISKRESEDSGITEAYGAIADCYTELGDLEKAGKFYDTYIARLETD

SEQ ID NO: 23426 - protein, 316 aa, Arabidopsis thaliana
  peptide (1)..(316): Ceres Seq. ID no. 12325095
MAALIRCCSSFSHTSGGQPPPRDKSRAPEIGKFATSIGYSVVRKPGDHPPFSKIIHSSSQPKERQGKGILQTPFASVGSLDKFSAFEGIGRLKLPVMAVLLTNSLQMATPLEALAAEICEPESSMFSMPILLLVALIGATVGGLLARQRKGELQRLNEQLRQINAALRRQAKIESYAPSLSYAPVGARIPDSEIIVEPKKQELISKLKTGKTFLRNQEPEKAYTEFKIALELAQSLKDPTEEKKAARGLGASLQRQGKYREAIQYHSMVLAISKRESEDSGITEAYGAIADCYTELGDLEKAGKFYDTYIARLETD

SEQ ID NO: 23427 - protein, 220 aa, Arabidopsis thaliana
  peptide (1)..(220): Ceres Seq. ID no. 12325096
MAVLLTNSLQMATPLEALAAEICEPESSMFSMPILLLVALIGATVGGLLARQRKGELQRLNEQLRQINAALRRQAKIESYAPSLSYAPVGARIPDSEIIVEPKKQELISKLKTGKTFLRNQEPEKAYTEFKIALELAQSLKDPTEEKKAARGLGASLQRQGKYREAIQYHSMVLAISKRESEDSGITEAYGAIADCYTELGDLEKAGKFYDTYIARLETD

SEQ ID NO: 23428 - DNA, 1763 bp, Arabidopsis thaliana
  misc_feature (1)..(1763): Ceres Seq. ID no. 12327473
  misc_feature (1)..(1763): Ortholog of  Ceres SEQ ID NO 14312347 as cited in SEQ ID NO 55274
aaatttctgcctcaacgatgaacagggtgctcgcaaggaatcttaggacaagtgtctgtggaacaaggattttgcagaggacttgttcgactgttgtgacacatgatgtttctacttcttgttccaatgagagcaatgcattaaataattccactgacgatggtccacaacatgacattgctattgttggtggtggaatggttggaatcgctttagctgcttcattggccagcaagccattgacaaagcacttgaatgtcgctattattgacaataatcctcttttggggagaagaaatatcatagagaaagggcatcaacctgatcccagagtcagtacagtcacacctgcaacaatatccttcctcaaagatattggtgcctggaaatacattgagcaacagcgacatgcgtattttgataagatgcaggtatgggactatacaggccttggatatacaagatacaatgctaatgatgtacatcaagatgttttggggtgtgtagtggagaataaagttcttcagagttctcagctatcttgtgtacaggaatcagatctccagaagactgtttatcccgcgaggttaaatgcgatggatatgctacctagctcttcgttgacaggtcttggtgaagtaccatccacaacagacttgttcatgcgaggacgccttgctaagctggagctaagcgatggaaatcgcgtctacgcaaaactggtggtaggcgctgatgggtctaagtcgcgagtaagggagttggctgggatcaaaacgactggatggaactactcacagaacgctataatttgtactgttgagcatacagccgaaaactacacagcatggcaacggtttttacccaatggcccaatcgcacttcttcccattggtgacaagtttagcaacatagtatggaccatggacccaaaagaggcatcagatcgaaaattgatgaacgaggatgacttcatcaaagctgtaaatgatgctctggattctggatatggtcctaatccagagactacaagttcacgggatagtctctcttggcttacaggagatgcgaccatatctgccaaagagaggtttgaaactcctcccaaggttgtgaagctttcttcagagagaatgatgttccctttgtctttaagtcacgcaaaagactatgtgtcaaaacgtgtggctcttgttggtgactcagctcatacagttcacccgttggctggtcaaggagtaaatttaggatttgcagatgcgtgtgctctctccaaagctatagcagagggcattgctcttggtactgatataggcgaggcgaatctgctcaaacgttatgaagcagagagaaaacctgcaaatatagcaatgatggcggttttagacggaatccagaagatgtactcggtggatttcggaccgctgaatgctctaagagcagctgcattccacggggctcactacatttcgccgcttaaaaagcgtatcatatcttatgcttcaggagagcaatctttgccgctattttcttgaagaatgcgagggattgttcgctttgttctcaaaatactctgcatcatctcttcttttgccttatatagaaatttaatggtgactgaaaacagctcccagagcccatgttttaaataagtctgttgtatttagttttttatgtttcagtcaataaaatactaaaatgttacataatctgatatcaaaacaatgtaaaatgtgaatactgtgatttaaattttgatgtcc

SEQ ID NO: 23429 - protein, 510 aa, Arabidopsis thaliana
  peptide (1)..(510): Ceres Seq. ID no. 12327474
ISASTMNRVLARNLRTSVCGTRILQRTCSTVVTHDVSTSCSNESNALNNSTDDGPQHDIAIVGGGMVGIALAASLASKPLTKHLNVAIIDNNPLLGRRNIIEKGHQPDPRVSTVTPATISFLKDIGAWKYIEQQRHAYFDKMQVWDYTGLGYTRYNANDVHQDVLGCVVENKVLQSSQLSCVQESDLQKTVYPARLNAMDMLPSSSLTGLGEVPSTTDLFMRGRLAKLELSDGNRVYAKLVVGADGSKSRVRELAGIKTTGWNYSQNAIICTVEHTAENYTAWQRFLPNGPIALLPIGDKFSNIVWTMDPKEASDRKLMNEDDFIKAVNDALDSGYGPNPETTSSRDSLSWLTGDATISAKERFETPPKVVKLSSERMMFPLSLSHAKDYVSKRVALVGDSAHTVHPLAGQGVNLGFADACALSKAIAEGIALGTDIGEANLLKRYEAERKPANIAMMAVLDGIQKMYSVDFGPLNALRAAAFHGAHYISPLKKRIISYASGEQSLPLFS

SEQ ID NO: 23430 - protein, 505 aa, Arabidopsis thaliana
  peptide (1)..(505): Ceres Seq. ID no. 12327475
MNRVLARNLRTSVCGTRILQRTCSTVVTHDVSTSCSNESNALNNSTDDGPQHDIAIVGGGMVGIALAASLASKPLTKHLNVAIIDNNPLLGRRNIIEKGHQPDPRVSTVTPATISFLKDIGAWKYIEQQRHAYFDKMQVWDYTGLGYTRYNANDVHQDVLGCVVENKVLQSSQLSCVQESDLQKTVYPARLNAMDMLPSSSLTGLGEVPSTTDLFMRGRLAKLELSDGNRVYAKLVVGADGSKSRVRELAGIKTTGWNYSQNAIICTVEHTAENYTAWQRFLPNGPIALLPIGDKFSNIVWTMDPKEASDRKLMNEDDFIKAVNDALDSGYGPNPETTSSRDSLSWLTGDATISAKERFETPPKVVKLSSERMMFPLSLSHAKDYVSKRVALVGDSAHTVHPLAGQGVNLGFADACALSKAIAEGIALGTDIGEANLLKRYEAERKPANIAMMAVLDGIQKMYSVDFGPLNALRAAAFHGAHYISPLKKRIISYASGEQSLPLFS

SEQ ID NO: 23431 - protein, 445 aa, Arabidopsis thaliana
  peptide (1)..(445): Ceres Seq. ID no. 12327476
MVGIALAASLASKPLTKHLNVAIIDNNPLLGRRNIIEKGHQPDPRVSTVTPATISFLKDIGAWKYIEQQRHAYFDKMQVWDYTGLGYTRYNANDVHQDVLGCVVENKVLQSSQLSCVQESDLQKTVYPARLNAMDMLPSSSLTGLGEVPSTTDLFMRGRLAKLELSDGNRVYAKLVVGADGSKSRVRELAGIKTTGWNYSQNAIICTVEHTAENYTAWQRFLPNGPIALLPIGDKFSNIVWTMDPKEASDRKLMNEDDFIKAVNDALDSGYGPNPETTSSRDSLSWLTGDATISAKERFETPPKVVKLSSERMMFPLSLSHAKDYVSKRVALVGDSAHTVHPLAGQGVNLGFADACALSKAIAEGIALGTDIGEANLLKRYEAERKPANIAMMAVLDGIQKMYSVDFGPLNALRAAAFHGAHYISPLKKRIISYASGEQSLPLFS

SEQ ID NO: 23432 - DNA, 1414 bp, Arabidopsis thaliana
  misc_feature (1)..(1414): Ceres Seq. ID no. 13487106
  misc_feature (1)..(1414): Ortholog of  Ceres SEQ ID NO 14316382 as cited in SEQ ID NO 57756
acggcaacttttgtggttagtcatataagaacaaccgcgttacaaacttctctcgtctttcctggaaatttctgtccacaaatattagtctttaattttcgaaacttctctcaggcgaattcaagtttcatagttttggtctagtttttgtccaccgatctatctctttagttgaaacttatcagaatggctcgtccacaagaccctccacgtggtttcttcccttttggaaaccccttcaaaaatctatcttcgaagaactcggtactctcctcaaagcttctcccactcctgaacaattttgagaccaacttagcatcttctattagtaagcttgtccctaaggaaaagagcgatatcctgactgtctcatggatgaaacaagctatggaatctctttgcgagacacataatggtatcaagacccttataaccgatcttgagcttcctgtatcagattgggaggataaatgggttgatgtctatcttgacattagtgtgaagcttcttgatctctgcaatgcctttagctctgagcttacccgtctcaaccaaggtcatctcttactccagtttgctctgcataacttggaggccaactctcctcagaatctgtcgaaagctcagtcatcactagacagttggaagcaacacattgtctccaagaacccgagaatagaaaattgccgtgcaatcttgagcagccttgttcagaccttgaatctccccaaggtgaaaaactcggccaaagggaaagtcttgatgagagctctatatggtgtaaaggttaagaccttatacatctctggtgtttttgctgcagcgttctcaggttcatcgcagaatctgatgtaccttacagtctcaaacgagcttccatgggcacaatcattcatggaagtgcagaacaccatgaacgcagaaatcaagaacatatttttgtcagacgggttaacggttctgaaagagctagaggcagttgcttcaggtgtcaagaaactctaccctgcgatccaacaaggatcaatagatcccatatcgctgcagccactgaaggactcggtcacagaattatcgaatgggatagatcttgtttcgaaagaagtggattgtttcttcaagattctgttatcggggagagacacattactagagaacctaaggtcgatgggtgcatcaaccctacaggcaacatcgccaaaaaaggctgccggaaaaaattacagaggattctgataaactataaatgtttgtacagatggttttacttcaagtgttccatcttcttggtattgaatgtattattaggtttttgtgcaatcgtagtcgtttgtatgagatgctttgaaagtagtagttgtataagtaaaggttttaccaacttatctatatatattatgaatatctttgaagc

SEQ ID NO: 23433 - protein, 349 aa, Arabidopsis thaliana
  peptide (1)..(349): Ceres Seq. ID no. 13487107
MARPQDPPRGFFPFGNPFKNLSSKNSVLSSKLLPLLNNFETNLASSISKLVPKEKSDILTVSWMKQAMESLCETHNGIKTLITDLELPVSDWEDKWVDVYLDISVKLLDLCNAFSSELTRLNQGHLLLQFALHNLEANSPQNLSKAQSSLDSWKQHIVSKNPRIENCRAILSSLVQTLNLPKVKNSAKGKVLMRALYGVKVKTLYISGVFAAAFSGSSQNLMYLTVSNELPWAQSFMEVQNTMNAEIKNIFLSDGLTVLKELEAVASGVKKLYPAIQQGSIDPISLQPLKDSVTELSNGIDLVSKEVDCFFKILLSGRDTLLENLRSMGASTLQATSPKKAAGKNYRGF

SEQ ID NO: 23434 - protein, 286 aa, Arabidopsis thaliana
  peptide (1)..(286): Ceres Seq. ID no. 13487108
MKQAMESLCETHNGIKTLITDLELPVSDWEDKWVDVYLDISVKLLDLCNAFSSELTRLNQGHLLLQFALHNLEANSPQNLSKAQSSLDSWKQHIVSKNPRIENCRAILSSLVQTLNLPKVKNSAKGKVLMRALYGVKVKTLYISGVFAAAFSGSSQNLMYLTVSNELPWAQSFMEVQNTMNAEIKNIFLSDGLTVLKELEAVASGVKKLYPAIQQGSIDPISLQPLKDSVTELSNGIDLVSKEVDCFFKILLSGRDTLLENLRSMGASTLQATSPKKAAGKNYRGF

SEQ ID NO: 23435 - protein, 282 aa, Arabidopsis thaliana
  peptide (1)..(282): Ceres Seq. ID no. 13487109
MESLCETHNGIKTLITDLELPVSDWEDKWVDVYLDISVKLLDLCNAFSSELTRLNQGHLLLQFALHNLEANSPQNLSKAQSSLDSWKQHIVSKNPRIENCRAILSSLVQTLNLPKVKNSAKGKVLMRALYGVKVKTLYISGVFAAAFSGSSQNLMYLTVSNELPWAQSFMEVQNTMNAEIKNIFLSDGLTVLKELEAVASGVKKLYPAIQQGSIDPISLQPLKDSVTELSNGIDLVSKEVDCFFKILLSGRDTLLENLRSMGASTLQATSPKKAAGKNYRGF

SEQ ID NO: 23436 - DNA, 677 bp, Arabidopsis thaliana
  misc_feature (1)..(677): Ceres Seq. ID no. 12561632
  misc_feature (1)..(677): Ortholog of  Ceres SEQ ID NO 13599506 as cited in SEQ ID NO 334
  misc_feature (1)..(677): Ortholog of  Ceres SEQ ID NO 13598157 as cited in SEQ ID NO 61570
  misc_feature (1)..(677): Ortholog of  Ceres SEQ ID NO 15175549 as cited in SEQ ID NO 0
aaaccatgtcctatatctctccttcacattcatcccaaaacattacaaaacgttacaatggcttctaaggctcttgcagttacagctcttcttattacacttaatcttcttttcttcacctttgtaacctccacaaaatgtccaccaactactcctaaacccccaaaaaccccgaaatcgcctaagaaggctcctgccgtgaaacccacttgtcctaccgacacacttaagcttggtgtttgcgcagacttattgggcctagttaacgttgttgttggttctccaccaaagactccttgttgtacacttcttcaaggtcttgctaatcttgaagctgcggtttgtctctgcaccgctcttaaagccaatgtcttggggattaatctcaatgttcctattgatctaaccttgctgttgaactattgtggcaagaaagttcctcatggtttccaatgttcttgaagatttgagactttaaaagagaaaaatctctttggtttgctatgtttttatatgtttgtttctactgttatctattgtttttgtgagaaaaagctttgttctgtcactgttgagtttgatgtaatgcttgagcttgttcatgatagaacctttgttctctcaatattgagtttgatgtaatgcttgagcttgttaatggattttatgttcttagt

SEQ ID NO: 23437 - protein, 153 aa, Arabidopsis thaliana
  peptide (1)..(153): Ceres Seq. ID no. 12561633
KPCPISLLHIHPKTLQNVTMASKALAVTALLITLNLLFFTFVTSTKCPPTTPKPPKTPKSPKKAPAVKPTCPTDTLKLGVCADLLGLVNVVVGSPPKTPCCTLLQGLANLEAAVCLCTALKANVLGINLNVPIDLTLLLNYCGKKVPHGFQCS

SEQ ID NO: 23438 - protein, 134 aa, Arabidopsis thaliana
  peptide (1)..(134): Ceres Seq. ID no. 12561634
MASKALAVTALLITLNLLFFTFVTSTKCPPTTPKPPKTPKSPKKAPAVKPTCPTDTLKLGVCADLLGLVNVVVGSPPKTPCCTLLQGLANLEAAVCLCTALKANVLGINLNVPIDLTLLLNYCGKKVPHGFQCS

SEQ ID NO: 23439 - DNA, 1067 bp, Arabidopsis thaliana
  misc_feature (1)..(1067): Ceres Seq. ID no. 12394725
  misc_feature (1)..(1067): Ortholog of  Ceres SEQ ID NO 14312777 as cited in SEQ ID NO 55573
  misc_feature (1)..(1067): Ortholog of  Ceres SEQ ID NO 13595190 as cited in SEQ ID NO 55916
  misc_feature (1)..(1067): Ortholog of  Ceres SEQ ID NO 14302004 as cited in SEQ ID NO 63437
  misc_feature (1)..(1067): Ortholog of  Ceres SEQ ID NO 13599456 as cited in SEQ ID NO 0
aatattttcattaatcgattctcaaagtcaagcaaaaaaaacgaaacaatggatgcgttctcttccttcttcgattctcaacctggtagcagaagctggagctatgattctcttaaaaacttccgtcagatttctccagccgttcagaatcatcttaaacgggtttatttgaccttatgttgtgctcttgtggcgtctgcctttggagcttacctccatgtgctctggaatatcggcggtattcttacaacgattggatgtattggaactatgatttggctcctttcatgtcctccttatgaacaccaaaaaaggctttctcttctgtttgtgtctgctgttcttgaaggtgcttctgttggccccttgatcaaagtggcaattgatgttgacccaagcatccttatcactgcatttgttggaactgcgatagcgtttgtctgtttctcagcagcagcaatgttagcaagacgcagggagtatctctaccttggaggactgctttcatctggcttgtctatgctaatgtggctccagtttgcctcttcaatctttggtggctctgcatctatctttaagtttgagttgtactttggacttttgatctttgtgggatacatggtggtggacacacaagagattatagaaaaggcacacctcggtgacatggactatgtaaaacattcgttgacccttttcactgactttgtagctgtgtttgttcggattctcatcataatgttgaagaactcagcagataaagaagagaagaagaagaaaaggagaaactgaggggatgtaaagtaaatttaactttatggttgttatcgtgtgtggccactttgaagatattacttgttagcactctctattggtgaccagacatgtttccactaaaaaggatctgcttgtttcacttctgcacaagtaccatcttcagattgtaaatgactcgagtgttgttcttcttttcataaacttttgttctttaagagtttggttctactgattgcatcttaccaagctaagaataatgtaggaaaatgataatcctgtttaaattttcc

SEQ ID NO: 23440 - protein, 263 aa, Arabidopsis thaliana
  peptide (1)..(263): Ceres Seq. ID no. 12394726
NIFINRFSKSSKKNETMDAFSSFFDSQPGSRSWSYDSLKNFRQISPAVQNHLKRVYLTLCCALVASAFGAYLHVLWNIGGILTTIGCIGTMIWLLSCPPYEHQKRLSLLFVSAVLEGASVGPLIKVAIDVDPSILITAFVGTAIAFVCFSAAAMLARRREYLYLGGLLSSGLSMLMWLQFASSIFGGSASIFKFELYFGLLIFVGYMVVDTQEIIEKAHLGDMDYVKHSLTLFTDFVAVFVRILIIMLKNSADKEEKKKKRRN

SEQ ID NO: 23441 - protein, 247 aa, Arabidopsis thaliana
  peptide (1)..(247): Ceres Seq. ID no. 12394727
MDAFSSFFDSQPGSRSWSYDSLKNFRQISPAVQNHLKRVYLTLCCALVASAFGAYLHVLWNIGGILTTIGCIGTMIWLLSCPPYEHQKRLSLLFVSAVLEGASVGPLIKVAIDVDPSILITAFVGTAIAFVCFSAAAMLARRREYLYLGGLLSSGLSMLMWLQFASSIFGGSASIFKFELYFGLLIFVGYMVVDTQEIIEKAHLGDMDYVKHSLTLFTDFVAVFVRILIIMLKNSADKEEKKKKRRN

SEQ ID NO: 23442 - protein, 173 aa, Arabidopsis thaliana
  peptide (1)..(173): Ceres Seq. ID no. 12394728
MIWLLSCPPYEHQKRLSLLFVSAVLEGASVGPLIKVAIDVDPSILITAFVGTAIAFVCFSAAAMLARRREYLYLGGLLSSGLSMLMWLQFASSIFGGSASIFKFELYFGLLIFVGYMVVDTQEIIEKAHLGDMDYVKHSLTLFTDFVAVFVRILIIMLKNSADKEEKKKKRRN

SEQ ID NO: 23443 - DNA, 1104 bp, Arabidopsis thaliana
  misc_feature (1)..(1104): Ceres Seq. ID no. 12335306
  misc_feature (1)..(1104): Ortholog of  Ceres SEQ ID NO 13600141 as cited in SEQ ID NO 0
aacaaaagacaaaaactttcaattatgtgaagaatcgtacacctttcttatcgtcttctccatcgtttctccctgaagatttgttctactactctttttgggttcagtttcagaatttaaacaagatgcagctcaaagtccctgaacatcaggttgcaggacacattgctaaagacgggaagcctggtcctctcgtagatgacaagggtcggttcttcaagccacttcagggcgattctcgtggtgaaatcgaggtaaagttctacgaatctttctcctcaaacacagaggttccagaacacatccatagatatttcccggtgtatcacggcactcaagcagttgaaggttctgatggagcagccatgatggtgttggaaaatcttcttgcagaatactcaaaaccatcagtaatggatgttaagatgggttcgagaacatggtatcctgatgcatctgaagaatacatccaaaaatgtttgaagaaagacacgggtaccacaaccgtgtcatcgggtttcaggatctctggtttcgaagtgtatgatcacaaagaatcgagtttctggaagcccgagaggaagcttcttcgcgggctcgatgtagatggagcgagattgactctgaggaagtttgtatcatctaactcactttcggacactggctcgaaacctgactctgcttttgcctcgagtgtttacggcggttcccacgggatcttaacgcagttgctggaactcaagacctggttcgagaaccaaacgctctaccatttcaactcttgttcgattttaatggtctatgagaatgaatccatcttgaagggaaatgatgatgatgctagaccacaagtcaagctggtggattttgctcatgttcttgatggtaatggtgtcattgaccataacttcttgggtggtctttgctctttcataaacttcattcgtgagattcttcagagcccagatgagtctgcagattcttagatttaagttaatttgtttgttatggctttggctgattccaatttttggatataaacttatgtttccttcacatatgtacttgattacctaaagagcagaatacattcgtactcttttc

SEQ ID NO: 23444 - protein, 327 aa, Arabidopsis thaliana
  peptide (1)..(327): Ceres Seq. ID no. 12335307
QKTKTFNYVKNRTPFLSSSPSFLPEDLFYYSFWVQFQNLNKMQLKVPEHQVAGHIAKDGKPGPLVDDKGRFFKPLQGDSRGEIEVKFYESFSSNTEVPEHIHRYFPVYHGTQAVEGSDGAAMMVLENLLAEYSKPSVMDVKMGSRTWYPDASEEYIQKCLKKDTGTTTVSSGFRISGFEVYDHKESSFWKPERKLLRGLDVDGARLTLRKFVSSNSLSDTGSKPDSAFASSVYGGSHGILTQLLELKTWFENQTLYHFNSCSILMVYENESILKGNDDDARPQVKLVDFAHVLDGNGVIDHNFLGGLCSFINFIREILQSPDESADS

SEQ ID NO: 23445 - protein, 286 aa, Arabidopsis thaliana
  peptide (1)..(286): Ceres Seq. ID no. 12335308
MQLKVPEHQVAGHIAKDGKPGPLVDDKGRFFKPLQGDSRGEIEVKFYESFSSNTEVPEHIHRYFPVYHGTQAVEGSDGAAMMVLENLLAEYSKPSVMDVKMGSRTWYPDASEEYIQKCLKKDTGTTTVSSGFRISGFEVYDHKESSFWKPERKLLRGLDVDGARLTLRKFVSSNSLSDTGSKPDSAFASSVYGGSHGILTQLLELKTWFENQTLYHFNSCSILMVYENESILKGNDDDARPQVKLVDFAHVLDGNGVIDHNFLGGLCSFINFIREILQSPDESADS

SEQ ID NO: 23446 - protein, 206 aa, Arabidopsis thaliana
  peptide (1)..(206): Ceres Seq. ID no. 12335309
MMVLENLLAEYSKPSVMDVKMGSRTWYPDASEEYIQKCLKKDTGTTTVSSGFRISGFEVYDHKESSFWKPERKLLRGLDVDGARLTLRKFVSSNSLSDTGSKPDSAFASSVYGGSHGILTQLLELKTWFENQTLYHFNSCSILMVYENESILKGNDDDARPQVKLVDFAHVLDGNGVIDHNFLGGLCSFINFIREILQSPDESADS

SEQ ID NO: 23447 - DNA, 1579 bp, Arabidopsis thaliana
  misc_feature (1)..(1579): Ceres Seq. ID no. 12335526
  misc_feature (1)..(1579): Ortholog of  Ceres SEQ ID NO 13595870 as cited in SEQ ID NO 62101
  misc_feature (1)..(1579): Ortholog of  Ceres SEQ ID NO 13590241 as cited in SEQ ID NO 63878
  misc_feature (1)..(1579): Ortholog of  Ceres SEQ ID NO 13657939 as cited in SEQ ID NO 66349
aaattagaacttctttaccctttcgagaaaaaagaaaagaaaaaagaacttgttttcctcttcagcaagacacataaatcgtaatccattttctctcaactttaggaatctcaaatctccgatttggaaatccggcgacaatggtgagagatattgaagatgagattagagacgagaagaatcctcgtcctcttgatgaagatgatatcgctctcctcaagacttatgggttagggccttactctgcacctatcaagaaagtggagaaagaaattaaggatctcgccaagaagatcaacgatctatgtggtatcaaggagtctgatactggtttagctcctcccagtcaatgggatcttgtatctgataagcaaatgatgcaagaagagcaacctctgcaggttgcgagatgcacaaagattataagtccaaacactgaagacgccaaatacgtcataaatgtcaaacaaattgctaagtttgttgttggacttggcgataaagtttctcccactgatattgaggaaggcatgcgtgttggagttgatcggaataaatatcagattcagattcctctacctcccaaaatcgatcctagcgtgaccatgatgactgtcgaagagaaacctgatgtaacttacaatgatgttggtggatgcaaggagcagattgagaagatgcgagaggttgttgaactgccaatgcttcatccagagaaatttgtgaagcttggaatagatcctcccaagggtgttctctgctacggacctcctggtactggtaaaactcttctggctagagctgtggccaacagaaccgatgcttgctttatcagggttattggaagtgagcttgttcagaagtatgttggtgaaggagctaggatggttcgtgaactgtttcagatggcacggtccaagaaagcctgcattgtgttctttgacgaagttgatgccattggtggtgcaagatttgatgatggtgttggtggtgataacgaagtccaacgtactatgcttgagattgtgaatcagcttgatgggtttgacgcacgtggtaacatcaaggttcttatggcaacaaacaggcctgacacactagacccagctcttttacgtcctggacgtcttgaccgtaaggttgagtttggtctacctgacctggagagcagaacacagatcttcaagattcacacaagaaccatgaactgcgaaagagacatccgtttcgaactccttgctcgcctctgcccaaactcaacgggagctgatattcgaagtgtatgcactgaagcaggaatgtacgcaatcagagctaggagaaagactgtgactgagaaagactttctagacgcagtgaacaaagtcattaaaggttaccaaaagttcagtgccactcccaagtatatggtctacaattagagagattgagacagatagaagaactccgaaataaaactccgaaacactctttgttctttgtttgtgtctcttcccttcaagctcttttgtagtacttgtttcacaacttattccagtaactcgggtttatcttcttcaatgtctactacttttggatt

SEQ ID NO: 23448 - protein, 426 aa, Arabidopsis thaliana
  peptide (1)..(426): Ceres Seq. ID no. 12335527
MVRDIEDEIRDEKNPRPLDEDDIALLKTYGLGPYSAPIKKVEKEIKDLAKKINDLCGIKESDTGLAPPSQWDLVSDKQMMQEEQPLQVARCTKIISPNTEDAKYVINVKQIAKFVVGLGDKVSPTDIEEGMRVGVDRNKYQIQIPLPPKIDPSVTMMTVEEKPDVTYNDVGGCKEQIEKMREVVELPMLHPEKFVKLGIDPPKGVLCYGPPGTGKTLLARAVANRTDACFIRVIGSELVQKYVGEGARMVRELFQMARSKKACIVFFDEVDAIGGARFDDGVGGDNEVQRTMLEIVNQLDGFDARGNIKVLMATNRPDTLDPALLRPGRLDRKVEFGLPDLESRTQIFKIHTRTMNCERDIRFELLARLCPNSTGADIRSVCTEAGMYAIRARRKTVTEKDFLDAVNKVIKGYQKFSATPKYMVYN

SEQ ID NO: 23449 - protein, 348 aa, Arabidopsis thaliana
  peptide (1)..(348): Ceres Seq. ID no. 12335528
MMQEEQPLQVARCTKIISPNTEDAKYVINVKQIAKFVVGLGDKVSPTDIEEGMRVGVDRNKYQIQIPLPPKIDPSVTMMTVEEKPDVTYNDVGGCKEQIEKMREVVELPMLHPEKFVKLGIDPPKGVLCYGPPGTGKTLLARAVANRTDACFIRVIGSELVQKYVGEGARMVRELFQMARSKKACIVFFDEVDAIGGARFDDGVGGDNEVQRTMLEIVNQLDGFDARGNIKVLMATNRPDTLDPALLRPGRLDRKVEFGLPDLESRTQIFKIHTRTMNCERDIRFELLARLCPNSTGADIRSVCTEAGMYAIRARRKTVTEKDFLDAVNKVIKGYQKFSATPKYMVYN

SEQ ID NO: 23450 - protein, 347 aa, Arabidopsis thaliana
  peptide (1)..(347): Ceres Seq. ID no. 12335529
MQEEQPLQVARCTKIISPNTEDAKYVINVKQIAKFVVGLGDKVSPTDIEEGMRVGVDRNKYQIQIPLPPKIDPSVTMMTVEEKPDVTYNDVGGCKEQIEKMREVVELPMLHPEKFVKLGIDPPKGVLCYGPPGTGKTLLARAVANRTDACFIRVIGSELVQKYVGEGARMVRELFQMARSKKACIVFFDEVDAIGGARFDDGVGGDNEVQRTMLEIVNQLDGFDARGNIKVLMATNRPDTLDPALLRPGRLDRKVEFGLPDLESRTQIFKIHTRTMNCERDIRFELLARLCPNSTGADIRSVCTEAGMYAIRARRKTVTEKDFLDAVNKVIKGYQKFSATPKYMVYN

SEQ ID NO: 23451 - DNA, 1668 bp, Arabidopsis thaliana
  misc_feature (1)..(1668): Ceres Seq. ID no. 13504820
  misc_feature (1)..(1668): Ortholog of  Ceres SEQ ID NO 15177718 as cited in SEQ ID NO 0
acctatagtttcttcttctgaaaatcagcaacaaactacaaatcatccaatgatagaatttcagctttaattatcaaacaaattaaagataaccccattgataatatcgccacgtctcatcggatgaaatagtactatctgacacgacacgaatctcttatgagagaaacagaagagcacggaatctccataaatcaaaatacatgatcggagctttctcactatcaaaagctttccggcgacaaaaccaaccatctcctccttatctccaccatgatctcactccactcatcagccattaaagcctctctctacggctctttcccttcttcgttacgatcaacactctctgtttccttctctgctggatctcttattcggcttccttccgtcggcaagcgcaatctctccgtcgtcgtttcctctggaagagactcctcgatgtcatcaaacaatgtttctcgcggatcgtcttcaaaggttgctgctgaatctttcttcaggagtgtcttagggcagatggaaactgtttacctaaatcgaaacccgacgcctaaatccgtcttggagcttgttcgatctgttgatgaccagcaactttgctatgatcatctcgctttcagaacgtttgggattggtggttatgggattgactcgcttgcaagctttttccttgactatggatatacaccgatggatgagctaaaatttccggccaaaaagcttagagctttgtggtttgcacctcctaatgcttctgctgttcctggtggcagcggcgttaacggtcctttaccgagagtttttatctcagagctcctggtggaccagatgagttcacagactcaggatgtaatcagaaaatacacggaagcatcacctaatgggaaaaagtatgctggactttctagtgctttgggtactttaacttgggaaaagcctctatcttctgagtttgagcaattggctagggaaagtgaatacgcagcatggacccttgtcaatggatatgcacttaaccacgtcacgatttctgttcatcggcttaaatctcatctaaacaaaatcaagaagctcaatcagttcctcgaagaaaaaggtatcaaattgaactcagaaggaggagtccttaaagttagccctgatggtggtttgcagcaaagctcaactgtagcagattcgatatctttcaagttcgctgatggtgttaccaaatctatcccttgttcatacattgagtttgctgaacgccttgtacttccgcagtaccaaaatatacccgaaagcgagatacaagagtctcatcgacgtgatggatttgaggtcggaaatgctgacaagatcttcgagagcacatttcaggagcagctttcccgacgaaccgggtgatagcaaatagtagccacggctttggatatatgtcaatcatgcctcgtacatgtgtaacgagtaaaaagctcaaaactgcttgtaatcttgatcagtaaagatgctaatccaagaactcttaatcaaatatatttatgtgtatatttccgactactttcctagtggtgagaaggaggtaaacaaagataacaggaatagttacaaaacataaaacgataatgatgttgtatggttttgttcttgttctgcatttgagcttgttttaccgattggtaactt

SEQ ID NO: 23452 - protein, 371 aa, Arabidopsis thaliana
  peptide (1)..(371): Ceres Seq. ID no. 13504821
MISLHSSAIKASLYGSFPSSLRSTLSVSFSAGSLIRLPSVGKRNLSVVVSSGRDSSMSSNNVSRGSSSKVAAESFFRSVLGQMETVYLNRNPTPKSVLELVRSVDDQQLCYDHLAFRTFGIGGYGIDSLASFFLDYGYTPMDELKFPAKKLRALWFAPPNASAVPGGSGVNGPLPRVFISELLVDQMSSQTQDVIRKYTEASPNGKKYAGLSSALGTLTWEKPLSSEFEQLARESEYAAWTLVNGYALNHVTISVHRLKSHLNKIKKLNQFLEEKGIKLNSEGGVLKVSPDGGLQQSSTVADSISFKFADGVTKSIPCSYIEFAERLVLPQYQNIPESEIQESHRRDGFEVGNADKIFESTFQEQLSRRTG

SEQ ID NO: 23453 - protein, 315 aa, Arabidopsis thaliana
  peptide (1)..(315): Ceres Seq. ID no. 13504822
MSSNNVSRGSSSKVAAESFFRSVLGQMETVYLNRNPTPKSVLELVRSVDDQQLCYDHLAFRTFGIGGYGIDSLASFFLDYGYTPMDELKFPAKKLRALWFAPPNASAVPGGSGVNGPLPRVFISELLVDQMSSQTQDVIRKYTEASPNGKKYAGLSSALGTLTWEKPLSSEFEQLARESEYAAWTLVNGYALNHVTISVHRLKSHLNKIKKLNQFLEEKGIKLNSEGGVLKVSPDGGLQQSSTVADSISFKFADGVTKSIPCSYIEFAERLVLPQYQNIPESEIQESHRRDGFEVGNADKIFESTFQEQLSRRTG

SEQ ID NO: 23454 - protein, 289 aa, Arabidopsis thaliana
  peptide (1)..(289): Ceres Seq. ID no. 13504823
METVYLNRNPTPKSVLELVRSVDDQQLCYDHLAFRTFGIGGYGIDSLASFFLDYGYTPMDELKFPAKKLRALWFAPPNASAVPGGSGVNGPLPRVFISELLVDQMSSQTQDVIRKYTEASPNGKKYAGLSSALGTLTWEKPLSSEFEQLARESEYAAWTLVNGYALNHVTISVHRLKSHLNKIKKLNQFLEEKGIKLNSEGGVLKVSPDGGLQQSSTVADSISFKFADGVTKSIPCSYIEFAERLVLPQYQNIPESEIQESHRRDGFEVGNADKIFESTFQEQLSRRTG

SEQ ID NO: 23455 - DNA, 1536 bp, Arabidopsis thaliana
  misc_feature (1)..(1536): Ceres Seq. ID no. 13497467
  misc_feature (1)..(1536): Ortholog of  Ceres SEQ ID NO 14308099 as cited in SEQ ID NO 58651
  misc_feature (1)..(1536): Ortholog of  Ceres SEQ ID NO 13596893 as cited in SEQ ID NO 62932
gacaaagaagagtcgtgttggtgagctaactacccaacctgtgaagctacccccattctctctcaacgttttcgttttgaaatggcgaggaagaagatcagagagtatgactcaaagaggttggtgaaggaacatttcaaaaggctttctggcaaagagcttcctatcagatccgttcagattaatgaaacaactgatctaaatgagctagttgaaaaggaaccttggctctcgtctgagaagctggtggtgaaacctgacatgttgtttggaaagcgtggcaagagtggtttggttgccttgaaattagattttgctgatgttgccacttttgttaaagaacgtttgggaaaagaggtagagatgagtggatgcaaaggacccataacaacattcatagttgaaccatttgttccacacaatgaggagtattatctcaatgttgtctcggatcggcttggttgcagcataagcttttctgagtgtggaggaattgagatcgaggagaactgggacaaggtcaagacaatatttttaccaacaggtgcttccctgacacctgaaatatgtgcacctcttgtcgcaactcttcccttagagatcaaagctgaaattgaagaatttatcaaagtcattttcaccctattccaagatcttgatttcactttcttggagatgaatcctttcactctagttgatggaagtccttatcctctggatatgaggggtgagcttgatgatactgctgccttcaaaaactttaaaaaatggggcgacattgaatttcctctgccatttggaagagtaatgagtcctacagaaagctttatccacggactggatgagaagacaagtgcgtctttgaagtttaccgttctgaaccccaagggacggatttggacaatggtagctggtggaggagcaagtgtcatctatgcggatacggttggagatctcgggtatgcatctgaacttggcaactatgctgaatacagtggagcacccaaagaagatgaggttttgcagtacgccagagtcgttattgattgtgctacagcaaacccggatggaaaaagcagagcccttgtcatcggaggcggaattgccaacttcactgacgttgctgctactttcaatggcataatccgcgctcttaaagaaaaggaagcaaagctgaaagcagcaaggatgcatatatttgtgaggagaggaggaccaaactaccaaaagggacttgctaaaatgcgagcccttggagatgatatcggtgtccccatcgaggtctatggcccagaagcaaccatgacaggtatctgcaaggaggcaatccagtacatcacagcagcagcataagcttctctcagtaccttctatgaccaaaactttgtctgtgttttagagcctttatttactgtggttaagattactcaagctataagatacttgcaatttcttgaaaacttctgttgttcgattctctttcccctaacgttttcttcagattcaataaataatcgttacttttttttcccctct

SEQ ID NO: 23456 - protein, 423 aa, Arabidopsis thaliana
  peptide (1)..(423): Ceres Seq. ID no. 13497468
MARKKIREYDSKRLVKEHFKRLSGKELPIRSVQINETTDLNELVEKEPWLSSEKLVVKPDMLFGKRGKSGLVALKLDFADVATFVKERLGKEVEMSGCKGPITTFIVEPFVPHNEEYYLNVVSDRLGCSISFSECGGIEIEENWDKVKTIFLPTGASLTPEICAPLVATLPLEIKAEIEEFIKVIFTLFQDLDFTFLEMNPFTLVDGSPYPLDMRGELDDTAAFKNFKKWGDIEFPLPFGRVMSPTESFIHGLDEKTSASLKFTVLNPKGRIWTMVAGGGASVIYADTVGDLGYASELGNYAEYSGAPKEDEVLQYARVVIDCATANPDGKSRALVIGGGIANFTDVAATFNGIIRALKEKEAKLKAARMHIFVRRGGPNYQKGLAKMRALGDDIGVPIEVYGPEATMTGICKEAIQYITAAA

SEQ ID NO: 23457 - protein, 363 aa, Arabidopsis thaliana
  peptide (1)..(363): Ceres Seq. ID no. 13497469
MLFGKRGKSGLVALKLDFADVATFVKERLGKEVEMSGCKGPITTFIVEPFVPHNEEYYLNVVSDRLGCSISFSECGGIEIEENWDKVKTIFLPTGASLTPEICAPLVATLPLEIKAEIEEFIKVIFTLFQDLDFTFLEMNPFTLVDGSPYPLDMRGELDDTAAFKNFKKWGDIEFPLPFGRVMSPTESFIHGLDEKTSASLKFTVLNPKGRIWTMVAGGGASVIYADTVGDLGYASELGNYAEYSGAPKEDEVLQYARVVIDCATANPDGKSRALVIGGGIANFTDVAATFNGIIRALKEKEAKLKAARMHIFVRRGGPNYQKGLAKMRALGDDIGVPIEVYGPEATMTGICKEAIQYITAAA

SEQ ID NO: 23458 - protein, 329 aa, Arabidopsis thaliana
  peptide (1)..(329): Ceres Seq. ID no. 13497470
MSGCKGPITTFIVEPFVPHNEEYYLNVVSDRLGCSISFSECGGIEIEENWDKVKTIFLPTGASLTPEICAPLVATLPLEIKAEIEEFIKVIFTLFQDLDFTFLEMNPFTLVDGSPYPLDMRGELDDTAAFKNFKKWGDIEFPLPFGRVMSPTESFIHGLDEKTSASLKFTVLNPKGRIWTMVAGGGASVIYADTVGDLGYASELGNYAEYSGAPKEDEVLQYARVVIDCATANPDGKSRALVIGGGIANFTDVAATFNGIIRALKEKEAKLKAARMHIFVRRGGPNYQKGLAKMRALGDDIGVPIEVYGPEATMTGICKEAIQYITAAA

SEQ ID NO: 23459 - DNA, 1234 bp, Arabidopsis thaliana
  misc_feature (1)..(1234): Ceres Seq. ID no. 12337502
  misc_feature (1)..(1234): Ortholog of  Ceres SEQ ID NO 13595351 as cited in SEQ ID NO 55934
  misc_feature (1)..(1234): Ortholog of  Ceres SEQ ID NO 13639645 as cited in SEQ ID NO 57488
acttccggcggagaacgatgtctctgataccggaaagggcaaagcttcacatagctatggtggtgtttcagacaggctacgctggtaatcacgtgatcatgagatatgctctaaacttaggagtaagcaagctcgtcttcccactttaccgcaccatcgtcgctttctctgttcttgctccctctgcttacttccttgaaaaaaaagaaagaccggcgatgaaaatcagtttcctgattcaattcttccttcttggactcgttggaataacgttaaaccaaggattttacatctttggattggacaatacctcaccaacattcgcatcagcaactgaaaatgttgttcctgctgtttcattcctcatggcagcgttgctcggaatagagaaggtggaatggaagaggaaagatggtatagccaaagtggtggggacaattgtatctgtcgcaggctctttggttataacactctataaaggaccaaccatttaccaaccgagtctgaatatagtgaaccaaactattaaacctgaagaagcagaggaagaaaacaagaactggacgttgggatgtctctgtttgatgggtcactgtttatgttggtcaagttggattgtgttacaatcaccattgcttaaaaagtacccagctcgcttctccttcgtctcctattcttgctttttcgcagtgatacagttctttggaatttcggcttatttcgagagagatctagagaggtggaagataatatcaggaggcgaattatacgcgttactctacactggtttagttggttcagcaatggtgtttgcaatacaaatatatgtagtggaaagaggaggacctctgtttgtatcagcgtatttgcctcttcaaactttgattgctgctgttttagctactttagctcttggtgaacacttttaccttggaggattgataggtgcaatactaatcatgagtggactatacttagttgtgatgggaaagagttgggagaatcaagctctttgccaacaacaacaacacatgatttcttcagcagcatcagattttggtgatgaagaagactaccataataataaaccaagatctcctattagtcaaccattaatttcttcctaaattttgttagatcctatttatgtcttaaattcctagttcctactctcttcctcattaaaatcgaaatggacccggttgacgaaatagagataaaaataaatttggtt

SEQ ID NO: 23460 - protein, 374 aa, Arabidopsis thaliana
  peptide (1)..(374): Ceres Seq. ID no. 12337503
FRRRTMSLIPERAKLHIAMVVFQTGYAGNHVIMRYALNLGVSKLVFPLYRTIVAFSVLAPSAYFLEKKERPAMKISFLIQFFLLGLVGITLNQGFYIFGLDNTSPTFASATENVVPAVSFLMAALLGIEKVEWKRKDGIAKVVGTIVSVAGSLVITLYKGPTIYQPSLNIVNQTIKPEEAEEENKNWTLGCLCLMGHCLCWSSWIVLQSPLLKKYPARFSFVSYSCFFAVIQFFGISAYFERDLERWKIISGGELYALLYTGLVGSAMVFAIQIYVVERGGPLFVSAYLPLQTLIAAVLATLALGEHFYLGGLIGAILIMSGLYLVVMGKSWENQALCQQQQHMISSAASDFGDEEDYHNNKPRSPISQPLISS

SEQ ID NO: 23461 - protein, 369 aa, Arabidopsis thaliana
  peptide (1)..(369): Ceres Seq. ID no. 12337504
MSLIPERAKLHIAMVVFQTGYAGNHVIMRYALNLGVSKLVFPLYRTIVAFSVLAPSAYFLEKKERPAMKISFLIQFFLLGLVGITLNQGFYIFGLDNTSPTFASATENVVPAVSFLMAALLGIEKVEWKRKDGIAKVVGTIVSVAGSLVITLYKGPTIYQPSLNIVNQTIKPEEAEEENKNWTLGCLCLMGHCLCWSSWIVLQSPLLKKYPARFSFVSYSCFFAVIQFFGISAYFERDLERWKIISGGELYALLYTGLVGSAMVFAIQIYVVERGGPLFVSAYLPLQTLIAAVLATLALGEHFYLGGLIGAILIMSGLYLVVMGKSWENQALCQQQQHMISSAASDFGDEEDYHNNKPRSPISQPLISS

SEQ ID NO: 23462 - protein, 356 aa, Arabidopsis thaliana
  peptide (1)..(356): Ceres Seq. ID no. 12337505
MVVFQTGYAGNHVIMRYALNLGVSKLVFPLYRTIVAFSVLAPSAYFLEKKERPAMKISFLIQFFLLGLVGITLNQGFYIFGLDNTSPTFASATENVVPAVSFLMAALLGIEKVEWKRKDGIAKVVGTIVSVAGSLVITLYKGPTIYQPSLNIVNQTIKPEEAEEENKNWTLGCLCLMGHCLCWSSWIVLQSPLLKKYPARFSFVSYSCFFAVIQFFGISAYFERDLERWKIISGGELYALLYTGLVGSAMVFAIQIYVVERGGPLFVSAYLPLQTLIAAVLATLALGEHFYLGGLIGAILIMSGLYLVVMGKSWENQALCQQQQHMISSAASDFGDEEDYHNNKPRSPISQPLISS

SEQ ID NO: 23463 - DNA, 1263 bp, Arabidopsis thaliana
  misc_feature (1)..(1263): Ceres Seq. ID no. 12396398
  misc_feature (1)..(1263): Ortholog of  Ceres SEQ ID NO 14314540 as cited in SEQ ID NO 52440
atcatcttcgtcttctccattatctctctacccaaatctggcagagaaaaacaaaagaagaagaagaagaaaaactttcgatatggataagagctgtaactcctccggcgattcctccgccgtatccgcctctgcaacgagtagtaccggtaacaatacaacgaacagagatcattacctgagacaactcaataagctgtctcataagatatcaaaaccgacgaactcttcctcctccgtctccgtcgcgaatcgtgaaattgatcttccacctcctccaccgctgcaaatcaatcaagggaatctccatcaacatcaacctcctgtttacaatatcaacaagaacgatttcagagatgttgttcagaaactaaccggttcacctgcacatgaacggatctctgctccgccgcaacaaccgattcatcaccctaaacctcaacagagttcgcgtctacataggatccgtcctcctcctttggttcacgttatcaatcgtcctcctggtttgctaaatgacgcacttatccctcaaggttctcatcacatgaatcaaaactggactggcgttggatttaaccttcgaccaacggcgccgctttctcctctcccgccgttaccaccggttcacgcggcggcggaatcaccggtctcttcgtacatgcggtatctccagaactcgatgttcgcaatcgattcgaatcggaaagagttctctggattatctccgttagctcctttggtctcacctcgttggtaccaacaacaggaaaacgctccaccatcgcagcataacagttttccaccaccacatcctcctcctccttcctctgctgtttcgcagacggtgccgacatcgattccggcgcctccactgtttggatgttcaagttcgcctaaatctccgtacggattactctcaccgagcatacttttatcgccatcgtcaggtcaattagggttccctgtatctccgacgacggtgccgcttcctagccctaaatacaaaggtcattgatcagaaaatcggaaacccttgtcggtcaaagtgagaaaacgtcgtcgttttgaccgtcgcgacaaaattccctttgttctttttgtacatcattagtggagagtggtgggatcatttgtttttttttttgttaattaactcaaagattacttaaatccgtttttttttttactttcttttgttttcatggtttgttcatgttagaaacaaagaagactaggaaaaagaaaggaatacacttttgc

SEQ ID NO: 23464 - protein, 338 aa, Arabidopsis thaliana
  peptide (1)..(338): Ceres Seq. ID no. 12396399
SSSSSPLSLYPNLAEKNKRRRRRKTFDMDKSCNSSGDSSAVSASATSSTGNNTTNRDHYLRQLNKLSHKISKPTNSSSSVSVANREIDLPPPPPLQINQGNLHQHQPPVYNINKNDFRDVVQKLTGSPAHERISAPPQQPIHHPKPQQSSRLHRIRPPPLVHVINRPPGLLNDALIPQGSHHMNQNWTGVGFNLRPTAPLSPLPPLPPVHAAAESPVSSYMRYLQNSMFAIDSNRKEFSGLSPLAPLVSPRWYQQQENAPPSQHNSFPPPHPPPPSSAVSQTVPTSIPAPPLFGCSSSPKSPYGLLSPSILLSPSSGQLGFPVSPTTVPLPSPKYKGH

SEQ ID NO: 23465 - protein, 311 aa, Arabidopsis thaliana
  peptide (1)..(311): Ceres Seq. ID no. 12396400
MDKSCNSSGDSSAVSASATSSTGNNTTNRDHYLRQLNKLSHKISKPTNSSSSVSVANREIDLPPPPPLQINQGNLHQHQPPVYNINKNDFRDVVQKLTGSPAHERISAPPQQPIHHPKPQQSSRLHRIRPPPLVHVINRPPGLLNDALIPQGSHHMNQNWTGVGFNLRPTAPLSPLPPLPPVHAAAESPVSSYMRYLQNSMFAIDSNRKEFSGLSPLAPLVSPRWYQQQENAPPSQHNSFPPPHPPPPSSAVSQTVPTSIPAPPLFGCSSSPKSPYGLLSPSILLSPSSGQLGFPVSPTTVPLPSPKYKGH

SEQ ID NO: 23466 - DNA, 1301 bp, Arabidopsis thaliana
  misc_feature (1)..(1301): Ceres Seq. ID no. 12338490
  misc_feature (1)..(1301): Ortholog of  Ceres SEQ ID NO 13598741 as cited in SEQ ID NO 62749
  misc_feature (1)..(1301): Ortholog of  Ceres SEQ ID NO 12587535 as cited in SEQ ID NO 64020
  misc_feature (1)..(1301): Ortholog of  Ceres SEQ ID NO 15176854 as cited in SEQ ID NO 64525
  misc_feature (1)..(1301): Ortholog of  Ceres SEQ ID NO 12586366 as cited in SEQ ID NO 68983
  misc_feature (1)..(1301): Ortholog of  Ceres SEQ ID NO 15178891 as cited in SEQ ID NO 0
acaaggacattttgataatatccacaggcatgttaccaaacggagacttcgagctaggaccaaaaccatcagacatgaaaggaacagaaatactaaacaaactagcaataccaaactgggaagtcacaggattcgtcgaatacattaaatcaggacataaacaaggagacatgcttctcgttgttcccgccggtaaattcgctgtaagacttgggaacgaagcatcgatcaaacaaagacttaaagtggttaaaggaatgtattactcactcacttttagtgctgctagaacttgtgcacaagacgagagacttaacatatctgtagcacctgactccggtgtgattccgattcagacggtttatagtagtagtggttgggatttatatgcttgggcgtttcaagctgagagtgatgttgctgaagttgtgattcataatcctggtgttgaggaagatccagcttgtggtccacttattgatggtgttgctatgagatctctttaccctcctagaccaactaataagaacattttgaaaaacggaggatttgaagaaggtccattagtattacccggctcgacaactggagttttgatcccaccgtttatagaagacgaccactctcctttacctggatggatggtggagtctctcaaagctgtcaagtacgtagacgttgaacatttctcagtcccacagggtcgcagagctattgagcttgtagcgggtaaagagagtgccatcgctcaagtggttcggactgtcattgggaagacttacgtgctgtcttttgcggttggagacgccaacaatgcttgcaaaggatcaatggtggttgaggcttttgcaggaaaagatacacttaaggtcccttacgagtcgaaaggcacaggagggtttaaacgagcttctattcgatttgtggcggtttcgacccgatcaagaattatgttctacagcactttctatgccatgaggagcgatgatttcgtcattgtgtgggcctgtgatcgatgatgtcaagcttataagcgttcgtaaaccatagatgaatcaccaatcctattacaagaaaatgcatcgtgtggtcttcttttattttccttaaactgtctttggtgtgtgttggattttattggaacgagaaggtgaaaaaaacagagttttatttacgagagttagggttttatataggcagatgggcctttgcttatattgtattttcttgtatgagaaggcaaaagaaacgttgcctatatcttatgtatctaggccttttaatttttatggaagagttac

SEQ ID NO: 23467 - protein, 338 aa, Arabidopsis thaliana
  peptide (1)..(338): Ceres Seq. ID no. 12338491
KDILIISTGMLPNGDFELGPKPSDMKGTEILNKLAIPNWEVTGFVEYIKSGHKQGDMLLVVPAGKFAVRLGNEASIKQRLKVVKGMYYSLTFSAARTCAQDERLNISVAPDSGVIPIQTVYSSSGWDLYAWAFQAESDVAEVVIHNPGVEEDPACGPLIDGVAMRSLYPPRPTNKNILKNGGFEEGPLVLPGSTTGVLIPPFIEDDHSPLPGWMVESLKAVKYVDVEHFSVPQGRRAIELVAGKESAIAQVVRTVIGKTYVLSFAVGDANNACKGSMVVEAFAGKDTLKVPYESKGTGGFKRASIRFVAVSTRSRIMFYSTFYAMRSDDFVIVWACDR

SEQ ID NO: 23468 - protein, 329 aa, Arabidopsis thaliana
  peptide (1)..(329): Ceres Seq. ID no. 12338493
MLPNGDFELGPKPSDMKGTEILNKLAIPNWEVTGFVEYIKSGHKQGDMLLVVPAGKFAVRLGNEASIKQRLKVVKGMYYSLTFSAARTCAQDERLNISVAPDSGVIPIQTVYSSSGWDLYAWAFQAESDVAEVVIHNPGVEEDPACGPLIDGVAMRSLYPPRPTNKNILKNGGFEEGPLVLPGSTTGVLIPPFIEDDHSPLPGWMVESLKAVKYVDVEHFSVPQGRRAIELVAGKESAIAQVVRTVIGKTYVLSFAVGDANNACKGSMVVEAFAGKDTLKVPYESKGTGGFKRASIRFVAVSTRSRIMFYSTFYAMRSDDFVIVWACDR

SEQ ID NO: 23469 - protein, 314 aa, Arabidopsis thaliana
  peptide (1)..(314): Ceres Seq. ID no. 12338494
MKGTEILNKLAIPNWEVTGFVEYIKSGHKQGDMLLVVPAGKFAVRLGNEASIKQRLKVVKGMYYSLTFSAARTCAQDERLNISVAPDSGVIPIQTVYSSSGWDLYAWAFQAESDVAEVVIHNPGVEEDPACGPLIDGVAMRSLYPPRPTNKNILKNGGFEEGPLVLPGSTTGVLIPPFIEDDHSPLPGWMVESLKAVKYVDVEHFSVPQGRRAIELVAGKESAIAQVVRTVIGKTYVLSFAVGDANNACKGSMVVEAFAGKDTLKVPYESKGTGGFKRASIRFVAVSTRSRIMFYSTFYAMRSDDFVIVWACDR

SEQ ID NO: 23470 - DNA, 1414 bp, Arabidopsis thaliana
  misc_feature (1)..(1414): Ceres Seq. ID no. 12385350
  misc_feature (1)..(1414): Ortholog of  Ceres SEQ ID NO 14313147 as cited in SEQ ID NO 54166
  misc_feature (1)..(1414): Ortholog of  Ceres SEQ ID NO 13598882 as cited in SEQ ID NO 0
aaggcgtgagataataaaaccctttggctttctcatagagatttgtccggtctcttgttcctctttctcctttcttcactgtagaatccgtcgaccaaacaactagctccaatggcataatgagcattgtagtttgcaatttcttcttccgtgaagaagaagaagatggctttggagaaagaggaagaagcgtcacaaaacggtgcgttttgtgtccttgatgggctctattgcgaggaagaaaccgggtttgtggaggacgatcttgatgacgatggagatttagattttctcgagaaatctgatgagagtgttgtaaagtttcagtttttacctcttttggatatgttcttatgggatgacgatgagattctgagtttgatttcaaaggaaaacgaaacgaatccatgttttggggaacaaatcttagatggctttttggtttcttgtaggaaagaggctttagattgggttcttagggttaaatctcattatgggtttacttcattgacggctatacttgctgtgaactacttcgataggtttatgacaagtataaagcttcagactgataagccatggatgtctcagcttgttgctgtggcttctttgtctttagctgctaaagttgaagagattcaagttccattgctcttagacctccaagtggaagaagcaagatatctctttgaagctaagacgattcaaagaatggagcttttgattctttctactcttcaatggagaatgcaccctgtgactccaatctctttctttgatcacattatccggcgatttggctctaaatggcaccagcaattagacttctgtaggaagtgtgagcgtcttctgatctctgttattgctgatacgaggtttatgaggtacttcccttctgtcttagctactgcaataatgatccttgtcttcgaggaattgaagccatgtgatgaagttgaataccaatctcaaataacgactctactcaaagtcaatcaggagaaagtaaatgaatgctatgaactgttgttggagcacaatccaagcaagaagaggatgatgaatttggttgatcaggacagtccaagtggtgtattagactttgatgacagctcaaatagctcctggaatgtctccactactgcttcagtgtcctcatcatcttcgtctccagagcctctgctcaagagaagaagagttcaggagcagcaaatgagattgccctcaataaaccgtatgtttctcgatgtgcttagtagtcctcgctagtacctttctttgatcaaatgtgtcaaaacataaattcaatctctcttttgcttattattatcggccatcggctacaatttgaaggcagaacattttgtgataactctaagttaattctgcctcttaaatcataatattcattgat

SEQ ID NO: 23471 - protein, 367 aa, Arabidopsis thaliana
  peptide (1)..(367): Ceres Seq. ID no. 12385351
MALEKEEEASQNGAFCVLDGLYCEEETGFVEDDLDDDGDLDFLEKSDESVVKFQFLPLLDMFLWDDDEILSLISKENETNPCFGEQILDGFLVSCRKEALDWVLRVKSHYGFTSLTAILAVNYFDRFMTSIKLQTDKPWMSQLVAVASLSLAAKVEEIQVPLLLDLQVEEARYLFEAKTIQRMELLILSTLQWRMHPVTPISFFDHIIRRFGSKWHQQLDFCRKCERLLISVIADTRFMRYFPSVLATAIMILVFEELKPCDEVEYQSQITTLLKVNQEKVNECYELLLEHNPSKKRMMNLVDQDSPSGVLDFDDSSNSSWNVSTTASVSSSSSSPEPLLKRRRVQEQQMRLPSINRMFLDVLSSPR

SEQ ID NO: 23472 - protein, 307 aa, Arabidopsis thaliana
  peptide (1)..(307): Ceres Seq. ID no. 12385352
MFLWDDDEILSLISKENETNPCFGEQILDGFLVSCRKEALDWVLRVKSHYGFTSLTAILAVNYFDRFMTSIKLQTDKPWMSQLVAVASLSLAAKVEEIQVPLLLDLQVEEARYLFEAKTIQRMELLILSTLQWRMHPVTPISFFDHIIRRFGSKWHQQLDFCRKCERLLISVIADTRFMRYFPSVLATAIMILVFEELKPCDEVEYQSQITTLLKVNQEKVNECYELLLEHNPSKKRMMNLVDQDSPSGVLDFDDSSNSSWNVSTTASVSSSSSSPEPLLKRRRVQEQQMRLPSINRMFLDVLSSPR

SEQ ID NO: 23473 - protein, 240 aa, Arabidopsis thaliana
  peptide (1)..(240): Ceres Seq. ID no. 12385353
MTSIKLQTDKPWMSQLVAVASLSLAAKVEEIQVPLLLDLQVEEARYLFEAKTIQRMELLILSTLQWRMHPVTPISFFDHIIRRFGSKWHQQLDFCRKCERLLISVIADTRFMRYFPSVLATAIMILVFEELKPCDEVEYQSQITTLLKVNQEKVNECYELLLEHNPSKKRMMNLVDQDSPSGVLDFDDSSNSSWNVSTTASVSSSSSSPEPLLKRRRVQEQQMRLPSINRMFLDVLSSPR

SEQ ID NO: 23474 - DNA, 1340 bp, Arabidopsis thaliana
  misc_feature (1)..(1340): Ceres Seq. ID no. 12339897
  misc_feature (1)..(1340): Ortholog of  Ceres SEQ ID NO 12586556 as cited in SEQ ID NO 64667
  misc_feature (1)..(1340): Ortholog of  Ceres SEQ ID NO 13660894 as cited in SEQ ID NO 67475
gccgcagagtgttgatgctgttacgtttagtactttgatgaatgggtatcttcaggtttctaagaaagcgttggctttggatttgtttaggattatgagaaaaagtgaggtggtcgttaatgtcagtacgttgcttagctttctttcggctattagtgatctaggagatttgtctggagcagaatctgctcatgtgttatgcatcaagattggccttgatttagacttgcatttaatcacagctttgatagggatgtacggcaaaactgggggtatcagttcagcacgcaggatctttgattgcgccattcgaaaggatgttgttacatggaactgtatgatagaccaatatgccaaaacgggtctccttgaagagtgtgtatggctactgaggcagatgaagtatgaaaaaatgaaaccgaattcatctacgtttgttgggctgttgtcttcctgtgcgtacagtgaagcagcattcgtaggacgtactgtttgctgatctattggaagaggaaagaatagctttggatgcaatacttggaactgcactcgttgatatgtatgcaaaagtaggattgcttgaaaaagctgttgagattttcaatagaatgaaggataaggatgtaaagtcctggaccgcgatgatctcgggttatggagctcatggactagcaagagaagcagtaacactattcaataagatggaggaagagaactgcaaagtgagacccaatgagattaccttcttggttgtgctgaatgcttgtagccatggagggttggtaatggaaggaatcagatgctttaagaggatggttgaggcttacagcttcacgcccaaagttgaacattatggttgtgtggttgatcttttaggtcgagcggggcagttagaggaagcgtatgagttaataaggaacttaccgatcacaagtgattcaacggcttggcgtgctctgctagctgcttgtagagtatacgggaatgcagatttgggggaaagtgtgatgatgagattggctgaaatgggtgagacacatccggcagatgcaattcttctagctgggacacacgctgttgcagggaacccacaaaaatcattagataatgagttgaataaagggagaaaagaagctggatacagcgccattgaaatagaatagagtagacaatctctggcgttcattcacctctgacctttttgttgaaaactatatcagcaaaatgttgttcaataaggtaaacccctgtatttactctttctttatgctttaaaacagtaacttatgtataaagaaaggagacaattgatcttaatgaaacagttttgatggattgtg

SEQ ID NO: 23475 - protein, 201 aa, Arabidopsis thaliana
  peptide (1)..(201): Ceres Seq. ID no. 12339898
MYAKVGLLEKAVEIFNRMKDKDVKSWTAMISGYGAHGLAREAVTLFNKMEEENCKVRPNEITFLVVLNACSHGGLVMEGIRCFKRMVEAYSFTPKVEHYGCVVDLLGRAGQLEEAYELIRNLPITSDSTAWRALLAACRVYGNADLGESVMMRLAEMGETHPADAILLAGTHAVAGNPQKSLDNELNKGRKEAGYSAIEIE

SEQ ID NO: 23476 - protein, 184 aa, Arabidopsis thaliana
  peptide (1)..(184): Ceres Seq. ID no. 12339899
MKDKDVKSWTAMISGYGAHGLAREAVTLFNKMEEENCKVRPNEITFLVVLNACSHGGLVMEGIRCFKRMVEAYSFTPKVEHYGCVVDLLGRAGQLEEAYELIRNLPITSDSTAWRALLAACRVYGNADLGESVMMRLAEMGETHPADAILLAGTHAVAGNPQKSLDNELNKGRKEAGYSAIEIE

SEQ ID NO: 23477 - protein, 173 aa, Arabidopsis thaliana
  peptide (1)..(173): Ceres Seq. ID no. 12339900
MISGYGAHGLAREAVTLFNKMEEENCKVRPNEITFLVVLNACSHGGLVMEGIRCFKRMVEAYSFTPKVEHYGCVVDLLGRAGQLEEAYELIRNLPITSDSTAWRALLAACRVYGNADLGESVMMRLAEMGETHPADAILLAGTHAVAGNPQKSLDNELNKGRKEAGYSAIEIE

SEQ ID NO: 23478 - DNA, 1057 bp, Arabidopsis thaliana
  misc_feature (1)..(1057): Ceres Seq. ID no. 13490842
  misc_feature (1)..(1057): Ortholog of  Ceres SEQ ID NO 15176333 as cited in SEQ ID NO 52787
  misc_feature (1)..(1057): Ortholog of  Ceres SEQ ID NO 15170403 as cited in SEQ ID NO 53457
  misc_feature (1)..(1057): Ortholog of  Ceres SEQ ID NO 14303479 as cited in SEQ ID NO 54254
  misc_feature (1)..(1057): Ortholog of  Ceres SEQ ID NO 14312047 as cited in SEQ ID NO 55656
  misc_feature (1)..(1057): Ortholog of  Ceres SEQ ID NO 13660872 as cited in SEQ ID NO 60830
  misc_feature (1)..(1057): Ortholog of  Ceres SEQ ID NO 12616221 as cited in SEQ ID NO 63291
  misc_feature (1)..(1057): Ortholog of  Ceres SEQ ID NO 14302355 as cited in SEQ ID NO 65830
agaagtttcaactttcaaacatatctttacagttctttcttgctaaacaacaataaaggggaaaataggttaattatgatgaaatctggggctgatttgcaatttccaccaggatttagatttcatcctacggatgaggagctagtcctcatgtatctctgtcgtaaatgcgcgtcgcagccgatccctgctccgattatcaccgaactcgatttgtaccgatatgatccttgggaccttcccgacatggctttgtacggtgaaaaggagtggtattttttctcaccaagagatcgaaagtatccaaacggttcaagacccaaccgtgcagctggtactggatattggaaagctaccggagctgataaaccaataggtcgtcctaaaccggttggtattaagaaggctctagtgttttactcgggaaaacctccaaatggagagaaaaccaattggattatgcacgaataccggctcgctgacgttgaccggtcggttcgtaagaaaaacagtctaagattggacgattgggtattgtgtcgtatatataacaagaaaggtgtcatcgagaagcgacgaagcgatatcgaggacgggttaaagcctgtgactgacacgtgtccaccggaatctgtggcgagattgatctccggctcggagcaagcggtgtcaccggaattcacgtgtagcaacggtcggttgagtaatgcccttgattttccgtttaattacgtagatgccatcgccgataacgagattgtgtcacggctattgggcgggaatcagatgtggtcgacgacgcttgatccacttgtggttaggcagggaactttctgagttgtcacgtgcgattagagttagtggaaagtggaaactatcactgtctgttttcgcacgtgtcgggtagccgtcttgaaacccgctagctgatccagaagtgacctcattgggcttttcaacaacaattgggccttagcctttcttctcccttagtaagacaagctactgtattgtgttgttattttcaggaagcaatataaattcattttaatcactc

SEQ ID NO: 23479 - protein, 278 aa, Arabidopsis thaliana
  peptide (1)..(278): Ceres Seq. ID no. 13490843
RSFNFQTYLYSSFLLNNNKGENRLIMMKSGADLQFPPGFRFHPTDEELVLMYLCRKCASQPIPAPIITELDLYRYDPWDLPDMALYGEKEWYFFSPRDRKYPNGSRPNRAAGTGYWKATGADKPIGRPKPVGIKKALVFYSGKPPNGEKTNWIMHEYRLADVDRSVRKKNSLRLDDWVLCRIYNKKGVIEKRRSDIEDGLKPVTDTCPPESVARLISGSEQAVSPEFTCSNGRLSNALDFPFNYVDAIADNEIVSRLLGGNQMWSTTLDPLVVRQGTF

SEQ ID NO: 23480 - protein, 253 aa, Arabidopsis thaliana
  peptide (1)..(253): Ceres Seq. ID no. 13490844
MMKSGADLQFPPGFRFHPTDEELVLMYLCRKCASQPIPAPIITELDLYRYDPWDLPDMALYGEKEWYFFSPRDRKYPNGSRPNRAAGTGYWKATGADKPIGRPKPVGIKKALVFYSGKPPNGEKTNWIMHEYRLADVDRSVRKKNSLRLDDWVLCRIYNKKGVIEKRRSDIEDGLKPVTDTCPPESVARLISGSEQAVSPEFTCSNGRLSNALDFPFNYVDAIADNEIVSRLLGGNQMWSTTLDPLVVRQGTF

SEQ ID NO: 23481 - protein, 252 aa, Arabidopsis thaliana
  peptide (1)..(252): Ceres Seq. ID no. 13490845
MKSGADLQFPPGFRFHPTDEELVLMYLCRKCASQPIPAPIITELDLYRYDPWDLPDMALYGEKEWYFFSPRDRKYPNGSRPNRAAGTGYWKATGADKPIGRPKPVGIKKALVFYSGKPPNGEKTNWIMHEYRLADVDRSVRKKNSLRLDDWVLCRIYNKKGVIEKRRSDIEDGLKPVTDTCPPESVARLISGSEQAVSPEFTCSNGRLSNALDFPFNYVDAIADNEIVSRLLGGNQMWSTTLDPLVVRQGTF

SEQ ID NO: 23482 - DNA, 1592 bp, Arabidopsis thaliana
  misc_feature (1)..(1592): Ceres Seq. ID no. 12737291
  misc_feature (1)..(1592): Ortholog of  Ceres SEQ ID NO 13663060 as cited in SEQ ID NO 60964
  misc_feature (1)..(1592): Ortholog of  Ceres SEQ ID NO 13655298 as cited in SEQ ID NO 68914
agaacaccaggtaatagagagagaacaaaatagtctttactctttcagtgagagagagaagttagagctgtaaaagcacatgacttcgataccattggggcctcctcagcctccgtctttagctcctcagccgccgcatcttcacggcggagattctttgaaacgtcgtcccgatatagacaacgacaaggaaatgtctgctgctgttatagaaggaaatgatgctgttaccggtcacataatttctactacaattggaggcaaaaatggtgaacctaaacagaccattagttacatggccgaacgtgttgttggaacaggatcattcggaattgtattccaggcaaaatgcttggaaactggagaatcagtagccattaagaaggttttgcaagatcgccgttataaaaaccgagagttgcaattaatgcgactaatggaccatccaaatgtggtttccttgaagcattgtttcttctctacaacgactagagatgagctcttcctcaatctcgttatggagtatgtaccagagacattgtaccgggttttgaagcactatactagttcaaaccagcggatgcctatcttctatgtcaaactttacacataccaaatcttcagaggcttggcttatatccatactgctcctggtgtctgccacagagatgtgaaaccacaaaatcttttggttgatcccctcacccatcagtgtaagctctgtgattttggaagtgcaaaagtactggtgaaaggtgaagcaaacatatcatatatctgctctcggtattaccgagctccagaactcatctttggtgccacagagtatacatcatccattgatatatggtctgctggttgtgttctggcagagctacttcttgggcagccgttattcccgggagaaaattctgtggaccagctagtggagatcataaaggttcttggtactccaactcgcgaagaaatccggtgcatgaacccaaactacacagacttcagattcccacaaatcaaagcccacccttggcataaggttttccacaagcggatgcctccggaagccattgaccttgcatctcggcttcttcaatactcaccaagtctacgttgcactgcgctcgaggcatgtgcgcatccgtttttcaatgaactccgtgagccaaatgctcgtcttccaaatggccgacctctaccaccgttgttcaacttcaaacaagagttgtctggggcttcaccggagcttatcaacaggctaataccagagcatgtgaggcgacagatgaatggtggctttccatttcaagctggaccctagaaaagcgatctcgagatgcttttccagagcaaaatgccgccttatggaatgaaggagagggagatttacttctctctgattaactaagtatcagcttctgagaagagatgatgtctcctccttagacgtggccaattcagctttttgagaaatcaggaggcgatgattgtgtcctattatattctttttgttcactgacttgtagagagatacttttctcctgtatcagtatttgtatatgtttttgtccttgaaatgaaacaaaatcgattcc

SEQ ID NO: 23483 - protein, 412 aa, Arabidopsis thaliana
  peptide (1)..(412): Ceres Seq. ID no. 12737292
MTSIPLGPPQPPSLAPQPPHLHGGDSLKRRPDIDNDKEMSAAVIEGNDAVTGHIISTTIGGKNGEPKQTISYMAERVVGTGSFGIVFQAKCLETGESVAIKKVLQDRRYKNRELQLMRLMDHPNVVSLKHCFFSTTTRDELFLNLVMEYVPETLYRVLKHYTSSNQRMPIFYVKLYTYQIFRGLAYIHTAPGVCHRDVKPQNLLVDPLTHQCKLCDFGSAKVLVKGEANISYICSRYYRAPELIFGATEYTSSIDIWSAGCVLAELLLGQPLFPGENSVDQLVEIIKVLGTPTREEIRCMNPNYTDFRFPQIKAHPWHKVFHKRMPPEAIDLASRLLQYSPSLRCTALEACAHPFFNELREPNARLPNGRPLPPLFNFKQELSGASPELINRLIPEHVRRQMNGGFPFQAGP

SEQ ID NO: 23484 - protein, 374 aa, Arabidopsis thaliana
  peptide (1)..(374): Ceres Seq. ID no. 12737293
MSAAVIEGNDAVTGHIISTTIGGKNGEPKQTISYMAERVVGTGSFGIVFQAKCLETGESVAIKKVLQDRRYKNRELQLMRLMDHPNVVSLKHCFFSTTTRDELFLNLVMEYVPETLYRVLKHYTSSNQRMPIFYVKLYTYQIFRGLAYIHTAPGVCHRDVKPQNLLVDPLTHQCKLCDFGSAKVLVKGEANISYICSRYYRAPELIFGATEYTSSIDIWSAGCVLAELLLGQPLFPGENSVDQLVEIIKVLGTPTREEIRCMNPNYTDFRFPQIKAHPWHKVFHKRMPPEAIDLASRLLQYSPSLRCTALEACAHPFFNELREPNARLPNGRPLPPLFNFKQELSGASPELINRLIPEHVRRQMNGGFPFQAGP

SEQ ID NO: 23485 - protein, 340 aa, Arabidopsis thaliana
  peptide (1)..(340): Ceres Seq. ID no. 12737294
MAERVVGTGSFGIVFQAKCLETGESVAIKKVLQDRRYKNRELQLMRLMDHPNVVSLKHCFFSTTTRDELFLNLVMEYVPETLYRVLKHYTSSNQRMPIFYVKLYTYQIFRGLAYIHTAPGVCHRDVKPQNLLVDPLTHQCKLCDFGSAKVLVKGEANISYICSRYYRAPELIFGATEYTSSIDIWSAGCVLAELLLGQPLFPGENSVDQLVEIIKVLGTPTREEIRCMNPNYTDFRFPQIKAHPWHKVFHKRMPPEAIDLASRLLQYSPSLRCTALEACAHPFFNELREPNARLPNGRPLPPLFNFKQELSGASPELINRLIPEHVRRQMNGGFPFQAGP

SEQ ID NO: 23486 - DNA, 909 bp, Arabidopsis thaliana
  misc_feature (1)..(909): Ceres Seq. ID no. 12488344
  misc_feature (1)..(909): Ortholog of  Ceres SEQ ID NO 14301765 as cited in SEQ ID NO 61955
  misc_feature (1)..(909): Ortholog of  Ceres SEQ ID NO 12618205 as cited in SEQ ID NO 65153
  misc_feature (1)..(909): Ortholog of  Ceres SEQ ID NO 12620986 as cited in SEQ ID NO 66720
gttttgttctttcatagtcttctagatctgtagtttttttccgcgaccgcccaaaaaattctctgatcagacggtcgattggatcggagatttaaggtaaagaaaaaatggcgcaacaatcgttgatctacagttttgtagctcgcggcacggtgatcctcgttgagttcactgatttcaaaggtaatttcacctcaatcgctgctcagtgcctccagaagcttccgtcttcgaacaacaagttcacctacaactgcgacggtcataccttcaattaccttgtcgaagatggattcacctattgtgttgttgcggttgattctgctgggaggcaaattcccatgtcctttttggaaagagtaaaagaagattttaacaagcgatatggtggtggaaaagctgcaactgctcaagcaaacagcttgaataaggagtttggctctaaactgaaagagcatatgcagtattgcatggatcatcctgatgagattagcaagcttgctaaggtgaaggcgcaagtgtcagaagttaagggtgtaatgatggaaaacattgagaaggttcttgaccgtggtgagaaaattgagcttttggtggacaaaaccgaaaatcttcgctcacaggcacaagatttcagaacaacaggaacgcagatgagaagaaagatgtggcttcagaacatgaagataaaactcatagtgctcgccatcattatcgcactgattctcatcatcgtgctctcagtttgccatgggtttaagtgttaagcccagaaaattcaaaacttctgagatctttctcactcggtacatcgtagtgccttctcttttattgttcgatcttcaatctaatgtttctgcttgaattggttttgtatagatagacatatatgtatgctactcatttgct

SEQ ID NO: 23487 - protein, 219 aa, Arabidopsis thaliana
  peptide (1)..(219): Ceres Seq. ID no. 12488345
MAQQSLIYSFVARGTVILVEFTDFKGNFTSIAAQCLQKLPSSNNKFTYNCDGHTFNYLVEDGFTYCVVAVDSAGRQIPMSFLERVKEDFNKRYGGGKAATAQANSLNKEFGSKLKEHMQYCMDHPDEISKLAKVKAQVSEVKGVMMENIEKVLDRGEKIELLVDKTENLRSQAQDFRTTGTQMRRKMWLQNMKIKLIVLAIIIALILIIVLSVCHGFKC

SEQ ID NO: 23488 - protein, 141 aa, Arabidopsis thaliana
  peptide (1)..(141): Ceres Seq. ID no. 12488346
MSFLERVKEDFNKRYGGGKAATAQANSLNKEFGSKLKEHMQYCMDHPDEISKLAKVKAQVSEVKGVMMENIEKVLDRGEKIELLVDKTENLRSQAQDFRTTGTQMRRKMWLQNMKIKLIVLAIIIALILIIVLSVCHGFKC

SEQ ID NO: 23489 - DNA, 1325 bp, Arabidopsis thaliana
  misc_feature (1)..(1325): Ceres Seq. ID no. 12335232
  misc_feature (1)..(1325): Ortholog of  Ceres SEQ ID NO 12593058 as cited in SEQ ID NO 63090
ataagactcctctccaaatgctaccacacaattcctctatcacagccgcccaatcctccatccaaaaatggcttatttccggcgagcagccaccgcattggttctcattttccagctccacctctttctctccctctcaaatgcacataacataacccgtcgataactcagcaatgtcctccatcctctctaacggatactcactctaccaaatccgcaacattctctctctccacgtcctggtcgattacttcggcaccaagaaacttcaccagatcaccgacggctccacctccactgcctccatgtttcaatccaccggatccgccaccggaacttctggatacatcaacatcaccgatataaaaggcggtaaagtcgcttttggtgtccaagacgacgatagcaagctcacagctcactacgtcaaatccgtctttgaaaagccttacaacatctctgttcttcacatcagccaagtcttaacctcgccggaagcagaagctcccacggcgagtcccagcgacctcatcctcaccacaatcctcgaaaaacaagggtgcaaagctttctccgacatcttgaagtcaaccggcgccgacaaaacgttccaagataccgtagacggaggcttaacggtgttctgtccctccgacagcgctgtcggtaagttcatgccgaaattcaaatccctttctccggcgaacaagactgcgttagtgctttaccacggcatgccggtttaccagtcgttacaaatgcttagatcaggtaacggcgccgttaacacgttagcgacggaaggtaacaacaagtttgatttcaccgttcaaaataacggagaagacgtgacgctggagacggacgttgtgacggcgaaggtaatggggacgttaaaggatcaagagcctttgatagtttacaagattgataaagtgttgttgcctagagaaatctataaggccgttaagacgtccgctccagctcctaagtcgagtaagaaaaagcctaagaacgcggaggctgacgccgacggacctagcgccgatgctccgtcagatgatgatggtgaggtggctgacgataaaaacggcgccgtatcagcgatgattactcgaacaagtagtgtcgtaacggccattgtcgggctctgtttcggagtttggcttatgtgaagtgacgtggcatttacctcgctttgggaatcttgtttttctttttttctttgtgatctgtcggtttaatttattttacatattcttttttttgttcacgttgatacttggtgtggagatttggaataattaattgttccacttgtgttg

SEQ ID NO: 23490 - protein, 333 aa, Arabidopsis thaliana
  peptide (1)..(333): Ceres Seq. ID no. 12335233
MSSILSNGYSLYQIRNILSLHVLVDYFGTKKLHQITDGSTSTASMFQSTGSATGTSGYINITDIKGGKVAFGVQDDDSKLTAHYVKSVFEKPYNISVLHISQVLTSPEAEAPTASPSDLILTTILEKQGCKAFSDILKSTGADKTFQDTVDGGLTVFCPSDSAVGKFMPKFKSLSPANKTALVLYHGMPVYQSLQMLRSGNGAVNTLATEGNNKFDFTVQNNGEDVTLETDVVTAKVMGTLKDQEPLIVYKIDKVLLPREIYKAVKTSAPAPKSSKKKPKNAEADADGPSADAPSDDDGEVADDKNGAVSAMITRTSSVVTAIVGLCFGVWLM

SEQ ID NO: 23491 - protein, 289 aa, Arabidopsis thaliana
  peptide (1)..(289): Ceres Seq. ID no. 12335234
MFQSTGSATGTSGYINITDIKGGKVAFGVQDDDSKLTAHYVKSVFEKPYNISVLHISQVLTSPEAEAPTASPSDLILTTILEKQGCKAFSDILKSTGADKTFQDTVDGGLTVFCPSDSAVGKFMPKFKSLSPANKTALVLYHGMPVYQSLQMLRSGNGAVNTLATEGNNKFDFTVQNNGEDVTLETDVVTAKVMGTLKDQEPLIVYKIDKVLLPREIYKAVKTSAPAPKSSKKKPKNAEADADGPSADAPSDDDGEVADDKNGAVSAMITRTSSVVTAIVGLCFGVWLM

SEQ ID NO: 23492 - protein, 166 aa, Arabidopsis thaliana
  peptide (1)..(166): Ceres Seq. ID no. 12335235
MPKFKSLSPANKTALVLYHGMPVYQSLQMLRSGNGAVNTLATEGNNKFDFTVQNNGEDVTLETDVVTAKVMGTLKDQEPLIVYKIDKVLLPREIYKAVKTSAPAPKSSKKKPKNAEADADGPSADAPSDDDGEVADDKNGAVSAMITRTSSVVTAIVGLCFGVWLM

SEQ ID NO: 23493 - DNA, 1783 bp, Arabidopsis thaliana
  misc_feature (1)..(1783): Ceres Seq. ID no. 12335228
  misc_feature (1)..(1783): Ortholog of  Ceres SEQ ID NO 13599602 as cited in SEQ ID NO 0
aaagcggtgagtcatcttaccttataaatgatcacaaacccgaggactgtgagttttcgtgtagaacaaatccttctctgagaaaaaacaacagatccgaattttatctttaatcagccggaaaaaatggagaaagcgatcgagagacaacgcgttcttcttgagcatctccgaccttcttcttcttcttcgcacaattacgaggcttctctatctgcttctgcttgcttggctggggacagtgctgcatatcagaggacctctctctatggagatgatgttgtcattgtcgcggcacataggactccactatgcaagtccaaacgtggcaatttcaaggatacatatcccgatgatttgctcgcacctgttttgagggcattgatagagaagacgaatctaaacccaagtgaagtaggtgacattgttgtgggtactgttttggcacctggatctcagagagccagtgaatgcaggatggctgcgttctatgctggtttccctgaaaccgtggctgtcagaactgtgaatagacagtgctcatctgggcttcaggctgttgctgatgtagccgctgccattaaagcgggattttatgacattggtatcggggctggtttggagtccatgactaccaatccaatggcatgggaagggtcagtcaacccagcggtgaagaagtttgcacaagcgcagaattgtcttcttcctatgggtgttacgtcagaaaatgtagcacaacgctttggtgtctcaaggcaggagcaagatcaagctgctgttgactcgcacagaaaggcagctgctgctactgctgctggtaaattcaaggatgagatcattcctgttaagaccaagcttgttgacccgaagactggtgatgagaaacccattacagtttctgttgatgatggtatccgaccaaccacaactcttgcttctcttgggaagctgaagccagtgtttaagaaggatggcaccactactgctggaaattccagccaagtaagtgatggtgcaggagcggttctcctaatgaagagaagtgttgcaatgcaaaaaggacttcccgttcttggtgtattcaggacatttgctgcagttggtgttgaccctgcaatcatgggtatcggtccagcagttgccattcctgctgcagttaaggcggctggtttagaacttgatgacatcgacttgtttgagatcaatgaggcatttgcatctcagtttgtttattgccgtaacaaattgggacttgacccagagaaaatcaatgtcaacggaggtgcaatggccataggccatcctttgggcgctacaggagcgcgttgtgttgctacattgttgcacgagatgaaacgccgtggtaaagactgccgttttggagtagtgtcaatgtgcattgggacggggatgggtgcagcagctgtgtttgagagaggagatggagttgatgagcttcgcaacgcaaggaaagttgaagcgcaaggtcttttgtccaaggacgctcgctagagaggaccatgcaccaaaaccgtttttcacctcacctctctcttttctggtcttcttgtcactttcttcagatattattatagtttcgaataaagcacacaaccaatgtttgcctgagtcttgtgttgttcttgaccaggtcatgtgtttagtattttttttaagtgaagggggataatctttaaatcttttatatgtaagaatattgttcttctcgaatttcatcagttgttgcttctagaaattttagattttttgggtggcagcc

SEQ ID NO: 23494 - protein, 462 aa, Arabidopsis thaliana
  peptide (1)..(462): Ceres Seq. ID no. 12335229
MEKAIERQRVLLEHLRPSSSSSHNYEASLSASACLAGDSAAYQRTSLYGDDVVIVAAHRTPLCKSKRGNFKDTYPDDLLAPVLRALIEKTNLNPSEVGDIVVGTVLAPGSQRASECRMAAFYAGFPETVAVRTVNRQCSSGLQAVADVAAAIKAGFYDIGIGAGLESMTTNPMAWEGSVNPAVKKFAQAQNCLLPMGVTSENVAQRFGVSRQEQDQAAVDSHRKAAAATAAGKFKDEIIPVKTKLVDPKTGDEKPITVSVDDGIRPTTTLASLGKLKPVFKKDGTTTAGNSSQVSDGAGAVLLMKRSVAMQKGLPVLGVFRTFAAVGVDPAIMGIGPAVAIPAAVKAAGLELDDIDLFEINEAFASQFVYCRNKLGLDPEKINVNGGAMAIGHPLGATGARCVATLLHEMKRRGKDCRFGVVSMCIGTGMGAAAVFERGDGVDELRNARKVEAQGLLSKDAR

SEQ ID NO: 23495 - protein, 345 aa, Arabidopsis thaliana
  peptide (1)..(345): Ceres Seq. ID no. 12335230
MAAFYAGFPETVAVRTVNRQCSSGLQAVADVAAAIKAGFYDIGIGAGLESMTTNPMAWEGSVNPAVKKFAQAQNCLLPMGVTSENVAQRFGVSRQEQDQAAVDSHRKAAAATAAGKFKDEIIPVKTKLVDPKTGDEKPITVSVDDGIRPTTTLASLGKLKPVFKKDGTTTAGNSSQVSDGAGAVLLMKRSVAMQKGLPVLGVFRTFAAVGVDPAIMGIGPAVAIPAAVKAAGLELDDIDLFEINEAFASQFVYCRNKLGLDPEKINVNGGAMAIGHPLGATGARCVATLLHEMKRRGKDCRFGVVSMCIGTGMGAAAVFERGDGVDELRNARKVEAQGLLSKDAR

SEQ ID NO: 23496 - protein, 295 aa, Arabidopsis thaliana
  peptide (1)..(295): Ceres Seq. ID no. 12335231
MTTNPMAWEGSVNPAVKKFAQAQNCLLPMGVTSENVAQRFGVSRQEQDQAAVDSHRKAAAATAAGKFKDEIIPVKTKLVDPKTGDEKPITVSVDDGIRPTTTLASLGKLKPVFKKDGTTTAGNSSQVSDGAGAVLLMKRSVAMQKGLPVLGVFRTFAAVGVDPAIMGIGPAVAIPAAVKAAGLELDDIDLFEINEAFASQFVYCRNKLGLDPEKINVNGGAMAIGHPLGATGARCVATLLHEMKRRGKDCRFGVVSMCIGTGMGAAAVFERGDGVDELRNARKVEAQGLLSKDAR

SEQ ID NO: 23497 - DNA, 815 bp, Arabidopsis thaliana
  misc_feature (1)..(815): Ceres Seq. ID no. 12421912
  misc_feature (1)..(815): Ortholog of  Ceres SEQ ID NO 15179455 as cited in SEQ ID NO 0
aacaagtccaacttctctccttaagaaactctccttaagaattaagaaagagaccagaaacgaaaacctcatcaatcaaagctcaaaatcgccttcaatggatgctaagatcggacaattctttgactccgtcggtactttcttcagcggcagcgataagatcccatggtgcgacggagatgtcatcgctggatgtgaaagagaggttcgagaggccacagattctggcactgaagatcttaagaaagagtgcttgatgcgattgtcatgggcccttgttcattcccgtcaaacggaagatgttcaacgtggaatagccatgcttgaagcatctctggaaagcagtgcccctccattggaggaccgagagaagctctatcttcttgctgttgggtattacagaagtgggaattactcaaggagcaggcagctcgtggaccgctgtatcgagatgcaagctgattggagacaagctttggtcctaaagaagaccatcgaagacaaaatcacaaaggatggtgttatagggatagggatcacggctacagcctttggagctgtgggtctcatagccggtggtatcgtagcagcgatgtctcgcaagaaatgaaaaccacaaccatgacttcttctctgtgtatacaatggcagtttactttttttcacatttttttcttcttctttgagtgtgttctccactgcttacttcacaatctatgatatagaaaagtcgaagctatttgcttcgaattaacattttgcttcgaattaacattgtgccatgtcattaattagcatttttacataccattttt

SEQ ID NO: 23498 - protein, 202 aa, Arabidopsis thaliana
  peptide (1)..(202): Ceres Seq. ID no. 12421913
TSPTSLLKKLSLRIKKETRNENLINQSSKSPSMDAKIGQFFDSVGTFFSGSDKIPWCDGDVIAGCEREVREATDSGTEDLKKECLMRLSWALVHSRQTEDVQRGIAMLEASLESSAPPLEDREKLYLLAVGYYRSGNYSRSRQLVDRCIEMQADWRQALVLKKTIEDKITKDGVIGIGITATAFGAVGLIAGGIVAAMSRKK

SEQ ID NO: 23499 - protein, 170 aa, Arabidopsis thaliana
  peptide (1)..(170): Ceres Seq. ID no. 12421914
MDAKIGQFFDSVGTFFSGSDKIPWCDGDVIAGCEREVREATDSGTEDLKKECLMRLSWALVHSRQTEDVQRGIAMLEASLESSAPPLEDREKLYLLAVGYYRSGNYSRSRQLVDRCIEMQADWRQALVLKKTIEDKITKDGVIGIGITATAFGAVGLIAGGIVAAMSRKK

SEQ ID NO: 23500 - protein, 117 aa, Arabidopsis thaliana
  peptide (1)..(117): Ceres Seq. ID no. 12421915
MRLSWALVHSRQTEDVQRGIAMLEASLESSAPPLEDREKLYLLAVGYYRSGNYSRSRQLVDRCIEMQADWRQALVLKKTIEDKITKDGVIGIGITATAFGAVGLIAGGIVAAMSRKK

SEQ ID NO: 23501 - DNA, 1443 bp, Arabidopsis thaliana
  misc_feature (1)..(1443): Ceres Seq. ID no. 12601407
  misc_feature (1)..(1443): Ortholog of  Ceres SEQ ID NO 14314559 as cited in SEQ ID NO 52317
  misc_feature (1)..(1443): Ortholog of  Ceres SEQ ID NO 15174571 as cited in SEQ ID NO 53570
  misc_feature (1)..(1443): Ortholog of  Ceres SEQ ID NO 14314367 as cited in SEQ ID NO 57446
aaatcgtccccgtctcgtttccttcttcgctcgctgttcagattttgctttgaggctttaggctccccagatctctaatcgccgcagctttaagaaatggagactttcctattcacatctgagtctgtgaacgaaggacaccctgacaagctttgcgaccagatctctgatgcagtccttgatgcctgccttgagcaagaccctgatagcaaagttgcttgtgagacatgcaccaagaccaacatggtcatggttttcggtgagatcaccaccaaggctacgattgactacgagaagattgtccgtgacacttgccgttccattggattcatctctgacgatgttggtcttgatgctgacaaatgcaaagtccttgttaacattgaacaacagagcccagacattgctcaaggtgttcacggtcacttcaccaaacgtccagaagacattggagctggtgaccaaggacacatgtttggttatgccactgatgaaacccctgagctcatgcctttgagtcatgtccttgcaaccaagattggtgctcgtctcactgaagtcaggaagaatggaacttgccgttggttaagaccagatggcaagacccaagtcactgttgagtactacaatgacaatggcgctatggttccagtccgtgtccacaccgtcctgatctcaacccagcacgatgaaaccgttaccaatgacgagattgcgcgtgacctcaaggagcatgtgatcaaaccaatcatcccagagaaataccttgacgacaaaaccatcttccacctcaacccatcaggccggtttgtgatcgggggaccacacggtgatgctggtttaactggacgtaagatcatcattgacacatacggaggatggggagctcatggaggtggtgctttctcaggcaaagacccaaccaaagtcgacagaagtggagcttacatcgtgaggcaagcagcaaagagtgtggtggctaatggcatggctcgcagggctcttgtccaggtctcatacgccattggagtacccgagccattgtctgtcttcgttgacacttacggaacagggttgattccagacaaggagatcctgaagatcgtgaaagagacattcgatttcagaccaggaatgatgacaatcaacttggacttgaagagaggaggaaatggaaggtttcagaaaacggcagcgtatggacatttcggaagagacgaccctgacttcacctgggaggtcgtgaagccactcaagtgggacaaacctcaagcttaaacttgattttatgtttcttctgtctttttactttaaacatctaccatggaccaataatcaaatccctctgtttcttttttcttgtattattgatatgaaagtttctggtttgtttaaacaactaccatagaccaattttctctttcactataaattgtagtagtt

SEQ ID NO: 23502 - protein, 393 aa, Arabidopsis thaliana
  peptide (1)..(393): Ceres Seq. ID no. 12601408
METFLFTSESVNEGHPDKLCDQISDAVLDACLEQDPDSKVACETCTKTNMVMVFGEITTKATIDYEKIVRDTCRSIGFISDDVGLDADKCKVLVNIEQQSPDIAQGVHGHFTKRPEDIGAGDQGHMFGYATDETPELMPLSHVLATKIGARLTEVRKNGTCRWLRPDGKTQVTVEYYNDNGAMVPVRVHTVLISTQHDETVTNDEIARDLKEHVIKPIIPEKYLDDKTIFHLNPSGRFVIGGPHGDAGLTGRKIIIDTYGGWGAHGGGAFSGKDPTKVDRSGAYIVRQAAKSVVANGMARRALVQVSYAIGVPEPLSVFVDTYGTGLIPDKEILKIVKETFDFRPGMMTINLDLKRGGNGRFQKTAAYGHFGRDDPDFTWEVVKPLKWDKPQA

SEQ ID NO: 23503 - protein, 344 aa, Arabidopsis thaliana
  peptide (1)..(344): Ceres Seq. ID no. 12601409
MVMVFGEITTKATIDYEKIVRDTCRSIGFISDDVGLDADKCKVLVNIEQQSPDIAQGVHGHFTKRPEDIGAGDQGHMFGYATDETPELMPLSHVLATKIGARLTEVRKNGTCRWLRPDGKTQVTVEYYNDNGAMVPVRVHTVLISTQHDETVTNDEIARDLKEHVIKPIIPEKYLDDKTIFHLNPSGRFVIGGPHGDAGLTGRKIIIDTYGGWGAHGGGAFSGKDPTKVDRSGAYIVRQAAKSVVANGMARRALVQVSYAIGVPEPLSVFVDTYGTGLIPDKEILKIVKETFDFRPGMMTINLDLKRGGNGRFQKTAAYGHFGRDDPDFTWEVVKPLKWDKPQA

SEQ ID NO: 23504 - protein, 342 aa, Arabidopsis thaliana
  peptide (1)..(342): Ceres Seq. ID no. 12601410
MVFGEITTKATIDYEKIVRDTCRSIGFISDDVGLDADKCKVLVNIEQQSPDIAQGVHGHFTKRPEDIGAGDQGHMFGYATDETPELMPLSHVLATKIGARLTEVRKNGTCRWLRPDGKTQVTVEYYNDNGAMVPVRVHTVLISTQHDETVTNDEIARDLKEHVIKPIIPEKYLDDKTIFHLNPSGRFVIGGPHGDAGLTGRKIIIDTYGGWGAHGGGAFSGKDPTKVDRSGAYIVRQAAKSVVANGMARRALVQVSYAIGVPEPLSVFVDTYGTGLIPDKEILKIVKETFDFRPGMMTINLDLKRGGNGRFQKTAAYGHFGRDDPDFTWEVVKPLKWDKPQA

SEQ ID NO: 23505 - DNA, 753 bp, Arabidopsis thaliana
  misc_feature (1)..(753): Ceres Seq. ID no. 12338232
  misc_feature (1)..(753): Ortholog of  Ceres SEQ ID NO 15175519 as cited in SEQ ID NO 1110
  misc_feature (1)..(753): Ortholog of  Ceres SEQ ID NO 13637980 as cited in SEQ ID NO 58973
  misc_feature (1)..(753): Ortholog of  Ceres SEQ ID NO 12624081 as cited in SEQ ID NO 61729
  misc_feature (1)..(753): Ortholog of  Ceres SEQ ID NO 13599435 as cited in SEQ ID NO 0
aaaaacattcagagagaaaattcagcatttttgatagctcaagcacttgattctttccaaaggggtttcctgagatcacaaaggccaagtaacaatggcgaaaggagttgcagttttgaacagcagtgagggtgttacggggactatctttttcacccaggaaggcgatggtgtgaccactgtgagtggaacagtttctggccttaagcctggtcttcatggtttccatgtccatgctcttggtgacaccactaacggttgcatgtctactggtccacatttcaaccccgatggtaaaacacacggtgcccctgaggatgctaatcgacatgctggtgatctaggaaacatcactgttggagatgatggaactgccaccttcacaatcactgattgccagattcctcttactggaccaaactctattgttggtagggctattgttgtccatgcagaccctgatgacctcggaaagggaggccatgaactcagcctggctactggaaacgcaggcggccgtgttgcttgcggcatcattggtctccagggctaaagctgctacgtttccaaagaagagattgatgtaataaggaggtccaaccttagacctgggtttggtagttgtgtgtatcttctggtgtgtggctaaaaacctttgagcttagtgtggctcaaagcatctttaattcagacagaaaacagagaaaattccgtacttttattatttcatgaataaaaaagagttggtttact

SEQ ID NO: 23506 - protein, 152 aa, Arabidopsis thaliana
  peptide (1)..(152): Ceres Seq. ID no. 12338233
MAKGVAVLNSSEGVTGTIFFTQEGDGVTTVSGTVSGLKPGLHGFHVHALGDTTNGCMSTGPHFNPDGKTHGAPEDANRHAGDLGNITVGDDGTATFTITDCQIPLTGPNSIVGRAIVVHADPDDLGKGGHELSLATGNAGGRVACGIIGLQG

SEQ ID NO: 23507 - protein, 96 aa, Arabidopsis thaliana
  peptide (1)..(96): Ceres Seq. ID no. 12338234
MSTGPHFNPDGKTHGAPEDANRHAGDLGNITVGDDGTATFTITDCQIPLTGPNSIVGRAIVVHADPDDLGKGGHELSLATGNAGGRVACGIIGLQG

SEQ ID NO: 23508 - DNA, 1719 bp, Arabidopsis thaliana
  misc_feature (1)..(1719): Ceres Seq. ID no. 12723533
  misc_feature (1)..(1719): Ortholog of  Ceres SEQ ID NO 14314449 as cited in SEQ ID NO 52409
  misc_feature (1)..(1719): Ortholog of  Ceres SEQ ID NO 15177818 as cited in SEQ ID NO 59762
ggtcaaattaatagaagaagtaatataaagggggcaaaatgcaatacacatgaagtattaagattttatccattacttcacacatgacgcccttcgtctttttccttattctttctcctctcagaagagtttacttgttctggaaccctaaatctcgaatctggtaactcggatccgataaatcgttccagagatctgttacttctctattcaaggatctgttatcggtgcgaggatctacggattcttctgttcgcgcataatcggaaatggcagataacaattcaccacctggctctgtagaacagaaagcagatcaaattgttgaagctaatccattggtgaaggatgatacttcgctggaaaccatagttcgaaggttccaggattcaatgtcagaggcaaagactcataagttctgggagactcaacctgttgggcagtttaaggatattggggatacgagtttgcctgaaggtccgattgagcctgcaactccattatctgaggttaagcaagagccgtacaaccttccttctgtttacgagtggacgacatgtgatatgaactctgatgatatgtgttcagaggtatacaaccttctcaagaacaactatgttgaggatgatgagaatatgttcaggttcaattactccaaggagtttctaaggtgggcactacgtccaccgggttattaccagagctggcatattggagttcgagccaagacttcgaagaaactcgttgctttcatcagcggcgtgccagcaagaatcagggtgcgtgatgaggttgttaaaatggcagagatcaatttcttgtgtgttcacaagaagctcaggtctaagaggctcgctcctgtcatgatcaaggaggtgactagaagggttcacttggagaacatatggcaagcagcttatactgcaggagttatccttcctacaccaatcaccacctgtcaatactggcacaggtcattgaacccgaagaagctaattgatgttgggttttcaaggcttggtgcgagaatgacaatgagcagaaccatcaaactctacaagttaccagatgcaccgatcactcctggattcaggaaaatggaaccacgcgatgtccctgctgttacacggttgcttaggaactacctcagccagtttggagtcgcgactgactttgatgagaatgatgtcgagcattggctactcccaagagaagatgtcgtggacagttacctagtagaaagccctgaaactcacgatgtcactgacttctgcagcttctacactctcccttcaaccatcctcggtaacccgaactacactacattgaaagctgcgtattcttactacaatgtggccacacagacctcgtttcttcagctgatgaatgatgcgctaattgtctcaaagcaaaagggtttcgatgtgttcaacgcgttggatgtgatgcacaatgagagtttcttgaaagaactgaagtttgggccaggagatggacaacttcattactatctctacaattaccgtttgaaaagtgccttgaagccagcggaactcgggcttgttctcttataagctcaacaacttgatttgatggtatcaacaaacttgaaatttgtctctctttttttttcttcagtctgaactacttctcccatggtttactgaaactgagtttaattattttggcaatgcaattttggattttgcttttagtttc

SEQ ID NO: 23509 - protein, 434 aa, Arabidopsis thaliana
  peptide (1)..(434): Ceres Seq. ID no. 12723534
MADNNSPPGSVEQKADQIVEANPLVKDDTSLETIVRRFQDSMSEAKTHKFWETQPVGQFKDIGDTSLPEGPIEPATPLSEVKQEPYNLPSVYEWTTCDMNSDDMCSEVYNLLKNNYVEDDENMFRFNYSKEFLRWALRPPGYYQSWHIGVRAKTSKKLVAFISGVPARIRVRDEVVKMAEINFLCVHKKLRSKRLAPVMIKEVTRRVHLENIWQAAYTAGVILPTPITTCQYWHRSLNPKKLIDVGFSRLGARMTMSRTIKLYKLPDAPITPGFRKMEPRDVPAVTRLLRNYLSQFGVATDFDENDVEHWLLPREDVVDSYLVESPETHDVTDFCSFYTLPSTILGNPNYTTLKAAYSYYNVATQTSFLQLMNDALIVSKQKGFDVFNALDVMHNESFLKELKFGPGDGQLHYYLYNYRLKSALKPAELGLVLL

SEQ ID NO: 23510 - protein, 393 aa, Arabidopsis thaliana
  peptide (1)..(393): Ceres Seq. ID no. 12723535
MSEAKTHKFWETQPVGQFKDIGDTSLPEGPIEPATPLSEVKQEPYNLPSVYEWTTCDMNSDDMCSEVYNLLKNNYVEDDENMFRFNYSKEFLRWALRPPGYYQSWHIGVRAKTSKKLVAFISGVPARIRVRDEVVKMAEINFLCVHKKLRSKRLAPVMIKEVTRRVHLENIWQAAYTAGVILPTPITTCQYWHRSLNPKKLIDVGFSRLGARMTMSRTIKLYKLPDAPITPGFRKMEPRDVPAVTRLLRNYLSQFGVATDFDENDVEHWLLPREDVVDSYLVESPETHDVTDFCSFYTLPSTILGNPNYTTLKAAYSYYNVATQTSFLQLMNDALIVSKQKGFDVFNALDVMHNESFLKELKFGPGDGQLHYYLYNYRLKSALKPAELGLVLL

SEQ ID NO: 23511 - protein, 336 aa, Arabidopsis thaliana
  peptide (1)..(336): Ceres Seq. ID no. 12723536
MNSDDMCSEVYNLLKNNYVEDDENMFRFNYSKEFLRWALRPPGYYQSWHIGVRAKTSKKLVAFISGVPARIRVRDEVVKMAEINFLCVHKKLRSKRLAPVMIKEVTRRVHLENIWQAAYTAGVILPTPITTCQYWHRSLNPKKLIDVGFSRLGARMTMSRTIKLYKLPDAPITPGFRKMEPRDVPAVTRLLRNYLSQFGVATDFDENDVEHWLLPREDVVDSYLVESPETHDVTDFCSFYTLPSTILGNPNYTTLKAAYSYYNVATQTSFLQLMNDALIVSKQKGFDVFNALDVMHNESFLKELKFGPGDGQLHYYLYNYRLKSALKPAELGLVLL
